United States Patent Application Publication US 2024/0066114 A1 - sequence listing, part 12

SEQ ID NO: 16174 - protein, 1946 aa, Artificial Sequence
  SARS-CoV-2__MT641665.1__non-structural protein 3 (NSP3)
MAPTKVTFGDDTVIEVQGYKSVNITFELDERIDKVLNEKCSAYTVELGTEVNEFACVVADAVIKTLQPVSELLTPLGIDLDEWSMATYYLFDESGEFKLASHMYCSFYPPDEDEEEGDCEEEEFEPLTQYEYGTEDDYQGKPLEFGATSAALQPEEEQEEDWLDDDSQQTVGQQDGSEDNQTTTIQTIVEVQPQLEMELTPVVQTIEVNSFSGYLKLTDNVYIKNADIVEEAKKVKPTVVVNAANVYLKHGGGVAGALNKATNNAMQVESDDYIATNGPLKVVGSCVLSGHNLAKHCLHVVGPNVNKGEDIQLLKSAYENFNQHEVLLAPLLSAGIFGADPIHSLRVCVDTVRTNVYLAVFDKNLYDKLVSSFLEMKSEKQVEQKIAEIPKEEVKPFITESKPSVEQRKQDDKKIKACVEEVTTTLEETKFLTENLLLYIDINGNLHPDSATLVSDIDITFLKKDAPYIVGDVVQEGVLTAVVIPTKKAGGTTEMLAKALRKVPTDNYITTYPGQGLNGYTVEEAKTVLKKCKSAFYILPSIISNEKQEILGTVSWNLREMLAHAEETRKLMPVCVETKAIVSTIQRKYKGIKIQEGVVDYGARFYFYTSKTTVASLINTLNDLNETLVTMPLGYVTHGLNLEEAARYMRSLKVPATVSVSSPDAVTAYNGYLTSSSKTPEEHFIETISLAGSYKDWSYSGQSTQLGIEFLKRGDKSVYYTSNPTTFHLDGEVITFDNLKTLLSLREVRTIKVFTTVDNINLHTQVVDMSMTYGQQFGPTYLDGADVTKIKPHNSHEGKTFYVLPNDDTLRVEAFEYYHTTDPSFLGRYMSALNHTKKWKYPQVNGLTSIKWADNNCYLATALLTLQQIELKFNPPALQDAYYRARAGEAANFCALILAYCNKTVGELGDVRETMSYLFQHANLDSCKRVLNVVCKTCGQQQTTLKGVEAVMYMGTLSYEQFKKGVQIPCTCGKQATKYLVQQESPFVMMSAPPAQYELKHGTFTCASEYTGNYQCGHYKHITSKETLYCIDGALLTKSSEYKGPITDVFYKENSYTTTIKPVTYKLDGVVCTEIDPKLDNYYKKDNSYFTEQPIDLVPNQPYPNASFDNFKFVCDNIKFADDLNQLTGYKKPASRELKVTFFPDLNGDVVAIDYKHYTPSFKKGAKLLHKPIVWHVNNATNKATYKPNTWCIRCLWSTKPVETSNSFDVLKSEDAQGMDNLACEDLKPVSEEVVENPTIQKDVLECNVKTTEVVGDIILKPANNSLKITEEVGHTDLMAAYVDNSSLTIKKPNELSRVLGLKTLATHGLAAVNSVPWDTIANYAKPFLNKVVSTTTNIVTRCLNRVCTNYMPYFFTLLLQLCTFTRSTNSRIKASMPTTIAKNTVKSVGKFCLEASFNYLKSPNFSKLINIIIWFLLLSVCLGSLIYSTAALGVLMSNLGMPSYCTGYREGYLNSTNVTIATYCTGSIPCSVCLSGLDSLDTYPSLETIQITISSFKWDLTAFGLVAEWFLAYILFTRFFYVLGLAAIMQLFFSYFAVHFISNSWLMWLIINLVQMAPISAMVRMYIFFASFYYVWKSYVHVVDGCNSSTCMMCYKRNRATRVECTTIVNGVRRSFYVYANGGKGFCKLHNWNCVNCDTFCAGSTFISDEVARDLSLQFKRPINPTDQSSYIVDSVTVKNGSIHLYFDKAGQKTYERHSLSHFVNLDNLRANNTKGSLPINVIVFDGKSKCEESSAKSASVYYSQLMCQPILLLDQALVSDVGDSAEVAVKMFDAYVNTFSSTFNVPMEKLKTLVATAEAELAKNVSLDNVLSTFISAARQGFVDSDVETKDVVECLKLSHQSDIEVTGDSCNNYMLTYNKVENMTPRDLGACIDCSARHINAQVAKSHNIALIWNVKDFMSLSEQLRKQIRSAAKKNNLPFKLTCATTRQVVNVVTTKIALKGG

SEQ ID NO: 16175 - protein, 1946 aa, Artificial Sequence
  SARS-CoV-2__MT641667.1__non-structural protein 3 (NSP3)
MAPTKVTFGDDTVIEVQGYKSVNITFELDERIDKVLNEKCSAYTVELGTEVNEFACVVADAVIKTLQPVSELLTPLGIDLDEWSMATYYLFDESGEFKLASHMYCSFYPPDEDEEEGDCEEEEFEPSTQYEYGTEDDYQGKPLEFGATSAALQPEEEQEEDWLDDDSQQTVGQQDGSEDNQTTTIQTIVEVQPQLEMELTPVVQTIEVNSFSGYLKLTDNVYIKNADIVEEAKKVKPTVVVNAANVYLKHGGGVAGALNKATNNAMQVESDDYIATNGPLKVVGSCVLSGHNLAKHCLHVVGPNVNKGEDIQLLKSAYENFNQHEVLLAPLLSAGIFGADPIHSLRVCVDTVRTNVYLAVFDKNLYDKLVSSFLEMKSEKQVEQKIAEIPKEEVKPFITESKPSVEQRKQDDKKIKACVEEVTTTLEETKFLTENLLLYIDINGNLHPDSATLVSDIDITFLKKDAPYIVGDVVQEGVLTAVVIPTKKAGGTTEMLAKALRKVPTDNYITTYPGQGLNGYTVEEAKTVLKKCKSAFYILPSIISNEKQEILGTVSWNLREMLAHAEETRKLMPVCVETKAIVSTIQRKYKGIKIQEGVVDYGARFYFYTSKTTVASLINTLNDLNETLVTMPLGYVTHGLNLEEAARYMRSLKVPATVSVSSPDAVTAYNGYLTSSSKTPEEHFIETISLAGSYKDWSYSGQSTQLGIEFLKRGDKSVYYTSNPTTFHLDGEVITFDNLKTLLSLREVRTIKVFTTVDNINLHTQVVDMSMTYGQQFGPTYLDGADVTKIKPHNSHEGKTFYVLPNDDTLRVEAFEYYHTTDPSFLGRYMSALNHTKKWKYPQVNGLTSIKWADNNCYLATALLTLQQIELKFNPPALQDAYYRARAGEAANFCALILAYCNKTVGELGDVRETMSYLFQHANLDSCKRVLNVVCKTCGQQQTTLKGVEAVMYMGTLSYEQFKKGVQIPCTCGKQATKYLVQQESPFVMMSAPPAQYELKHGTFTCASEYTGNYQCGHYKHITSKETLYCIDGALLTKSSEYKGPITDVFYKENSYTTTIKPVTYKLDGVVCTEIDPKLDNYYKKDNSYFTEQPIDLVPNQPYPNASFDNFKFVCDNIKFADDLNQLTGYKKPASRELKVTFFPDLNGDVVAIDYKHYTPSFKKGAKLLHKPIVWHVNNATNKATYKPNTWCIRCLWSTKPVETSNSFDVLKSEDAQGMDNLACEDLKPVSEEVVENPTIQKDVLECNVKTTEVVGDIILKPANNSLKITEEVGHTDLMAAYVDNSSLTIKKPNELSRVLGLKTLATHGLAAVNSVPWDTIANYAKPFLNKVVSTTTNIVTRCLNRVCTNYMPYFFTLLLQLCTFTRSTNSRIKASMPTTIAKNTVKSVGKFCLEASFNYLKSPNFSKLINIIIWFLLLSVCLGSLIYSTAALGVLMSNLGMPSYCTGYREGYLNSTNVTIATYCTGSIPCSVCLSGLDSLDTYPSLETIQITISSFKWDLTAFGLVAEWFLAYILFTRFFYVLGLAAIMQLFFSYFAVHFISNSWLMWLIINLVQMAPISAMVRMYIFFASFYYVWKSYVHVVDGCNSSTCMMCYKRNRATRVECTTIVNGVRRSFYVYANGGKGFCKLHNWNCVNCDTFCAGSTFISDEVARDLSLQFKRPINPTDQSSYIVDSVTVKNGSIHLYFDKAGQKTYERHSLSHFVNLDNLRANNTKGSLPINVIVFDGKSKCEESSAKSASVYYSQLMCQPILLLDQALVSDVGDSAEVAVKMFDAYVNTFSSTFNVPMEKLKTLVATAEAELAKNVSLDNVLSTFISAARQGFVDSDVETKDVVECLKLSHQSDIEVTGDSCNNYMLTYNKVENMTPRDLGACIDCSARHINAQVAKSHNIALIWNVKDFMSLSEQLRKQIRSAAKKNNLPFKLTCATTRQVVNVVTTKIALKGG

SEQ ID NO: 16176 - protein, 1946 aa, Artificial Sequence
  SARS-CoV-2__MT641676.1__non-structural protein 3 (NSP3)
MAPTKVTFGDDTVIEVQGYKSVNITFELDERIDKVLNEKCSAYTVELGTEVNEFACVVADAVIKTLQPVSELLTPLGIDLDEWSMATYYLFDESGEFKLASHMYCSFYPPDEDEEEGDCEEEEFEPSTQYEYGTEDDYQGKPLEFGATSAALQPEEEQEEDWLDDDSQQTVGQQDGSEDNQTTTIQTIVEVQPQLEMELTPVVQTIEVNSFSGYLKLTDNVYIKNADIVEEAKKVKPTVVVNAANVYLKHGGGVAGALNKATNNAMQVESDDYIATNGPLKVVGSCVLSGHNLAKHCLHVVGPNVNKGEDIQLLKSAYENFNQHEVLLAPLLSAGIFGADPIHSLRVCVDTVRTNVYLAVFDKNLYDKLVSSFLEMKSEKQVEQKIAEIPKEEVKPFITESKPSVEQRKQDDKKIKACVEEVTTTLEETKFLTENLLLYIDINGNLHPDSATLVSDIDITFLKKDAPYIVGDVVQEGVLTAVVIPTKKAGGTTEMLAKALRKVPTDNYITTYPGQGLNGYTVEEAKTVLKKCKSAFYILPSIISNEKQEILGTVSWNLREMLAHAEETRKLMPVCVETKAIVSTIQRKYKGIKIQEGVVDYGARFYFYTSKTTVASLINTLNDLNETLVTMPLGYVTHGLNLEEAARYMRSLKVPATVSVSSPDAVTAYNGYLTSSSKTPEEHFIETISLAGSYKDWSYSGQSTQLGIEFLKRGDKSVYYTSNPTTFHLDGEVITFDNLKTLLSLREVRTIKVFTTVDNINLHTQVVDMSMTYGQQFGPTYLDGADVTKIKPHNSHEGKTFYVLPNDDTLRVEAFEYYHTTDPSFLGRYMSALNHTKKWKYPQVNGLTSIKWADNNCYLATALLTLQQIELKFNPPALQDAYYRARAGEAANFCALILAYCNKTVGELGDVRETMSYLFQHANLDSCKRVLNVVCKTCGQQQTTLKGVEAVMYMGTLSYEQFKKGVQIPCTCGKQATKYLVQQESPFVMMSAPPAQYELKHGTFTCASEYTGNYQCGHYKHITSKETLYCIDGALLTKSSEYKGPITDVFYKENSYTTTIKPVTYKLDGVVCTEIDPKLDNYYKKDNSYFTEQPIDLVPNQPYPNASFDNFKFVCDNIKFADDLNQLTGYKKPASRELKVTFFPDLNGDVVAIDYKHYTPSFKKGAKLLHKPIVWHVNNATNKATYKPNTWCIRCLWSKKPVETSNSFDVLKSEDAQGMDNLACEDLKPVSEEVVENPTIQKDVLECNVKTTEVVGDIILKPANNSLKITEEVGHTDLMAAYVDNSSLTIKKPNELSRVLGLKTLATHGLAAVNSVPWDTIANYAKPFLNKVVSTTTNIVTRCLNRVCTNYMPYFFTLLLQLCTFTRSTNSRIKASMPTTIAKNTVKSVGKFCLEASFNYLKSPNFSKLINIIIWFLLLSVCLGSLIYSTAALGVLMSNLGMPSYCTGYREGYLNSTNVTIATYCTGSIPCSVCLSGLDSLDTYPSLETIQITISSFKWDLTAFGLVAEWFLAYILFTRFFYVLGLAAIMQLFFSYFAVHFISNSWLMWLIINLVQMAPISAMVRMYIFFASFYYVWKSYVHVVDGCNSSTCMMCYKRNRATRVECTTIVNGVRRSFYVYANGGKGFCKLHNWNCVNCDTFCAGSTFISDEVARDLSLQFKRPINPTDQSSYIVDSVTVKNGSIHLYFDKAGQKTYERHSLSHFVNLDNLRANNTKGSLPINVIVFDGKSKCEESSAKSASVYYSQLMCQPILLLDQALVSDVGDSAEVAVKMFDAYVNTFSSTFNVPMEKLKTLVATAEAELAKNVSLDNVLSTFISAARQGFVDSDVETKDVVECLKLSHQSDIEVTGDSCNNYMLTYNKVENMTPRDLGACIDCSARHINAQVAKSHNIALIWNVKDFMSLSEQLRKQIRSAAKKNNLPFKLTCATTRQVVNVVTTKIALKGG

SEQ ID NO: 16177 - protein, 1946 aa, Artificial Sequence
  SARS-CoV-2__MT641692.1__non-structural protein 3 (NSP3)
MAPTKVTFGDDTVIEVQGYKSVNITFELDERIDKVLNEKCSAYTVELGTEVNEFACVVADAVIKTLQPVSELLTPLGIDLDEWSMATYYLFDESGDFKLASHMYCSFYPPDEDEEEGDCEEEEFEPSTQYEYGTEDDYQGKPLEFGATSAALQPEEEQEEDWLDDDSQQTVGQQDGSEDNQTTTIQTIVEVQPQLEMELTPVVQTIEVNSFSGYLKLTDNVYIKNADIVEEAKKVKPTVVVNAANVYLKHGGGVAGALNKATNNAMQVESDDYIATNGPLKVVGSCVLSGHNLAKHCLHVVGPNVNKGEDIQLLKSAYENFNQHEVLLAPLLSAGIFGADPIHSLRVCVDTVRTNVYLAVFDKNLYDKLVSSFLEMKSEKQVEQKIAEIPKEEVKPFITESKPSVEQRKQDDKKIKACVEEVTTTLEETKFLTENLLLYIDINGNLHPDSATLVSDIDITFLKKDAPYIVGDVVQEGVLTAVVIPTKKAGGTTEMLAKALRKVPTDNYITTYPGQGLNGYTVEEAKTVLKKCKSAFYILPSIISNEKQEILGTVSWNLREMLAHAEETRKLMPVCVETKAIVSTIQRKYKGIKIQEGVVDYGARFYFYTSKTTVASLINTLNDLNETLVTMPLGYVTHGLNLEEAARYMRSLKVPATVSVSSPDAVTAYNGYLTSSSKTPEEHFIETISLAGSYKDWSYSGQSTQLGIEFLKRGDKSVYYTSNPTTFHLDGEVITFDNLKTLLSLREVRTIKVFTTVDNINLHTQVVDMSMTYGQQFGPTYLDGADVTKIKPHNSHEGKTFYVLPNDDTLRVEAFEYYHTTDPSFLGRYMSALNHTKKWKYPQVNGLTSIKWADNNCYLATALLTLQQIELKFNPPALQDAYYRARAGEAANFCALILAYCNKTVGELGDVRETMSYLFQHANLDSCKRVLNVVCKTCGQQQTTLKGVEAVMYMGTLSYEQFKKGVQIPCTCGKQATKYLVQQESPFVMMSAPPAQYELKHGTFTCASEYTGNYQCGHYKHITSKETLYCIDGALLTKSSEYKGPITDVFYKENSYTTTIKPVTYKLDGVVCTEIDPKLDNYYKKDNSYFTEQPIDLVPNQPYPNASFDNFKFVCDNIKFADDLNQLTGYKKPASRELKVTFFPDLNGDVVAIDYKHYTPSFKKGAKLLHKPIVWHVNNATNKATYKPNTWCIRCLWSTKPVETSNSFDVLKSEDAQGMDNLACEDLKPVSEEVVENPTIQKDVLECNVKTTEVVGDIILKPANNSLKITEEVGHTDLMAAYVDNSSLTIKKPNELSRVLGLKTLATHGLAAVNSVPWDTIANYAKPFLNKVVSTTTNIVTRCLNRVCTNYMPYFFTLLLQLCTFTRSTNSRIKASMPTTIAKNTVKSVGKFCLEASFNYLKSPNFSKLINIIIWFLLLSVCLGSLIYSTAALGVLMSNLGMPSYCTGYREGYLNSTNVTIATYCTGSIPCSVCLSGLDSLDTYPSLETIQITISSFKWDLTAFGLVAEWFLAYILFTRFFYVLGLAAIMQLFFSYFAVHFISNSWLMWLIINLVQMAPISAMVRMYIFFASFYYVWKSYVHVVDGCNSSTCMMCYKRNRATRVECTTIVNGVRRSFYVYANGGKGFCKLHNWNCVNCDTFCAGSTFISDEVARDLSLQFKRPINPTDQSSYIVDSVTVKNGSIHLYFDKAGQKTYERHSLSHFVNLDNLRANNTKGSLPINVIVFDGKSKCEESSAKSASVYYSQLMCQPILLLDQALVSDVGDSAEVAVKMFDAYVNTFSSTFNVPMEKLKTLFATAEAELAKNVSLDNVLSTFISAARQGFVDSDVETKDVVECLKLSHQSDIEVTGDSCNNYMLTYNKVENMTPRDLGACIDCSARHINAQVAKSHNIALIWNVKDFMSLSEQLRKQIRSAAKKNNLPFKLTCATTRQVVNVVTTKIALKGG

SEQ ID NO: 16178 - protein, 1946 aa, Artificial Sequence
  SARS-CoV-2__MT641693.1__non-structural protein 3 (NSP3)
MAPTKVTFGDDTVIEVQGYKSVNITFELDERIDKVLNEKCSAYTVELGTEVNEFACVVADAVIKTLQPVSELLTPLGIDLDEWSMATYYLFDESGEFKLASHMYCSFYPPDEDEEEGDCEEEEFEPSTQYEYGTEDDYQGKPLEFGATSAALQPEEEQEEDWLDDDSQQTVGQQDGSEDNQTTTIQTIVEVQPQLEMELTPVVQTIEVNSFSGYLKLTDNVYIKNADIVEEAKKVKPTVVVNAANVYLKHGGGVAGALNKATNNAMQVESDDYIATNGPLKVVGSCVLSGHNLAKHCLHVVGPNVNKGEDIQLLKSAYENFNQHEVLLAPLLSAGIFGADPIHSLRVCVDTVRTNVYLAVFDKNLYDKLVSSFLEMKSEKQVEQKIAEIPKEEVKPFITESKPSVEQRKQDDKKIKACVEEVTTTLEETKFLTENLLLYIDINGNLHPDSATLVSDIDITFLKKDAPYIVGDVVQEGVLTAVVIPTKKAGGTTEMLAKALRKVPTDNYITTYPGQGLNGYTVEEAKTVLKKCKSAFYILPSIISNEKQEILGTVSWNLREMLAHAEETRKLMPVCVETKAIVSTIQRKYKGIKIQEGVVDYGARFYFYTSKTTVASLINTLNDLNETLVTMPLGYVTHGLNLEEAARYMRSLKVPATVSVSSPDAVTAYNGYLTSSSKTPEEHFIETISLAGSYKDWSYSGQSTQLGIEFLKRGDKSVYYTSNPTTFHLDGEVITFDNLKTLLSLREVRTIKVFTTVDNINLHTQVVDMSMTYGQQFGPTYLDGADVTKIKPHNSHEGKTFYVLPNDDTLRVEAFEYYHTTDPSFLGRYMSALNHTKKWKYPQVNGLTSIKWADNNCYLATALLTLQQIELKFNPPALQDAYYRARAGEAANFCALILAYCNKTVGELGDVRETMSYLFQHANLDSCKRVLNVVCKTCGQQQTTLKGVEAVMYMGTLSYEQFKKGVQIPCTCGKQATKYLVQQESPFVMMSAPPAQYELKHGTFTCASEYTGNYQCGHYKHITSKETLYCIDGALLTKSSEYKGPITDVFYKENSYTTTIKPVTYKLDGVVCTEIDPKLDNYYKKDNSYFTEQPIDLVPNQPYPNASFDNFKFVCDNIKFADDLNQLTGYKKPASRELKVTFFPDLNGDVVAIDYKHYTPSFKKGAKLLHKPIVWHVNNATNKATYKPNTWCIRCLWSTKPVETSNSFDVLKSEDAQGMDNLACEDLKPVSEEVVENPTIQKDVLECNVKTTEVVGDIILKPANNSLKITEEVGHTDLMAAYVDNSSLTIKKPNELSRVLGLKTLATHGLAAVNSVPWDTIANYAKPFLNKVVSTTTNIVTRCLNRVCTNYMPYFFTLLLQLCTFTRSTNSRIKASMPTTIAKNTVKSVGKFCLEASFNYLKSPNFFKLINIIIWFLLLSVCLGSLIYSTAALGVLMSNLGMPSYCTGYREGYLNSTNVTIATYCTGSIPCSVCLSGLDSLDTYPSLETIQITISSFKWDLTAFGLVAEWFLAYILFTRFFYVLGLAAIMQLFFSYFAVHFISNSWLMWLIINLVQMAPISAMVRMYIFFASFYYVWKSYVHVVDGCNSSTCMMCYKRNRATRVECTTIVNGVRRSFYVYANGGKGFCKLHNWNCVNCDTFCAGSTFISDEVARDLSLQFKRPINPTDQSSYIVDSVTVKNGSIHLYFDKAGQKTYERHSLSHFVNLDNLRANNTKGSLPINVIVFDGKSKCEESSAKSASVYYSQLMCQPILLLDQALVSDVGDSAEVAVKMFDAYVNTFSSTFNVPMEKLKTLVATAEAELAKNVSLDNVLSTFISAARQGFVDSDVETKDVVECLKLSHQSDIEVTGDSCNNYMLTYNKVENMTPRDLGACIDCSARHINAQVAKSHNIALIWNVKDFMSLSEQLRKQIRSAAKKNNLPFKLTCATTRQVVNVVTTKIALKGG

SEQ ID NO: 16179 - protein, 1946 aa, Artificial Sequence
  SARS-CoV-2__MT641740.1__non-structural protein 3 (NSP3)
MAPTKVTFGDDTVIEVQGYKSVNITFELDERIDKVLNEKCSAYTVELGTEVNEFACVVADAVIKTLQPVSELLTPLGIDLDEWSMATYYLFDESGEFKLASHMYCSFYPPDEDEEEGDCEEEEFEPSTQYEYGTEDDYQGKPLEFGATSAALQLEEEQEEDWLDDDSQQTVGQQDGSEDNQTTTIQTIVEVQPQLEMELTPVVQTIEVNSFSGYLKLTDNVYIKNADIVEEAKKVKPTVVVNAANVYLKHGGGVAGALNKATNNAMQVESDDYIATNGPLKVGGSCVLSGHNLAKHCLHVVGPNVNKGEDIQLLKSAYENFNQHEVLLAPLLSAGIFGADPIHSLRVCVDTVRTNVYLAVFDKNLYDKLVSSFLEMKSEKQVEQKIAEIPKEEVKPFITESKPSVEQRKQDDKKIKACVEEVTTTLEETKFLTENLLLYIDINGNLHPDSATLVSDIDITFLKKDAPYIVGDVVQEGVLTAVVIPTKKAGGTTEMLAKALRKVPTDNYITTYPGQGLNGYTVEEAKTVLKKCKSAFYILPSIISNEKQEILGTVSWNLREMLAHAEETRKLMPVCVETKAIVSTIQRKYKGIKIQEGVVDYGARFYFYTSKTTVASLINTLNDLNETLVTMPLGYVTHGLNLEEAARYMRSLKVPATVSVSSPDAVTAYNGYLTSSSKTPEEHFIETISLAGSYKDWSYSGQSTQLGIEFLKRGDKSVYYTSNPTTFHLDGEVITFDNLKTLLSLREVRTIKVFTTVDNINLHTQVVDMSMTYGQQFGPTYLDGADVTKIKPHNSHEGKTFYVLPNDDTLRVEAFEYYHTTDPSFLGRYMSALNHTKKWKYPQVNGLTSIKWADNNCYLATALLTLQQIELKFNPPALQDAYYRARAGEAANFCALILAYCNKTVGELGDVRETMSYLFQHANLDSCKRVLNVVCKTCGQQQTTLKGVEAVMYMGTLSYEQFKKGVQIPCTCGKQATKYLVQQESPFVMMSAPPAQYELKHGTFTCASEYTGNYQCGHYKHITSKETLYCIDGALLTKSSEYKGPITDVFYKENSYTTTIKPVTYKLDGVVCTEIDPKLDNYYKKDNSYFTEQPIDLVPNQPYPNASFDNFKFVCDNIKFADDLNQLTGYKKPASRELKVTFFPDLNGDVVAIDYKHYTPSFKKGAKLLHKPIVWHVNNATNKATYKPNIWCIRCLWSTKPVETSNSFDVLKSEDAQGMDNLACEDLKPVSEEVVENPTIQKDVLECNVKTTEVVGDIILKPANNSLKITEEVGHTDLMAAYVDNSSLTIKKPNELSRVLGLKTLATHGLAAVNSVPWDTIANYAKPFLNKVVSTTTNIVTRCLNRVCTNYMPYFFTLLLQLCTFTRSTNSRIKASMPTTIAKNTVKSVGKFCLEASFNYLKSPNFSKLINIIIWFLLLSVCLGSLIYSTAALGVLMSNLGMPSYCTGYREGYLNSTNVTIATYCTGSIPCSVCLSGLDSLDTYPSLETIQITISSFKWDLTAFGLVAEWFLAYILFTRFFYVLGLAAIMQLFFSYFAVHFISNSWLMWLIINLVQMAPISAMVRMYIFFASFYYVWKSYVHVVDGCNSSTCMMCYKRNRATRVECTTIVNGVRRSFYVYANGGKGFCKLHNWNCVNCDTFCAGSTFISDEVARDLSLQFKRPINPTDQSSYIVDSVTVKNGSIHLYFDKAGQKTYERHSLSHFVNLDNLRANNTKGSLPINVIVFDGKSKCEESSAKSASVYYSQLMCQPILLLDQALVSDVGDSAEVAVKMFDAYVNTFSSTFNVPMEKLKTLVATAEAELAKNVSLDNVLSTFISAARQGFVDSDVETKDVVECLKLSHQSDIEVTGDSCNNYMLTYNKVENMTPRDLGACIDCSARHINAQVAKSHNIALIWNVKDFMSLSEQLRKQIRSAAKKNNLPFKLTCATTRQVVNVVTTKIALKGG

SEQ ID NO: 16180 - protein, 1946 aa, Artificial Sequence
  SARS-CoV-2__MT641767.1__non-structural protein 3 (NSP3)
MAPTKVTFGDDTVIEVQGYKSVNITFELDERIDKVLNEKCSAYTVELGTEVNEFACVVADAVIKTLQPVSELLTPLGIDLDEWSMATYYLFDESGEFKLASHMYCSFYPPDEDEEEGDCEEEEFEPSTQYEYGTEDDYQGKPLEFGATSAALQPEEEQEEDWLDDDSQQTVGQQDGSEDNQTTTIQTIVEVQPQLEMELTPVVQTIEVNSFSGYLKLTDNVYIKNADIVEEAKKVKPTVVVNAANVYLKHGGGVAGALNKATNNAMQVESDDYIATNGPLKVGGSCVLSGHNLAKHCLHVVGPNVNKGEDIQLLKSAYENFNQHEVLLAPLLSAGIFGADPIHSLRVCVDTVRTNVYLAVFDKNLYDKLVSSFLEMKSEKQVEQKIAEIPKEEVKPFITESKPSVEQRKQDDKKIKACVEEVTTTLEETKFLTENLLLYIDINGNLHPDSATLVSDIDITFLKKDAPYIVGDVVQEGVLTAVVIPTKKAGGTTEMLAKALRKVPTDNYITTYPGQGLNGYTVEEAKTVLKKCKSAFYILPSIISNEKQEILGTVSWNLREMLAHAEETRKLMPVCVETKAIVSTIQRKYKGIKIQEGVVDYGARFYFYTSKTTVASLINTLNDLNETLVTMPLGYVTHGLNLEEAARYMRSLKVPATVSVSSPDAVTAYNGYLTSSSKTPEEHFIETISLAGSYKDWSYSGQSTQLGIEFLKRGDKSVYYTSNPTTFHLDGEVITFDNLKTLLSLREVRTIKVFTTVDNINLHTQVVDMSMTYGQQFGPTYLDGADVTKIKPHNSHEGKTFYVLPNDDTLRVEAFEYYHTTDPSFLGRYMSALNHTKKWKYPQVNGLTSIKWADNNCYLATALLTLQQIELKFNPPALQDAYYRARAGEAANFCALILAYCNKTVGELGDVRETMSYLFQHANLDSCKRVLNVVCKTCGQQQITLKGVEAVMYMGTLSYEQFKKGVQIPCTCGKQATKYLVQQESPFVMMSAPPAQYELKHGTFTCASEYTGNYQCGHYKHITSKETLYCIDGALLTKSSEYKGPITDVFYKENSYTTTIKPVTYKLDGVVCTEIDPKLDNYYKKDNSYFTEQPIDLVPNQPYPNASFDNFKFVCDNIKFADDLNQLTGYKKPASRELKVTFFPDLNGDVVAIDYKHYTPSFKKGAKLLHKPIVWHVNNATNKATYKPNTWCIRCLWSKKPVETSNSFDVLKSEDAQGMDNLACEDLKPVSEEVVENPTIQKDVLECNVKTTEVVGDIILKPANNSLKITEEVGHTDLMAAYVDNSSLTIKKPNELSRVLGLKTLATHGLAAVNSVPWDTIANYAKPFLNKVVSTTTNIVTRCLNRVCTNYMPYFFTLLLQLCTFTRSTNSRIKASMPTTIAKNTVKSVGKFCLEASFNYLKSPNFSKLINIIIWFLLLSVCLGSLIYSTAALGVLMSNLGMPSYCTGYREGYLNSTNVTIATYCTGSIPCSVCLSGLDSLDTYPSLETIQITISSFKWDLTAFGLVAEWFLAYILFTRFFYVLGLAAIMQLFFSYFAVHFISNSWLMWLIINLVQMAPISAMVRMYIFFASFYYVWKSYVHVVDGCNSSTCMMCYKRNRATRVECTTIVNGVRRSFYVYANGGKGFCKLHNWNCVNCDTFCAGSTFISDEVARDLSLQFKRPINPTDQSSYIVDSVTVKNGSIHLYFDKAGQKTYERHSLSHFVNLDNLRANNTKGSLPINVIVFDGKSKCEESSAKSASVYYSQLMCQPILLLDQALVSDVGDSAEVAVKMFDAYVNTFSSTFNVPMEKLKTLVATAEAELAKNVSLDNVLSTFISAARQGFVDSDVETKDVVECLKLSHQSDIEVTGDSCNNYMLTYNKVENMTPRDLGACIDCSARHINAQVAKSHNIALIWNVKDFMSLSEQLRKQIRSAAKKNNLPFKLTCATTRQVVNVVTTKIALKGG

SEQ ID NO: 16181 - protein, 1946 aa, Artificial Sequence
  SARS-CoV-2__MT642085.1__non-structural protein 3 (NSP3)
MAPTKVTFGDDTVIEVQGYKSVNITFELDERIDKVLNEKCSAYTVELGTEVNEFACVVADAVIKTLQPVSELLTPLGIDLDEWSMATYYLFDESGEFKLASHMYCSFYPPDEDEEEGDCEEEEFEPSTQYEYGTEDDYQGKPLEFGATSAALQPEEEQEEDWLDDDSQQTVGQQDGSEDNQTTTIQTIVEVQPQLEMELTPVVQTIEVNSFSGYLKLTDNVYIKNADIVEEAKKVKPTVVVNAANVYLKHGGGVAGALNKATNNAMQVESDDYIATNGPLKVGGSCVLSGHNLAKHCLHVVGPNVNKGEDIQLLKSAYENFNQHEVLLAPLLSAGIFGADPIHSLRVCVDTVRTNVYLAVFDKNLYDKLVSSFLEMKSEKQVEQKIAEIPKEEVKPFITESKPSVEQRKQDDKKIKACVEEVTTTLEETKFLTENLLLYIDINGNLHPDSATLVSDIDITFLKKDAPYIVGDVVQEGVLTAVVIPTKKAGGTTEMLAKALRKVPTDNYITTYPGQGLNGYTVEEAKTVLKKCKSAFYILPSIISNEKQEILGTVSWNLREMLAHAEETRKLMPVCVETKAIVSTIQRKYKGIKIQEGVVDYGARFYFYTSKTTVASLINTLNDLNETLVTMPLGYVTHGLNLEEAARYMRSLKVPATVSVSSPDAVTAYNGYLTSSSKTPEEHFIETISLAGSYKDWSYSGQSTQLGIEFLKRGDKSVYYTSNPTTFHLDGEVITFDNLKTLLSLREVRTIKVFTTVDNINLHTQVVDMSMTYGQQFGPTYLDGADVTKIKPHNSHEGKTFYVLPNDDTLRVEAFEYYHTTDPSFLGRYMSALNHTKKWKYPQVNGLTSIKWADNNCYLATALLTLQQIELKFNPPALQDAYYRARAGEAANFCALILAYCNKTVGELGDVRETMSYLFQHANLDSCKRVLNVVCKTCGQQQTTLKGVEAVMYMGTLSYEQFKKGVQIPCTCGKQATKYLVQQESPFVMMSAPPAQYELKHGTFTCASEYTGNYQCGHYKHITSKETLYCIDGALLTKSSEYKGPITDVFYKENSYTTTIKPVTYKLDGVVCTEIDPKLDNYYKKDNSYFTEQPIDLVPNQPYPNASFDNFKFVCDNIKFADDLNQLTGYKKPASRELKVTFFPDLNGDVVAIDYKHYTPSFKKGAKLLHKPIVWHVNNATNKATYKPNTWCIRCLWSTKPVETSNSFDVLKSEDAQGMDNLACEDLKPVSEEVVENPTIQKDVLECNVKTTEVVGDIILKPANNSLKITEEVGHTDLMAAYVDNSSLTIKKPNELSRVLGLKTLATHGLAAVNSVPWDTIANYAKPFLNRVVSTTTNIVTRCLNRVCTNYMPYFFTLLLQLCTFTRSTNSRIKASMPTTIAKNTVKSVGKFCLEASFNYLKSPNFSKLINIIIWFLLLSVCLGSLIYSTAALGVLMSNLGMPSYCTGYREGYLNSTNVTIATYCTGSIPCSVCLSGLDSLDTYPSLETIQITISSFKWDLTAFGLVAEWFLAYILFTRFFYVLGLAAIMQLFFSYFAVHFISNSWLMWLIINLVQMAPISAMVRMYIFFASFYYVWKSYVHVVDGCNSSTCMMCYKRNRATRVECTTIVNGVRRSFYVYANGGKGFCKLHNWNCVNCDTFCAGSTFISDEVARDLSLQFKRPINPTDQSSYIVDSVTVKNGSIHLYFDKAGQKTYERHSLSHFVNLDNLRANNTKGSLPINVIVFDGKSKCEESSAKSASVYYSQLMCQPILLLDQALVSDVGDSAEVAVKMFDAYVNTFSSTFNVPMEKLKTLVATAEAELAKNVSLDNVLSTFISAARQGFVDSDVETKDVVECLKLSHQSDIEVTGDSCNNYMLTYNKVENMTPRDLGACIDCSARHINAQVAKSHNIALIWNVKDFMSLSEQLRKQIRSAAKKNNLPFKLTCATTRQVVNVVTTKIALKGG

SEQ ID NO: 16182 - protein, 1946 aa, Artificial Sequence
  SARS-CoV-2__MT642087.1__non-structural protein 3 (NSP3)
MAPTKVTFGDDTVIEVQGYKSVNITFELDERIDKVLNEKCSAYTVELGTEVNEFACVVADAVIKTLQPVSELLTPLGIDLDEWSMATYYLFDESGEFKLASHMYCSFYPPDEDEEEGDCEEEEFEPLTQYEYGTEDDYQGKPLEFGATSAALQPEEEQEEDWLDDDSQQTVGQQDGSEDNQTTTIQTIVEVQPQLEMELTPVVQTIEVNSFSGYLKLTDNVYIKNADIVEEAKKVKPTVVVNAANVYLKHGGGVAGALNKATNNAMQVESDDYIATNGPLKVGGSCVLSGHNLAKHCLHVVGPNVNKGEDIQLLKSAYENFNQHEVLLAPLLSAGIFGADPIHSLRVCVDTVRTNVYLAVFDKNLYDKLVSSFLEMKSEKQVEQKIAEIPKEEVKPFITESKPSVEQRKQDDKKIKACVEEVTTTLEETKFLTENLLLYIDINGNLHPDSATLVSDIDITFLKKDAPYIVGDVVQEGVLTAVVIPTKKAGGTTEMLAKALRKVPTDNYITTYPGQGLNGYTVEEAKTVLKKCKSAFYILPSIISNEKQEILGTVSWNLREMLAHAEETRKLMPVCVETKAIVSTIQRKYKGIKIQEGVVDYGARFYFYTSKTTVASLINTLNDLNETLVTMPLGYVTHGLNLEEAARYMRSLKVPATVSVSSPDAVTAYNGYLTSSSKTPEEHFIETISLAGSYKDWSYSGQSTQLGIEFLKRGDKSVYYTSNPTTFHLDGEVITFDNLKTLLSLREVRTIKVFTTVDNINLHTQVVDMSMIYGQQFGPTYLDGADVTKIKPHNSHEGKTFYVLPNDDTLRVEAFEYYHTTDPSFLGRYMSALNHTKKWKYPQVNGLTSIKWADNNCYLATALLTLQQIELKFNPPALQDAYYRARAGEAANFCALILAYCNKTVGELGDVRETMSYLFQHANLDSCKRVLNVVCKTCGQQQTTLKGVEAVMYMGTLSYEQFKKGVQIPCTCGKQATKYLVQQESPFVMMSAPPAQYELKHGTFTCASEYTGNYQCGHYKHITSKETLYCIDGALLTKSSEYKGPITDVFYKENSYTTTIKPVTYKLDGVVCTEIDPKLDNYYKKDNSYFTEQPIDLVPNQPYPNASFDNFKFVCDNIKFADDLNQLTGYKKPASRELKVTFFPDLNGDVVAIDYKHYTPSFKKGAKLLHKPIVWHVNNATNKATYKPNTWCIRCLWSTKPVETSNSFDVLKSEDAQGMDNLACEDLKPVSEEVVENPTIQKDVLECNVKTTEVVGDIILKPANNSLKITEEVGHTDLMAAYVDNSSLTIKKPNELSRVLGLKTLATHGLAAVNSVPWDTIANYAKPFLNKVVSTTTNIVTRCLNRVCTNYMPYFFTLLLQLCTFTRSTNSRIKASMPTTIAKNTVKSVGKFCLEASFNYLKSPNFSKLINIIIWFLLLSVCLGSLIYSTAALGVLMSNLGMPSYCTGYREGYLNSTNVTIATYCTGSIPCSVCLSGLDSLDTYPSLETIQITISSFKWDLTAFGLVAEWFLAYILFTRFFYVLGLAAIMQLFFSYFAVHFISNSWLMWLIINLVQMAPISAMVRMYIFFASFYYVWKSYVHVVDGCNSSTCMMCYKRNRATRVECTTIVNGVRRSFYVYANGGKGFCKLHNWNCVNCDTFCAGSTFISDEVARDLSLQFKRPINPTDQSSYIVDSVTVKNGSIHLYFDKAGQKTYERHSLSHFVNLDNLRANNTKGSLPINVIVFDGKSKCEESSAKSASVYYSQLMCQPILLLDQALVSDVGDSAEVAVKMFDAYVNTFSSTFNVPMEKLKTLVATAEAELAKNVSLDNVLSTFISAARQGFVDSDVETKDVVECLKLSHQSDIEVTGDSCNNYMLTYNKVENMTPRDLGACIDCSARHINAQVAKSHNIALIWNVKDFMSLSEQLRKQIRSAAKKNNLPFKLTCATTRQVVNVVTTKIALKGG

SEQ ID NO: 16183 - protein, 1946 aa, Artificial Sequence
  SARS-CoV-2__MT642093.1__non-structural protein 3 (NSP3)
MAPTKVTFGDDTVIEVQGYKSVNITFELDERIDKVLNEKCSAYTVELGTEVNEFACVVADAVIKTLQPVSELLTPLGIDLDEWSMATYYLFDESGEFKLASHMYCSFYPPDEDEEEGDCEEEEFEPSTQYEYGTEDDYQGKPLEFGATSAALQPEEEQEEDWLDDDSQQTVGQQDGSEDNQTTTIQTIVEVQPQLEMELTPVVQTIEVNSFSGYLKLTDNVYIKNADIVEEAKKVKPTVVVNAANVYLKHGGGVAGALNKATNNAMQVESDDYIATNGPLKVGGSCVLSGHNLAKHCLHVVGPNVNKGEDIQLLKSAYENFNQHEVLLAPLLSAGIFGADPIHSLRVCVDTVRTNVYLAVFDKNLYDKLVSSFLEMKSEKQVEQKIAEIPKEEVKPFITESKPSVEQRKQDDKKIKACVEEVTTTLEETKFLTENLLLYIDINGNLHPDSATLVSDIDITFLKKDAPYIVGDVVQEGVLTAVVIPTKKAGGTTEMLAKALRKVPTDNYITTYPGQGLNGYTVEEAKTVLKKCKSAFYILPSIISNEKQEILGTVSWNLREMLAHAEETRKLMPVCVETKAIVSTIQRKYKGIKIQEGVVDYGARFYFYTSKTTVASLINTLNDLNETLVTMPLGYVTHGLNLEEAARYMRSLKVPATVSVSSPDAVTAYNGYLTSSSKTPEEHFIETISLAGSYKDWFYSGQSTQLGIEFLKRGDKSVYYTSNPTTFHLDGEVITFDNLKTLLSLREVRTIKVFTTVDNINLHTQVVDMSMTYGQQFGPTYLDGADVTKIKPHNSHEGKTFYVLPNDDTLRVEAFEYYHTTDPSFLGRYMSALNHTKKWKYPQVNGLTSIKWADNNCYLATALLTLQQIELKFNPPALQDAYYRARAGEAANFCALILAYCNKTVGELGDVRETMSYLFQHANLDSCKRVLNVVCKTCGQQQTTLKGVEAVMYMGTLSYEQFKKGVQIPCTCGKQATKYLVQQESPFVMMSAPPAQYELKHGTFTCASEYTGNYQCGHYKHITSKETLYCIDGALLTKSSEYKGPITDVFYKENSYTTTIKPVTYKLDGVVCTEIDPKLDNYYKKDNSYFTEQPIDLVPNQPYPNASFDNFKFVCDNIKFADDLNQLTGYKKPASRELKVTFFPDLNGDVVAIDYKHYTPSFKKGAKLLHKPIVWHVNNATNKATYKPNTWCIRCLWSTKPVETSNSFDVLKSEDAQGMDNLACEDLKPVSEEVVENPTIQKDVLECNVKTTEVVGDIILKPANNSLKITEEVGHTDLMAAYVDNSSLTIKKPNELSRVLGLKTLATHGLAAVNSVPWDTIANYAKPFLNKVVSTTTNIVTRCLNRVCTNYMPYFFTLLLQLCTFTRSTNSRIKASMPTTIAKNTVKSVGKFCLEASFNYLKSPNFSKLINIIIWFLLLSVCLGSLIYSTAALGVLMSNLGMPSYCTGYREGYLNSTNVTIATYCTGSIPCSVCLSGLDSLDTYPSLETIQITISSFKWDLTAFGLVAEWFLAYILFTRFFYVLGLAAIMQLFFSYFAVHFISNSWLMWLIINLVQMAPISAMVRMYIFFASFYYVWKSYVHVVDGCNSSTCMMCYKRNRATRVECTTIVNGVRRSFYVYANGGKGFCKLHNWNCVNCDTFCAGSTFISDEVARDLSLQFKRPINPTDQSSYIVDSVTVKNGSIHLYFDKAGQKTYERHSLSHFVNLDNLRANNTKGSLPINVIVFDGKSKCEESSAKSASVYYSQLMCQPILLLDQALVSDVGDSAEVAVKMFDAYVNTFSSTFNVPMEKLKTLVATAEAELAKNVSLDNVLSTFISAARQGFVDSDVETKDVVECLKLSHQSDIEVTGDSCNNYMLTYNKVENMTPRDLGACIDCSARHINAQVAKSHNIALIWNVKDFMSLSEQLRKQIRSAAKKNNLPFKLTCATTRQVVNVVTTKIALKGG

SEQ ID NO: 16184 - protein, 1946 aa, Artificial Sequence
  SARS-CoV-2__MT642111.1__non-structural protein 3 (NSP3)
MAPTKVTFGDDTVIEVQGYKSVNITFELDERIDKVLNEKCSAYTVELGTEVNEFACVVADAVIKTLQPVSELLTPLGIDLDEWSMATYYLFDESGEFKLASHMYCSFYPPDEDEEEGDCEEEEFEPSTQYEYGTEDDYQGKPLEFGATSAALQPEEEQEEDWLDDDSQQTVGQQDGSEDNQTTTIQTIVEVQPQLEMELTPVVQTIEVNSFSGYLKLTDNVYIKNADIVEEAKKVKPTVVVNAANVYLKHGGGVAGALNKATNNAMQVESDDYIATNGPLKVGGSCVLSGHNLAKHCLHVVGPNVNKGEDIQLLKSAYENFNQHEVLLAPLLSAGIFGADPIHSLRVCVDTVRTNVYLAVFDKNLYDKLVSSFLEMKSEKQVEQKIAEIPKEEVKPFITESKPSVEQRKQDDKKIKACVEEVTTTLEETKFLTENLLLYIDINGNLHPDSATLVSDIDITFLKKDAPYIVGDVVQEGVLTAVVIPTKKAGGTTEMLAKALRKVPTDNYITTYPGQGLNGYTVEEAKTVLKKCKSAFYILPSIISNEKQEILGTVSWNLREMLAHAEETRKLMPVCVETKAIVSTIQRKYKGIKIQEGVVDYGARFYFYTSKTTVASLINTLNDLNETLVTMPLGYVTHGLNLEEAARYMRSLKVPATVSVSSPDAVTAYNGYLTSSSKTPEEHFIETISLAGSYKDWSYSGQSTQLGIEFLKRGDKSVYYTSNSTTFHLDGEVITFDNLKTLLSLREVRTIKVFTTVDNINLHTQVVDMSMTYGQQFGPTYLDGADVTKIKPHNSHEGKTFYVLPNDDTLRVEAFEYYHTTDPSFLGRYMSALNHTKKWKYPQVNGLTSIKWADNNCYLATALLTLQQIELKFNPPALQDAYYRARAGEAANFCALILAYCNKTVGELGDVRETMSYLFQHANLDSCKRVLNVVCKTCGQQQTTLKGVEAVMYMGTLSYEQFKKGVQIPCTCGKQATKYLVQQESPFVMMSAPPAQYELKHGTFTCASEYTGNYQCGHYKHITSKETLYCIDGALLTKSSEYKGPITDVFYKENSYTTTIKPVTYKLDGVVCTEIDPKLDNYYKKDNSYFTEQPIDLVPNQPYPNASFDNFKFVCDNIKFADDLNQLTGYKKPASRELKVTFFPDLNGDVVAIDYKHYTPSFKKGAKLLHKPIVWHVNNATNKATYKPNTWCIRCLWSTKPVETSNSFDVLKSEDAQGMDNLACEDLKPVSEEVVENPTIQKDVLECNVKTTEVVGDIILKPANNSLKITEEVGHTDLMAAYVDNSSLTIKKPNELSRVLGLKTLATHGLAAVNSVPWDTIANYAKPFLNKVVSTTTNIVTRCLNRVCTNYMPYFFTLLLQLCTFTRSTNSRIKASMPTTIAKNTVKSVGKFCLEASFNYLKSPNFSKLINIIIWFLLLSVCLGSLIYSTAALGVLMSNLGMPSYCTGYREGYLNSTNVTIATYCTGSIPCSVCLSGLDSLDTYPSLETIQITISSFKWDLTAFGLVAEWFLAYILFTRFFYVLGLAAIMQLFFSYFAVHFISNSWLMWLIINLVQMAPISAMVRMYIFFASFYYVWKSYVHVVDGCNSSTCMMCYKRNRATRVECTTIVNGVRRSFYVYANGGKGFCKLHNWNCVNCDTFCAGSTFISDEVARDLSLQFKRPINPTDQSSYIVDSVTVKNGSIHLYFDKAGQKTYERHSLSHFVNLDNLRANNTKGSLPINVIVFDGKSKCEESSAKSASVYYSQLMCQPILLLDQALVSDVGDSAEVAVKMFDAYVNTFSSTFNVPMEKLKTLVATAEAELAKNVSLDNVLSTFISAARQGFVDSDVETKDVVECLKLSHQSDIEVTGDSCNNYMLTYNKVENMTPRDLGACIDCSARHINAQVAKSHNIALIWNVKDFMSLSEQLRKQIRSAAKKNNLPFKLTCATTRQVVNVVTTKIALKGG

SEQ ID NO: 16185 - protein, 1946 aa, Artificial Sequence
  SARS-CoV-2__MT642138.1__non-structural protein 3 (NSP3)
MAPTKVTFGDDTVIEVQGYKSVNITFELDERIDKVLNEKCSAYTVELGTEVNEFACVVADAVIKTLQPVSELLTPLGIDLDEWSMATYYLFDESGEFKLASHMYCSFYPPDEDEEEGDCEEEEFEPSTQYEYGTEDDYQGKPLEFGATSAALQPEEEQEEDWLDDDSQQTVGQQDGSEDNQTTTIQTIVEVQPQLEMELTPVVQTIEVNSFSGYLKLTDNVYIKNADIVEEAKKVKPTVVVNAANVYLKHGGGVAGALNKATNNAMQVESDDYIATNGPLKVGGSCVLSGHNLAKHCLHVVGPNVNKGEDIQLLKSAYENFNQHEVLLAPLLSAGIFGADPIHSLRVCVDTVRTNVYLAVFDKNLYDKLVSSFLEMKSEKQVEQKIAEIPKEEVKPFITESKPSVEQRKQDDKKIKACVEEVTTTLEETKFLTENLLLYIDINGNLHPDSATLVSDIDITFLKKDAPYIVGDVVQEGVLTAVVIPTKKAGGTTEMLAKALRKVPTDNYITTYPGQGLNGYTVEEAKTVLKKCKSAFYILPSIISNEKQEILGTVSWNLREMLAHAEETRKLMPVCVETKAIVSTIQRKYKGIKIQEGVVDYGARFYFYTSKTTVASLINTLNDLNETLVTMPLGYVTHGLNLEEAARYMRSLKVPATVSVSSPDAVTAYNGYLTSSSKTPEERFIETISLAGSYKDWSYSGQSTQLGIEFLKRGDKSVYYTSNPTTFHLDGEVITFDNLKTLLSLREVRTIKVFTTVDNINLHTQVVDMSMTYGQQFGPTYLDGADVTKIKPHNSHEGKTFYVLPNDDTLRVEAFEYYHTTDPSFLGRYMSALNHTKKWKYPQVNGLTSIKWADNNCYLATALLTLQQIELKFNPPALQDAYYRARAGEAANFCALILAYCNKTVGELGDVRETMSYLFQHANLDSCKRVLNVVCKTCGQQQTTLKGVEAVMYMGTLSYEQFKKGVQIPCTCGKQATKYLVQQESPFVMMSAPPAQYELKHGTFTCASEYTGNYQCGHYKHITSKETLYCIDGALLTKSSEYKGPITDVFYKENSYTTTIKPVTYKLDGVVCTEIDPKLDNYYKKDNSYFTEQPIDLVPNQPYPNASFDNFKFVCDNIKFADDLNQLTGYKKPASRELKVTFFPDLNGDVVAIDYKHYTPSFKKGAKLLHKPIVWHVNNATNKATYKPNTWCIRCLWSTKPVETSNSFDVLKSEDAQGMDNLACEDLKPVSEEVVENPTIQKDVLECNVKTTEVVGDIILKPANNSLKITEEVGHTDLMAAYVDNSSLTIKKPNELSRVLGLKTLATHGLAAVNSVPWDTIANYAKPFLNKVVSTTTNIVTRCLNRVCTNYMPYFFTLLLQLCTFTRSTNSRIKASMPTTIAKNTVKSVGKFCLEASFNYLKSPNFSKLINIIIWFLLLSVCLGSLIYSTAALGVLMSNLGMPSYCTGYREGYLNSTNVTIATYCTGSIPCSVCLSGLDSLDTYPSLETIQITISSFKWDLTAFGLVAEWFLAYILFTRFFYVLGLAAIMQLFFSYFAVHFISNSWLMWLIINLVQMAPISAMVRMYIFFASFYYVWKSYVHVVDGCNSSTCMMCYKRNRATRVECTTIVNGVRRSFYVYANGGKGFCKLHNWNCVNCDTFCAGSTFISDEVARDLSLQFKRPINPTDQSSYIVDSVTVKNGSIHLYFDKAGQKTYERHSLSHFVNLDNLRANNTKGSLPINVIVFDGKSKCEESSAKSASVYYSQLMCQPILLLDQALVSDVGDSAEVAVKMFDAYVNTFSSTFNVPMEKLKTLVATAEAELAKNVSLDNVLSTFISAARQGFVDSDVETKDVVECLKLSHQSDIEVTGDSCNNYMLTYNKVENMTPRDLGACIDCSARHINAQVAKSHNIALIWNVKDFMSLSEQLRKQIRSAAKKNNLPFKLTCATTRQVVNVVTTKIALKGG

SEQ ID NO: 16186 - protein, 1946 aa, Artificial Sequence
  SARS-CoV-2__MT642144.1__non-structural protein 3 (NSP3)
MAPTKVTFGDDTVIEVQGYKSVNITFELDERIDKVLNEKCSAYTVELGTEVNEFACVVADAVIKTLQPVSELLTPLGIDLDEWSMATYYLFDESGEFKLASHMYCSFYPPDEDEEEGDCEEEEFEPSTQYEYGTEDDYQGKPLEFGATSAALQPEEEQEEDWLDDDSQQTVGQQDGSEDNQTTTIQTIVEVQPQLETELTPVVQTIEVNSFSGYLKLTDNVYIKNADIVEEAKKVKPTVVVNAANVYLKHGGGVAGALNKATNNAMQVESDDYIATNGPLKVGGSCVLSGHNLAKHCLHVVGPNVNKGEDIQLLKSAYENFNQHEVLLAPLLSAGIFGADPIHSLRVCVDTVRTNVYLAVFDKNLYDKLVSSFLEMKSEKQVEQKIAEIPKEEVKPFITESKPSVEQRKQDDKKIKACVEEVTTTLEETKFLTENLLLYIDINGNLHPDSATLVSDIDITFLKKDAPYIVGDVVQEGVLTAVVIPTKKAGGTTEMLAKALRKVPTDNYITTYPGQGLNGYTVEEAKTVLKKCKSAFYILPSIISNEKQEILGTVSWNLREMLAHAEETRKLMPVCVETKAIVSTIQRKYKGIKIQEGVVDYGARFYFYTSKTTVASLINTLNDLNETLVTMPLGYVTHGLNLEEAARYMRSLKVPATVSVSSPDAVTAYNGYLTSSSKTPEERFIETISLAGSYKDWSYSGQSTQLGIEFLKRGDKSVYYTSNPTTFHLDGEVITFDNLKTLLSLREVRTIKVFTTVDNINLHTQVVDMSMTYGQQFGPTYLDGADVTKIKPHNSHEGKTFYVLPNDDTLRVEAFEYYHTTDPSFLGRYMSALNHTKKWKYPQVNGLTSIKWADNNCYLATALLTLQQIELKFNPPALQDAYYRARAGEAANFCALILAYCNKTVGELGDVRETMSYLFQHANLDSCKRVLNVVCKTCGQQQTTLKGVEAVMYMGTLSYEQFKKGVQIPCTCGKQATKYLVQQESPFVMMSAPPAQYELKHGTFTCASEYTGNYQCGHYKHITSKETLYCIDGALLTKSSEYKGPITDVFYKENSYTTTIKPVTYKLDGVVCTEIDPKLDNYYKKDNSYFTEQPIDLVPNQPYPNASFDNFKFVCDNIKFADDLNQLTGYKKPASRELKVTFFPDLNGDVVAIDYKHYTPSFKKGAKLLHKPIVWHVNNATNKATYKPNTWCIRCLWSTKPVETSNSFDVLKSEDAQGMDNLACEDLKPVSEEVVENPTIQKDVLECNVKTTEVVGDIILKPANNSLKITEEVGHTDLMAAYVDNSSLTIKKPNELSRVLGLKTLATHGLAAVNSVPWDTIANYAKPFLNKVVSTTTNIVTRCLNRVCTNYMPYFFTLLLQLCTFTRSTNSRIKASMPTTIAKNTVKSVGKFCLEASFNYLKSPNFSKLINIIIWFLLLSVCLGSLIYSTAALGVLMSNLGMPSYCTGYREGYLNSTNVTIATYCTGSIPCSVCLSGLDSLDTYPSLETIQITISSFKWDLTAFGLVAEWFLAYILFTRFFYVLGLAAIMQLFFSYFAVHFISNSWLMWLIINLVQMAPISAMVRMYIFFASFYYVWKSYVHVVDGCNSSTCMMCYKRNRATRVECTTIVNGVRRSFYVYANGGKGFCKLHNWNCVNCDTFCAGSTFISDEVARDLSLQFKRPINPTDQSSYIVDSVTVKNGSIHLYFDKAGQKTYERHSLSHFVNLDNLRANNTKGSLPINVIVFDGKSKCEESSAKSASVYYSQLMCQPILLLDQALVSDVGDSAEVAVKMFDAYVNTFSSTFNVPMEKLKTLVATAEAELAKNVSLDNVLSTFISAARQGFVDSDVETKDVVECLKLSHQSDIEVTGDSCNNYMLTYNKVENMTPRDLGACIDCSARHINAQVAKSHNIALIWNVKDFMSLSEQLRKQIRSAAKKNNLPFKLTCATTRQVVNVVTTKIALKGG

SEQ ID NO: 16187 - protein, 1946 aa, Artificial Sequence
  SARS-CoV-2__MT642158.1__non-structural protein 3 (NSP3)
MAPTKVTFGDDTVIEVQGYKSVNITFELDERIDKVLNEKCSAYTVELGTEVNEFACVVADAVIKTLQPVSELLTPLGIDLDEWSMATYYLFDESGEFKLASHMYCSFYPPDEDEEEGDCEEEEFEPSTQYEYGTEDDYQGKPLEFGATSAALQPEEEQEEDWLDDDSQQTVGQQDGSEDNQTTTIQTIVEVQPQLEMELTPVVQTIEVNSFSGYLKLTDNVYIKNADIVEEAKKVKPTVVVNAANVYLKHGGGVAGALNKATNNAMQVESDDYIATNGPLKVGGSCVLSGHNLAKHCLHVVGPNVNKGEDIQLLKSAYENFNQHEVLLAPLLSAGIFGADPIHSLRVCVDTVRTNVYLAVFDKNLYDKLVSSFLEMKSEKQVEQKIAEIPKEEVKPFITESKPSVEQRKQDDKKIKACVEEVTTTLEETKFLTENLLLYIDINGNLHPDSATLVSDIDITFLKKDAPYIVGDVVQEGVLTAVVIPTKKAGGTTEMLAKALRKVPTDNYITTYPGQGLNGYTVEEAKTVLKKCKSAFYILPSIISNEKQEILGTVSWNLREMLAHAEETRKLMPVCVETKAIVSTIQRKYKGIKIQEGVVDYGARFYFYTSKTTVASLINTLNDLNETLVTMPLGYVTHGLNLEEAARYMRSLKVPATVSVSSPDAVTAYNGYLTSSSKTPEEHFIETISLAGSYKDWSYSGQSTQLGIEFLKRGDKSVYYTSNPTTFHLDGEVITFDNLKTLLSLREVRTIKVFTTVDNINLHTQVVDMSMTYGQQFGPTYLDGADVTKIKPHNSHEGKTFYVLPNDDTLRVEAFEYYHTTDPSFLGRYMSALNHTKKWKYPQVNGLTSIKWADNNCYLATALLTLQQIELKFNPPALQDAYYRARAGEAANFCALILAYCNKTVGELGDVRETMSYLFQHANLDSCKRVLNVVCKTCGQQQTTLKGVEAVMYMGTLSYEQFKKGVQIPCTCGKQATKYLVQQESPFVMMSAPPAQYELKHGTFTCASEYTGNYQCGHYKHITSKETLYCIDGALLTKSSEYKGPITDVFYKENSYTTTIKPVTYKLDGVVCTEIDPKLDNYYKKDNSYFTEQPIDLVPNQPYPNASFDNFKFVCDNIKFADDLNQLTGYKKPASRELKVTFFPDLNGDVVAIDYKHYTPSFKKGAKLLHKPIVWHVNNATNKATYKPNTWCIRCLWSTKPVETSNSFDVLKSEDAQGMDNLACEDLKPVSEEVVENPTIQKDVLECNVKTTEVVGDIILKPANNSLKITEEVGHTDLMAAYVDNSSLTIKKPNELSRVLGLKTLATHGLAAVNSVPWDTIANYAKPFLNKVVSTTTNIVTRCLNRVCTNYMPYFFTLLLQLCTFTRSTNSRIKASMPTTIAKNTVKSVGKFCLEASFNYLKSPNFSKLINIIIWFLLLSVCLGSLIYSTAALGVLMSNLGMPSSCTGYREGYLNSTNVTIATYCTGSIPCSVCLSGLDSLDTYPSLETIQITISSFKWDLTAFGLVAEWFLAYILFTRFFYVLGLAAIMQLFFSYFAVHFISNSWLMWLIINLVQMAPISAMVRMYIFFASFYYVWKSYVHVVDGCNSSTCMMCYKRNRATRVECTTIVNGVRRSFYVYANGGKGFCKLHNWNCVNCDTFCAGSTFISDEVARDLSLQFKRPINPTDQSSYIVDSVTVKNGSIHLYFDKAGQKTYERHSLSHFVNLDNLRANNTKGSLPINVIVFDGKSKCEESSAKSASVYYSQLMCQPILLLDQALVSDVGDSAEVAVKMFDAYVNTFSSTFNVPMEKLKTLVATAEAELAKNVSLDNVLSTFISAARQGFVDSDVETKDVVECLKLSHQSDIEVTGDSCNNYMLTYNKVENMTPRDLGACIDCSARHINAQVAKSHNIALIWNVKDFMSLSEQLRKQIRSAAKKNNLPFKLTCATTRQVVNVVTTKIALKGG

SEQ ID NO: 16188 - protein, 1946 aa, Artificial Sequence
  SARS-CoV-2__MT642161.1__non-structural protein 3 (NSP3)
MAPTKVTFGDDTVIEVQGYKSVNITFELDERIDKVLNEKCSAYTVELGTEVNEFACVVADAVIKTLQPVSELLTPLGIDLDEWSMATYYLFDESGEFKLASHMYCSFYPPDEDEEEGDCEEEEFEPSTQYEYGTEDDYQGKPLEFGATSAALQPEEEQEEDWLDDDSQQTVGQQDGSEDNQTTTIQTIVEVQPQLEMELTPVVQTIEVNSFSGYLKLTDNVYIKNADIVEEAKKVKPTVVVNAANVYLKHGGGVAGALNKATNNAMQVESDDYIATNGPLKVGGSCVLSGHNLAKHCLHVVGPNVNKGEDIQLLKSAYENFNQHEVLLAPLLSAGIFGADPIHSLRVCVDTVRTNVYLAVFDKNLYDKLVSSFLEMKSEKQVEQKIAEIPKEEVKPFITESKPSVEQRKQDDKKIKACVEEVTTTLEETKFLTENLLLYIDINGNLHPDSATLVSDIDITFLKKDAPYIVGDVVQEGVLTAVVIPTKKAGGTTEMLAKALRKVPTDNYITTYPGQGLNGYTVEEAKTVLKKCKSAFYILPSIISNEKQEILGTVSWNLREMLAHAEETRKLMPVCVETKAIVSTIQRKYKGIKIQEGVVDYGARFYFYTSKTTVASLINTLNDLNETLVTMPLGYVTHGLNLEEAARYMRSLKVPATVSVSSPDAVTAYNGYLTSSSKTPEEHFIETISLAGSYKDWSYSGQSTQLGIEFLKRGDKSVYYTSNPTTFHLDGEVITFDNLKTLLSLREVRTIKVFTTVDNINLHTQVVDMSMTYGQQFGPTYLDGADVTKIKPHNSHEGKTFYVLPNDDTLRVEAFEYYHTTDPSFLGRYMSALNHTKKWKYPQVNGLTSIKWADNNCYLATALLTLQQIELKFNPPALQDAYYRARAGEAANFCALILAYCNKTVGELGDVRETMSYLFQHANLDSCKRVLNVVCKTCGQQQTTLKGVEAVMYMGTLSYEQFKKGVQIPCTCGKQATKYLVQQESPFVMMSAPPAQYELKHGTFTCASEYTGNYQCGHYKHITSKETLYCIDGALLTKSSEYKGPITDVFYKENSYTTTIKPVTYKLDGVVCTEIDPKLDNYYKKDNSYFTEQPIDLVPNQPYPNASFDNFKFVCDNIKFADDLNQLTGYKKPASRELKVTFFPDLNGDVVAIDYKHYTPSFKKGAKLLHKPIVWHVNNATNKATYKPNTWCIRCLWSTKPVETSNSFDVLKSEDAQGMDNLACEDLKPVSEEVVENPTIQKDVLECNVKTTEVVGDIILKPANNSLKITEEVGHTDLMAAYVDNSSLTIKKPNELSRVLGLKTLATHGLAAVNSVPWDTIANYAKPFLNKVVSTTTNIVTRCLNRVCTNYMPYFFTLLLQLCTFTRSTNSRIKASMPTTIAKNTVKSVGKFCLEASFNYLKSPNFSKLINIIIWFLLLSVCLGSLIYSTAALGVLMSNLGMPSYCTGYREGYLNSTNVTIATYCTGSIPCSVCLSGLDSLDTYPSLETIQITISSFKWDLTAFGLVAEWFLAYILFTRFFYVLGLAAIMQLFFSYFAVHFISNSWLMWLIINLVQMAPISAMVRMYIFFASFYYVWKSYVHVVDGCNSSTCMMCYKRNRATRVECTTIVNGVRRSFYVYANGGKGFCKLHNWNCVNCDTFCAGSTFISDEVARDLSLQFKRPINPTDQSSYIVDSVTVKNGSIHLYFDKAGQKTYERHSLSHFVNLYNLRANNTKGSLPINVIVFDGKSKCEESSAKSASVYYSQLMCQPILLLDQALVSDVGDSAEVAVKMFDAYVNTFSSTFNVPMEKLKTLVATAEAELAKNVSLDNVLSTFISAARQGFVDSDVETKDVVECLKLSHQSDIEVTGDSCNNYMLTYNKVENMTPRDLGACIDCSARHINAQVAKSHNIALIWNVKDFMSLSEQLRKQIRSAAKKNNLPFKLTCATTRQVVNVVTTKIALKGG

SEQ ID NO: 16189 - protein, 1946 aa, Artificial Sequence
  SARS-CoV-2__MT642173.1__non-structural protein 3 (NSP3)
MAPTKVTFGDDTVIEVQGYKSVNITFELDERIDKVLNEKCSAYTVELGTEVNEFACVVADAVIKTLQPVSELLTPLGIDLDEWSMATYYLFDESGEFKLASHMYCSFYPPDEDEEEGDCEEEEFEPSTQYEYGTEDDYQGKPLEFGATSAALQPEEEQEEDWLDDDSQQTVGQQDGSEDNQTTTIQTIVEVQPQLEMELTPVVQTIEVNSFSGYLKLTDNVYIKNADIVEEAKKVKPTVVVNAANVYLKHGGGVAGALNKATNNAMQVESDDYIATNGPLKVGGSCVLSGHNLAKHCLHVVGPNVNKGEDIQLLKSAYENFNQHEVLLAPLLSAGIFGADPIHSLRVCVDTVRTNVYLAVFDKNLYDKLVSSFLEMKSEKQVEQKIAEIPKEEVKPFITESKPSVEQRKQDDKKIKACVEEVTTTLEETKFLTENLLLYIDINGNLHPDSATLVSDIDITFLKKDAPYIVGDVVQEGVLTAVVIPTKKAGGTTEMLAKALRKVPTDNYITTYPGQGLNGYTVEEAKTVLKKCKSAFYILPSIISNEKQEILGTVSWNLREMLAHAEETRKLMPVCVETKAIVSTIQRKYKGIKIQEGVVDYGARFYFYTSKTTVASLINTLNDLNETLVTMPLGYVTHGLNLEEAARYMRSLKVPATVSVSSPDAVTAYNGYLTSSSKTPEEHFIETISLAGSYKDWSYSGQSTQLGIEFLKRGDKSVYYTSNPTTFHLDGEVITFDNLKTLLSLREVRTIKVFTTVDNINLHTQVVDMSMTYGQQFGPTYLDGADVTKIKPHNSHEGKTFYVLPNDDTLRVEAFEYYHTTDPSFLGRYMSALNHTKKWKYPQVNGLTSIKWADNNCYLATALLTLQQIELKFNPPALQDAYYRARAGEAANFCALILAYCNKTVGELGDVRETMSYLFQHANLDSCKRVLNVVCKTCGQQQTTLKGVEAVMYMGTLSYEQFKKGVQIPCTCGKQATKYLVQQESPFVMMSAPPAQYELKHGTFTCASEYTGNYQCGHYKHITSKETLYCIDGALLTKSSEYKGPITDVFYKENSYTTTIKPVTYKLDGVVCTEIDPKLDNYYKKDNSYFTEQPIDLVPNQPYPNASFDNFKFVCDNIKFADDLNQLTGYKKPASRELKVTFFPDLNGDVVAIDYKHYTPSFKKGAKLLHKPIVWHVNNATNKATYKPNTWCIRCLWSTKPVETSNSFDVLKSEDAQGMDNLACEDLKPVSEEVVENPTIQKDVLECNVKTTEVVGDIILKPANNSLKITEEVGHTDLMAAYVDNSSLTIRKPNELSRVLGLKTLATHGLAAVNSVPWDTIANYAKPFLNKVVSTTTNIVTRCLNRVCTNYMPYFFTLLLQLCTFTRSTNSRIKASMPTTIAKNTVKSVGKFCLEASFNYLKSPNFSKLINIIIWFLLLSVCLGSLIYSTAALGVLMSNLGMPSYCTGYREGYLNSTNVTIATYCTGSIPCSVCLSGLDSLDTYPSLETIQITISSFKWDLTAFGLVAEWFLAYILFTRFFYVLGLAAIMQLFFSYFAVHFISNSWLMWLIINLVQMAPISAMVRMYIFFASFYYVWKSYVHVVDGCNSSTCMMCYKRNRATRVECTTIVNGVRRSFYVYANGGKGFCKLHNWNCVNCDTFCAGSTFISDEVARDLSLQFKRPINPTDQSSYIVDSVTVKNGSIHLYFDKAGQKTYERHSLSHFVNLDNLRANNTKGSLPINVIVFDGKSKCEESSAKSASVYYSQLMCQPILLLDQALVSDVGDSAEVAVKMFDAYVNTFSSTFNVPMEKLKTLVATAEAELAKNVSLDNVLSTFISAARQGFVDSDVETKDVVECLKLSHQSDIEVTGDSCNNYMLTYNKVENMTPRDLGACIDCSARHINAQVAKSHNIALIWNVKDFMSLSEQLRKQIRSAAKKNNLPFKLTCATTRQVVNVVTTKIALKGG

SEQ ID NO: 16190 - protein, 1946 aa, Artificial Sequence
  SARS-CoV-2__MT642178.1__non-structural protein 3 (NSP3)
MAPTKVTFGDDTVIEVQGYKSVNITFELDERIDKVLNEKCSAYTVELGTEVNEFACVVADAVIKTLQPVSELLTPLGIDLDEWSMATYYLFDESGEFKLASHMYCSFYPPDEDEEEGDCEEEEFEPSTQYEYGTEDDYQGKPLEFGATSAALQPEEEQEEDWLDDDSQQTVGQQDGSEDNQTTTIQTIVEVQPQLEMELTPVVQTIEVNSFSGYLKLTDNVYIKNADIVEEAKKVKPTVVVNAANVYLKHGGGVAGALNKATNNAMQVESDDYIATNGPLKVGGSCVLSGHNLAKHCLHVVGPNVNKGEDIQLLKSAYENFNQHEVLLAPLLSAGIFGADPIHSLRVCVDTVRTNVYLAVFDKNLYDKLVSSFLEMKSEKQVEQKIAEIPKEEVKPFITESKPSVEQRKQDDKKIKACVEEVTTILEETKFLTENLLLYIDINGNLHPDSATLVSDIDITFLKKDAPYIVGDVVQEGVLTAVVIPTKKAGGTTEMLAKALRKVPTDNYITTYPGQGLNGYTVEEAKTVLKKCKSAFYILPSIISNEKQEILGTVSWNLREMLAHAEETRKLMPVCVETKAIVSTIQRKYKGIKIQEGVVDYGARFYFYTSKTTVASLINTLNDLNETLVTMPLGYVTHGLNLEEAARYMRSLKVPATVSVSSPDAVTAYNGYLTSSSKTPEEHFIETISLAGSYKDWSYSGQSTQLGIEFLKRGDKSVYYTSNPTTFHLDGEVITFDNLKTLLSLREVRTIKVFTTVDNINLHTQVVDMSMTYGQQFGPTYLDGADVTKIKPHNSHEGKTFYVLPNDDTLRVEAFEYYHTTDPSFLGRYMSALNHTKKWKYPQVNGLTSIKWADNNCYLATALLTLQQIELKFNPPALQDAYYRARAGEAANFCALILAYCNKTVGELGDVRETMSYLFQHANLDSCKRVLNVVCKTCGQLQTTLKGVEAVMYMGTLSYEQFKKGVQIPCTCGKQATKYLVQQESPFVMMSAPPAQYELKHGTFTCASEYTGNYQCGHYKHITSKETLYCIDGALLTKSSEYKGPITDVFYKENSYTTTIKPVTYKLDGVVCTEIDPKLDNYYKKDNSYFTEQPIDLVPNQPYPNASFDNFKFVCDNIKFADDLNQLTGYKKPASRELKVTFFPDLNGDVVAIDYKHYTPSFKKGAKLLHKPIVWHVNNATNKATYKPNTWCIRCLWSTKPVETSNSFDVLKSEDAQGMDNLACEDLKPVSEEVVENPTIQKDVLECNVKTTEVVGDIILKPANNSLKITEEVGHTDLMAAYVDNSSLTIKKPNELSRVLGLKTLATHGLAAVNSVPWDTIANYAKPFLNKVVSTTTNIVTRCLNRVCTNYMPYFFTLLLQLCTFTRSTNSRIKASMPTTIAKNTVKSVGKFCLEASFNYLKSPNFSKLINIIIWFLLLSVCLGSLIYSTAALGVLMSNLGMPSYCTGYREGYLNSTNVTIATYCTGSIPCSVCLSGLDSLDTYPSLETIQITISSFKWDLTAFGLVAEWFLAYILFTRFFYVLGLAAIMQLFFSYFAVHFISNSWLMWLIINLVQMAPISAMVRMYIFFASFYYVWKSYVHVVDGCNSSTCMMCYKRNRATRVECTTIVNGVRRSFYVYANGGKGFCKLHNWNCVNCDTFCAGSTFISDEVARDLSLQFKRPINPTDQSSYIVDSVTVKNGSIHLYFDKAGQKTYERHSLSHFVNLDNLRANNTKGSLPINVIVFDGKSKCEESSAKSASVYYSQLMCQPILLLDQALVSDVGDSAEVAVKMFDAYVNTFSSTFNVPMEKLKTLVATAEAELAKNVSLDNVLSTFISAARQGFVDSDVETKDVVECLKLSHQSDIEVTGDSCNNYMLTYNKVENMTPRDLGACIDCSARHINAQVAKSHNIALIWNVKDFMSLSEQLRKQIRSAAKKNNLPFKLTCATTRQVVNVVTTKIALKGG

SEQ ID NO: 16191 - protein, 1946 aa, Artificial Sequence
  SARS-CoV-2__MT642270.1__non-structural protein 3 (NSP3)
MAPTKVTFGDDTVIEVQGYKSVNITFELDERIDKVLNEKCSAYTVELGTEVNEFACVVADAVIKTLQPVSELLTPLGIDLDEWSMATYYLFDESGEFKLASHMYCSFYPPDEDEEEGDCEEEEFEPSTQYEYGTEDDYQGKPLEFGATSAALQPEEEQEEDWLDDDSQQTVGQQDGSEDNQTTTIQTIVEVQPQLEMELTPVVQTIEVNSFSGYLKLTDNVYIKNADIVEEAKKVKPTVVVNAANVYLKHGGGVAGALNKATNNAMQVESDDYIATNGPLKVGGSCVLSGHNLAKHCLHVVGPNVNKGEDIQLLKSAYENFNQHEVLLAPLLSAGIFGADPIHSLRVCVDTVRTNVYLAVFDKNLYDKLVSSFLEMKSEKQVEQKIAEIPKEEVKPFITESKPSVEQRKQDDKKIKACVEEVTTTLEETKFLTENLLLYIDINGNLHPDSATLVSDIDITFLKKDAPYIVGDVVQEGVLTAVVIPTKKAGGTTEMLAKALRKVPTDNYITTYPGQGLNGYTVEEAKTVLKKCKSAFYILPSIISNEKQEILGTVSWNLREMLAHAEETRKLMPVCVETKAIVSTIQRKYKGIKIQEGVVDYGARFYFYTSKTTVASLINTLNDLNETLVTMPLGYVTHGLNLEEAARYMRSLKVPATVSVSSPDAVTAYNGYLTSSSKTPEEHFIETISLAGSYKDWSYSGQSTQLGIEFLKRGDKSVYYTSNPTTFHLDGEVITFDNLKTLLSLREVRTIKVFTTVDNINLHTQVVDMSMTYGQQFGPTYLDGADVTKIKPHNSHEGKTFYVLPNDDTLRVEAFEYYHTTDPSFLGRYMSALNHTKKWKYPQVNGLTSIKWADNNCYLATALLTLQQIELKFNPPALQDAYYRARAGEAANFCALILAYCNKTVGELGDVRETMSYLFQHANLDSCKRVLNVVCKTCGQQQTTLKGVEAVMYMGTLSYEQFKKGVQIPCTCGKQATKYLVQQESPFVMMSAPPAQYELKHGTFTCASEYTGNYQCGHYKHITSKETLYCIDGALLTKSSEYKGPITDVFYKENSYTTTIKPVTYKLDGVVCTEIDPKLDNYYKKDNSYFTEQPIDLVPNQPYPNASFDNFKFVCDNIKFADDLNQLTGYKKPASRELKVTFFPDLNGDVVAIDYKHYTPSFKKGAKLLHKPIVWHVNNATNKATYKPNTWCIRCLWSTKPVETSNSFDVLKSEDAQGMDNLACEDLKPVSEEVVENPTIQKDVLECNVKTTEVVGDIILKPANNSLKITEEVGHTDLMAAYVDNSSLTIKKPNELSRVLGLKTLATHGLAAVNSVPWDTIANYAKPFLNKVVSTTTNIVTRCLNRVCTNYMPYFFTLLLQLCTFTRSTNSRIKASMPTTIAKNTVKSVGKFCLEASFNYLKSPNFSKLINIIIWFLLLSVCLGSLIYSTAALGVLMSNLGMPSYCTGYREGYLNSTNVTIATYCTGSIPCSVCLSGLDSLDTYPSLETIQITISSFKWDLTAFGLVAEWFLAYILFTRFFYVLGLAAIMQLFFSYFAVHFISNSWLMWLIINLVQMAPISAMVRMYIFFASFYYVWKSYVHVVDGCNSSTCMMCYKRNRATRVECTTIVNGVRRSFYVYANGGKGFCKLHNWNCVNCDTFCAGSTFISDEVARDLSLQFKRPINPTDQSSYIVDSVTVKNGSIHLYFDKAGQKTYERHSLSHFVNLDNLRANNTKGSLPINVIVFDGKSKCEESSAKSASVYYSQLMCQPILLLDQALVSDVGDSAEVAVKMFDAYVNTFSSTFNVPMEKLKTLVATAEAELAKNVSLDNVLSTFISAARQGFVDSDVETKDVVECLKLSHQSDIEVTGDSCNNYMLTYNKVENMTPRDLGACIDCSVRHINAQVAKSHNIALIWNVKDFMSLSEQLRKQIRSAAKKNNLPFKLTCATTRQVVNVVTTKIALKGG

SEQ ID NO: 16192 - protein, 1946 aa, Artificial Sequence
  SARS-CoV-2__MT642356.1__non-structural protein 3 (NSP3)
MAPTKVTFGDDTVIEVQGYKSVNITFELDERIDKVLNEKCSTYTVELGTEVNEFACVVADAVIKTLQPVSELLTPLGIDLDEWSMATYYLFDESGEFKLASHMYCSFYPPDEDEEEGDCEEEEFEPSTQYEYGTEDDYQGKPLEFGATSAALQPEEEQEEDWLDDDSQQTVGQQDGSEDNQTTTIQTIVEVQPQLEMELTPVVQTIEVNSFSGYLKLTDNVYIKNADIVEEAKKVKPTVVVNAANVYLKHGGGVAGALNKATNNAMQVESDDYIATNGPLKVGGSCVLSGHNLAKHCLHVVGPNVNKGEDIQLLKSAYENFNQHEVLLAPLLSAGIFGADPIHSLRVCVDTVRTNVYLAVFDKNLYDKLVSSFLEMKSEKQVEQKIAEIPKEEVKPFITESKPSVEQRKQDDKKIKACVEEVTTTLEETKFLTENLLLYIDINGNLHPDSATLVSDIDITFLKKDAPYIVGDVVQEGVLTAVVIPTKKAGGTTEMLAKALRKVPTDNYITTYPGQGLNGYTVEEAKTVLKKCKSAFYILPSIISNEKQEILGTVSWNLREMLAHAEETRKLMPVCVETKAIVSTIQRKYKGIKIQEGVVDYGARFYFYTSKTTVASLINTLNDLNETLVTMPLGYVTHGLNLEEAARYMRSLKVPATVSVSSPDAVTAYNGYLTSSSKTPEEHFIETISLAGSYKDWSYSGQSTQLGIEFLKRGDKSVYYTSNPTTFHLDGEVITFDNLKTLLSLREVRTIKVFTTVDNINLHTQVVDMSMTYGQQFGPTYLDGADVTKIKPHNSHEGKTFYVLPNDDTLRVEAFEYYHTTDPSFLGRYMSALNHTKKWKYPQVNGLTSIKWADNNCYLATALLTLQQIELKFNPPALQDAYYRARAGEAANFCALILAYCNKTVGELGDVRETMSYLFQHANLDSCKRVLNVVCKTCGQQQTTLKGVEAVMYMGTLSYEQFKKGVQIPCTCGKQATKYLVQQESPFVMMSAPPAQYELKHGTFTCASEYTGNYQCGHYKHITSKETLYCIDGALLTKSSEYKGPITDVFYKENSYTTTIKPVTYKLDGVVCTEIDPKLDNYYKKDNSYFTEQPIDLVPNQPYPNASFDNFKFVCDNIKFADDLNQLTGYKKPASRELKVTFFPDLNGDVVAIDYKHYTPSFKKGAKLLHKPIVWHVNNATNKATYKPNTWCIRCLWSTKPVETSNSFDVLKSEDAQGMDNLACEDLKPVSEEVVENPTIQKDVLECNVKTTEVVGDIILKPANNSLKITEEVGHTDLMAAYVDNSSLTIKKPNELSRVLGLKTLATHGLAAVNSVPWDTIANYAKPFLNKVVSTTTNIVTRCLNRVCTNYMPYFFTLLLQLCTFTRSTNSRIKASMPTTIAKNTVKSVGKFCLEASFNYLKSPNFSKLINIIIWFLLLSVCLGSLIYSTAALGVLMSNLGMPSYCTGYREGYLNSTNVTIATYCTGSIPCSVCLSGLDSLDTYPSLETIQITISSFKWDLTAFGLVAEWFLAYILFTRFFYVLGLAAIMQLFFSYFAVHFISNSWLMWLIINLVQMAPISAMVRMYIFFASFYYVWKSYVHVVDGCNSSTCMMCYKRNRATRVECTTIVNGVRRSFYVYANGGKGFCKLHNWNCVNCDTFCAGSTFISDEVARDLSLQFKRPINPTDQSSYIVDSVTVKNGSIHLYFDKAGQKTYERHSLSHFVNLDNLRANNTKGSLPINVIVFDGKSKCEESSAKSASVYYSQLMCQPILLLDQALVSDVGDSAEVAVKMFDAYVNTFSSTFNVPMEKLKTLVATAEAELAKNVSLDNVLSTFISAARQGFVDSDVETKDVVECLKLSHQSDIEVTGDSCNNYMLTYNKVENMTPRDLGACIDCSARHINAQVAKSHNIALIWNVKDFMSLSEQLRKQIRSAAKKNNLPFKLTCATTRQVVNVVTTKIALKGG

SEQ ID NO: 16193 - protein, 1946 aa, Artificial Sequence
  SARS-CoV-2__MT642365.1__non-structural protein 3 (NSP3)
MAPTKVTFGDDTVIEVQGYKSVNITFELDERIDKVLNEKCSAYTVELGTEVNEFACVVADAVIKTLQPVSELLTPLGIDLDEWSMATYYLFDESGEFKLASHMYCSFYPPDEDEEEGDCEEEEFEPSTQYEYGTEDDYQGKPLEFGATSAALQPEEEQEEDWLDDDSQQTVGQQDGSEDNQTTTIQTIVEVQPQLEMELTPVVQTIEVNSFSGYLKLTDNVYIKNADIVEEAKKVKPTVVVNAANVYLKHGGGVAGALNKATNNAMQVESDDYIATNGPLKVGGSCVLSGHNLAKHCLHVVGPNVNKGEDIQLLKSAYENFNQHEVLLAPLLSAGIFGADPIHSLRVCVDTVRTNVYLAVFDKNLYDKLVSSFLEMKSEKQVEQKIAEIPKEEVKPFITESKPSVEQRKQDDKKIKACVEEVTTTLEETKFLTENLLLYIDINGNLHPDSATLVSDIDITFLKKDAPYIVGDVVQEGVLTAVVIPTKKAGGTTEMLAKALRKVPTDNYITTYPGQGLNGYTVEEAKTVLKKCKSAFYILPSIISNEKQEILGTVSWNLREMLAHAEETRKLMPVCVETKAIVSTIQRKYKGIKIQEGVVDYGARFYFYTSKTTVASLINTLNDLNETLVTMPLGYVTHGLNLEEAARYMRSLKVPATVSVSSPDAVTAYNGYLTSSSKTPEEHFIETISLAGSYKDWSYSGQSTQLGIEFLKRGDKSVYYTSNPTTFHLDGEVITFDNLKTLLSLREVRTIKVFTTVDNINLHTQVVDMSMTYGQQFGPTYLDGADVTKIKPHNSHEGKTFYVLPNDDTLRIEAFEYYHTTDPSFLGRYMSALNHTKKWKYPQVNGLTSIKWADNNCYLATALLTLQQIELKFNPPALQDAYYRARAGEAANFCALILAYCNKTVGELGDVRETMSYLFQHANLDSCKRVLNVVCKTCGQQQTTLKGVEAVMYMGTLSYEQFKKGVQIPCTCGKQATKYLVQQESPFVMMSAPPAQYELKHGTFTCASEYTGNYQCGHYKHITSKETLYCIDGALLTKSSEYKGPITDVFYKENSYTTTIKPVTYKLDGVVCTEIDPKLDNYYKKDNSYFTEQPIDLVPNQPYPNASFDNFKFVCDNIKFADDLNQLTGYKKPASRELKVTFFPDLNGDVVAIDYKHYTPSFKKGAKLLHKPIVWHVNNATNKATYKPNTWCIRCLWSTKPVETSNSFDVLKSEDAQGMDNLACEDLKPVSEEVVENPTIQKDVLECNVKTTEVVGDIILKPANNSLKITEEVGHTDLMAAYVDNSSLTIKKPNELSRVLGLKTLATHGLAAVNSVPWDTIANYAKPFLNKVVSTTTNIVTRCLNRVCTNYMPYFFTLLLQLCTFTRSTNSRIKASMPTTIAKNTVKSVGKFCLEASFNYLKSPNFSKLINIIIWFLLLSVCLGSLIYSTAALGVLMSNLGMPSYCTGYREGYLNSTNVTIATYCTGSIPCSVCLSGLDSLDTYPSLETIQITISSFKWDLTAFGLVAEWFLAYILFTRFFYVLGLAAIMQLFFSYFAVHFISNSWLMWLIINLVQMAPISAMVRMYIFFASFYYVWKSYVHVVDGCNSSTCMMCYKRNRATRVECTTIVNGVRRSFYVYANGGKGFCKLHNWNCVNCDTFCAGSTFISDEVARDLSLQFKRPINPTDQSSYIVDSVTVKNGSIHLYFDKAGQKTYERHSLSHFVNLDNLRANNTKGSLPINVIVFDGKSKCEESSAKSASVYYSQLMCQPILLLDQALVSDVGDSAEVAVKMFDAYVNTFSSTFNVPMEKLKTLVATAEAELAKNVSLDNVLSTFISAARQGFVDSDVETKDVVECLKLSHQSDIEVTGDSCNNYMLTYNKVENMTPRDLGACIDCSARHINAQVAKSHNIALIWNVKDFMSLSEQLRKQIRSAAKKNNLPFKLTCATTRQVVNVVTTKIALKGG

SEQ ID NO: 16194 - protein, 1946 aa, Artificial Sequence
  SARS-CoV-2__MT642428.1__non-structural protein 3 (NSP3)
MAPTKVTFGDDTVIEVQGYKSVNITFELDERIDKVLNEKCSAYTVELGTEVNEFACVVADAVIKTLQPVSELLTPLGIDLDEWSMATYYLFDESGEFKLASHMYCSFYPPDEDEEEGDCEEEEFEPSTQYEYGTEDDYQGKPLEFGATSAALQPEEEQEEDWLDDDSQQTVGQQDGSEDNQTTTIQTIVEVQPQLEMELTPVVQTIEVNSFSGYLKLTDNVYIKNADIVEEAKKVKPTVVVNAANVYLKHGGGVAGALNKATNNAMQVESDDYIATNGPLKVGGSCVLSGHNLAKHCLHVVGPNVNKGEDIQLLKSAYENFNQHEVLLAPLLSAGIFGADPIHSLRVCVDTVRTNVYLAVFDKNLYDKLVSSFLEMKSEKQVEQKIAEIPKEEVKPFITESKPSVEQRKQDDKKIKACVEEVTTTLEETKFLTENLLLYIDINGNLHPDSATLVSDIDITFLKKDAPYIVGDVVQEGVLTAVVIPTKKAGGTTEMLAKALRKVPTDNYITTYPGQGLNGYTVEEAKTVLKKCKSAFYILPSIISNEKQEILGTVSWNLREMLAHAEETRKLMPVCVETKAIVSTIQRKYKGIKIQEGVVDYGARFYFYTSKTTVASLINTLNDLNETLVTMPLGYVTHGLNLEEAARYMRSLKVPATVSVSSPDAVTAYNGYLTSSSKTPEEHFIETISLAGSYKDWSYSGQSTQLGIEFLKRGDKSVYYTSNPTTFHLDGEVITFDNLKTLLSLREVRTIKVFTTVDNINLHTQVVDMSMTYGQQFGPTYLDGADVTKIKPHNSHEGKTFYVLPNDDTLRVEAFEYYHTTDPSFLGRYMSALNHTKKWKYPQVNGLTSIKWADNNCYLATALLTLQQIELKFNPPALQDAYYRARAGEAANFCALILAYCNKTVGELGDVRETMSYLFQHANLDSCKRVLNVVCKTCGQQQTTLKGVEAVMYMGTLSYEQFKKGVQIPCTCGKQATKYLVQQESPFVMMSAPPAQYELKHGTFTCASEYTGNYQCGHYKHITSKETLYCIDGALLTKSSEYKGPITDVFYKENSYTTTIKPVTYKLDGVVCTEIDPKLDNYYKKDNSYFTEQPIDLVPNQPYPNASFDNFKFVCDNIKFADDLNQLTGYKKPASRELKVTFFPDLNGDVVAIDYKHYTPSFKKGAKLLHKPIVWHVNNATNKATYKPNIWCIRCLWSTKPVETSNSFDVLKSEDAQGMDNLACEDLKPVSEEVVENPTIQKDVLECNVKTTEVVGDIILKPANNSLKITEEVGHTDLMAAYVDNSSLTIKKPNELSRVLGLKTLATHGLAAVNSVPWDTIANYAKPFLNKVVSTTTNIVTRCLNRVCTNYMPYFFTLLLQLCTFTRSTNSRIKASMPTTIAKNTVKSVGKFCLEASFNYLKSPNFSKLINIIIWFLLLSVCLGSLIYSTAALGVLMSNLGMPSYCTGYREGYLNSTNVTIATYCTGSIPCSVCLSGLDSLDTYPSLETIQITISSFKWDLTAFGLVAEWFLAYILFTRFFYVLGLAAIMQLFFSYFAVHFISNSWLMWLIINLVQMAPISAMVRMYIFFASFYYVWKSYVHVVDGCNSSTCMMCYKRNRATRVECTTIVNGVRRSFYVYANGGKGFCKLHNWNCVNCDTFCAGSTFISDEVARDLSLQFKRPINPTDQSSYIVDSVTVKNGSIHLYFDKAGQKTYERHSLSHFVNLDNLRANNTKGSLPINVIVFDGKSKCEESSAKSASVYYSQLMCQPILLLDQALVSDVGDSAEVAVKMFDAYVNTFSSTFNVPMEKLKTLVATAEAELAKNVSLDNVLSTFISAARQGFVDSDVEIKDVVECLKLSHQSDIEVTGDSCNNYMLTYNKVENMTPRDLGACIDCSARHINAQVAKSHNIALIWNVKDFMSLSEQLRKQIRSAAKKNNLPFKLTCATTRQVVNVVTTKIALKGG

SEQ ID NO: 16195 - protein, 1946 aa, Artificial Sequence
  SARS-CoV-2__MT635408.1__non-structural protein 3 (NSP3)
MAPTKVTFGDDTVIEVQGYKSVNITFELDERIDKVLNEKCSAYTVELGTEVNEFACVVADAVIKTLQPVSELLTPLGIDLDEWSMATYYLFDESGEFKLASHMYCSFYPPDEDEEEGDCEEEEFEPSTQYEYGTEDDYQGKPLEFGATSAALQPEEEQEEDWLDDDSQQTVGQQDGSEDNQTTTIQTIVEVQPQLEMELTPVVQTIEVNSFSGYLKLTDNVYIKNADIVEEAKKVKPTVVVNAANVYLKHGGGVAGALNKATNNAMQVESDDYIATNGPLKVGGSCVLSGHNLAKHCLHVVGPNVNKGDDIQLLKSAYENFNQHEVLLAPLLSAGIFGADPIHSLRVCVDTVRTNVYLAVFDKNLYDKLVSSFLEMKSEKQVEQKIAEIPKEEVKPFITESKPSVEQRKQDDKKIKACVEEVTTTLEETKFLTENLLLYIDINGNLHPDSATLVSDIDITFLKKDAPYIVGDVVQEGVLTAVVIPTKKAGGTTEMLAKALRKVPTDNYITTYPGQGLNGYTVEEAKTVLKKCKSAFYILPSIISNEKQEILGTVSWNLREMLAHAEETRKLMPVCVETKAIVSTIQRKYKGIKIQEGVVDYGARFYFYTSKTTVASLINTLNDLNETLVTMPLGYVTHGLNLEEAARYMRSLKVPATVSVSSPDAVTAYNGYLTSSSKTPEEHFIETISLAGSYKDWSYSGQSTQLGIEFLKRGDKSVYYTSNPTTFHLDGEVITFDNLKTLLSLREVRTIKVFTTVDNINLHTQVVDMSMTYGQQFGPTYLDGADVTKIKPHNSHEGKTFYVLPNDDTLRVEAFEYYHTTDPSFLGRYMSALNHTKKWKYPQVNGLTSIKWADNNCYLATALLTLQQIELKFNPPALQDAYYRARAGEAANFCALILAYCNKTVGELGDVRETMSYLFQHANLDSCKRVLNVVCKTCGQQQTTLKGVEAVMYMGTLSYEQFKKGVQIPCTCGKQATKYLVQQESPFVMMSAPPAQYELKHGTFTCASEYTGNYQCGHYKHITSKETLYCIDGALLTKSSEYKGPITDVFYKENSYTTTIKPVTYKLDGVVCTEIDPKLDNYYKKDNSYFTEQPIDLVPNQPYPNASFDNFKFVCDNIKFADDLNQLTGYKKPASRELKVTFFPDLNGDVVAIDYKHYTPSFKKGAKLLHKPIVWHVNNATNKATYKPNTWCIRCLWSTKPVETSNSFDVLKSEDAQGMDNLACEDLKPVSEEVVENPTIQKDVLECNVKTTEVVGDIILKPANNSLKITEEVGHTDLMAAYVDNSSLTIKKPNELSRVLGLKTLATHGLAAVNSVPWDTIANYAKPFLNKVVSTTTNIVTRCLNRVCTNYMPYFFTLLLQLCTFTRSTNSRIKASMPTTIAKNTVKSVGKFCLEASFNYLKSPNFSKLINIIIWFLLLSVCLGSLIYSTAALGVLMSNLGMPSYCTGYREGYLNSTNVTIATYCTGSIPCSVCLSGLDSLDTYPSLETIQITISSFKWDLTAFGLVAEWFLAYILFTRFFYVLGLAAIMQLFFSYFAVHFISNSWLMWLIINLVQMAPISAMVRMYIFFASFYYVWKSYVHVVDGCNSSTCMMCYKRNRATRVECTTIVNGVRRSFYVYANGGKGFCKLHNWNCVNCDTFCAGSTFISDEVARDLSLQFKRPINPTDQSSYIVDSVTVKNGSIHLYFDKAGQKTYERHSLSHFVNLDNLRANNTKGSLPINVIVFDGKSKCEESSAKSASVYYSQLMCQPILLLDQALVSDVGDSAEVAVKMFDAYVNTFSSTFNVPMEKLKTLVATAEAELAKNVSLDNVLSTFISAARQGFVDSDVETKDVVECLKLSHQSDIEVTGDSCNNYMLTYNKVENMTPRDLGACIDCSARHINAQVAKSHNIALIWNVKDFMSLSEQLRKQIRSAAKKNNLPFKLTCATTRQVVNVVTTKIALKGG

SEQ ID NO: 16196 - protein, 1946 aa, Artificial Sequence
  SARS-CoV-2__MT635648.1__non-structural protein 3 (NSP3)
MAPTKVTFGDDTVIEVQGYKSVNITFELDERIDKVLNEKCSAYTVELGTEVNEFACVVADAVIKTLQPVSELLTPLGIDLDEWSMATYYLFDESGEFKLASHMYCSFYPPDEDEEEGDCEEEEFEPSTQYEYGTEDDYQGKPLEFGATSAALQPEEEQEEDWLDDDSQQTVGQQDGSEDNQTTTIQTIVEVQPQLEMELTPVVQTIEVNSFSGYLKLTDNVYIKNADIVEEAKKVKPTVVVNAANVYLKHGGGVAGALNKATNNAMQVESDDYIATNGPLKVGGSCVLSGHNLAKHCLHVVGPNVNKGEDIQLLKSAYENFNQHEVLLAPLLSAGIFGADPIHSLRVCVDTVRTNVYLAVFDKNLYDKLVSSFLEMKSEKQVEQKIAEIPKEEVKPFITESKPSVEQRKQDDKKIKACVEEVTTTLEETKFLTENLLLYIDINGNLHPDSATLVSDIDITFLKKDAPYIVGDVVQEGVLTAVVIPTKKAGGTTEMLAKALRKVPKDNYITTYPGQGLNGYTVEEAKTVLKKCKSAFYILPSIISNEKQEILGTVSWNLREMLAHAEETRKLMPVCVETKAIVSTIQRKYKGIKIQEGVVDYGARFYFYTSKTTVASLINTLNDLNETLVTMPLGYVTHGLNLEEAARYMRSLKVPATVSVSSPDAVTAYNGYLTSSSKTPEEHFIETISLAGSYKDWSYSGQSTQLGIEFLKRGDKSVYYTSNPTTFHLDGEVITFDNLKTLLSLREVRTIKVFTTVDNINLHTQVVDMSMTYGQQFGPTYLDGADVTKIKPHNSHEGKTFYVLPNDDTLRVEAFEYYHTTDPSFLGRYMSALNHTKKWKYPQVNGLTSIKWADNNCYLATALLTLQQIELKFNPPALQDAYYRARAGEAANFCALILAYCNKTVGELGDVRETMSYLFQHANLDSCKRVLNVVCKTCGQQQTTLKGVEAVMYMGTLSYEQFKKGVQIPCTCGKQATKYLVQQESPFVMMSAPPAQYELKHGTFTCASEYTGNYQCGHYKHITSKETLYCIDGALLTKSSEYKGPITDVFYKENSYTTTIKPVTYKLDGVVCTEIDPKLDNYYKKDNSYFTEQPIDLVPNQPYPNASFDNFKFVCDNIKFADDLNQLTGYKKPASRELKVTFFPDLNGDVVAIDYKHYTPSFKKGAKLLHKPIVWHVNNATNKATYKPNTWCIRCLWSTKPVETSNSFDVLKSEDAQGMDNLACEDLKPVSEEVVENPTIQKDVLECNVKTTEVVGDIILKPANNSLKITEEVGHTDLMAAYVDNSSLTIKKPNELSRVLGLKTLATHGLAAVNSVPWDTIANYAKPFLNKVVSTTTNIVTRCLNRVCTNYMPYFFTLLLQLCTFTRSTNSRIKASMPTTIAKNTVKSVGKFCLEASFNYLKSPNFSKLINIIIWFLLLSVCLGSLIYSTAALGVLMSNLGMPSYCTGYREGYLNSTNVTIATYCTGSIPCSVCLSGLDSLDTYPSLETIQITISSFKWDLTAFGLVAEWFLAYILFTRFFYVLGLAAIMQLFFSYFAVHFISNSWLMWLIINLVQMAPISAMVRMYIFFASFYYVWKSYVHVVDGCNSSTCMMCYKRNRATRVECTTIVNGVRRSFYVYANGGKGFCKLHNWNCVNCDTFCAGSTFISDEVARDLSLQFKRPINPTDQSSYIVDSVTVKNGSIHLYFDKAGQKTYERHSLSHFVNLDNLRANNTKGSLPINVIVFDGKSKCEESSAKSASVYYSQLMCQPILLLDQALVSDVGDSAEVAVKMFDAYVNTFSSTFNVPMEKLKTLVATAEAELAKNVSLDNVLSTFISAARQGFVDSDVETKDVVECLKLSHQSDIEVTGDSCNNYMLTYNKVENMTPRDLGACIDCSARHINAQVAKSHNIALIWNVKDFMSLSEQLRKQIRSAAKKNNLPFKLTCATTRQVVNVVTTKIALKGG

SEQ ID NO: 16197 - protein, 1946 aa, Artificial Sequence
  SARS-CoV-2__MT627263.1__non-structural protein 3 (NSP3)
MAPTKVTFGDDTVIEVQGYKSVNITFELDERIDKVLNEKCSAYTVELGTEVNEFACVVADAVIKTLQPVSELLTPLGIDLDEWSMATYYLFDESGEFKLASHMYCSFYPPDEDEEEGDCEEEEFEPSTQYEYGTEDDYQGKPLEFGATSAALQPEEEQEEDWLDDDSQQTVGQQDGSEDNQTTTIQTIVEVQPQLEMELTPVVQTIEVNSFSGYLKLTDNVYIKNADIVEEAKKVKPTVVVNAANVYLKHGGGVAGALNKATNNAMQVESDDYIATNGPLKVGGSCVLSGHNLAKHCLHVVGPNVNKGEDIQLLKSAYENFNQHEVLLAPLLSAGIFGADPIHSLRVCVDTVRTNVYLAVFDKNLYDKLVSSFLEMKSEKQVEQKIAEIPKEEVKPFITESKPSVEQRKQDDKKIKACVEEVTTTLEETKFLTENLLLYIDINGNLHPDSATLVSDIDITFLKKDAPYIVGDVVQEGVLTAVVIPTKKAGGTTEMLAKALRKVPTDNYITTYPGQGLNGYTVEEAKTVLKKCKSAFYILPSIISNEKQEILGTVSWNLREMLAHAEETRKLMPVCVETKAIVSTIQRKYKGIRIQEGVVDYGARFYFYTSKTTVASLINTLNDLNETLVTMPLGYVTHGLNLEEAARYMRSLKVPATVSVSSPDAVTAYNGYLTSSSKTPEEHFIETISLAGSYKDWSYSGQSTQLGIEFLKRGDKSVYYTSNPTTFHLDGEVITFDNLKTLLSLREVRTIKVFTTVDNINLHTQVVDMSMTYGQQFGPTYLDGADVTKIKPHNSHEGKTFYVLPNDDTLRVEAFEYYHTTDPSFLGRYMSALNHTKKWKYPQVNGLTSIKWADNNCYLATALLTLQQIELKFNPPALQDAYYRARAGEAANFCALILAYCNKTVGELGDVRETMSYLFQHANLDSCKRVLNVVCKTCGQQQTTLKGVEAVMYMGTLSYEQFKKGVQIPCTCGKQATKYLVQQESPFVMMSAPPAQYELKHGTFTCASEYTGNYQCGHYKHITSKETLYCIDGALLTKSSEYKGPITDVFYKENSYTTTIKPVTYKLDGVVCTEIDPKLDNYYKKDNSYFTEQPIDLVPNQPYPNASFDNFKFVCDNIKFADDLNQLTGYKKPASRELKVTFFPDLNGDVVAIDYKHYTPSFKKGAKLLHKPIVWHVNNATNKATYKPNTWCIRCLWSTKPVETSNSFDVLKSEDAQGMDNLACEDLKPVSEEVVENPTIQKDVLECNVKTTEVVGDIILKPANNSLKITEEVGHTDLMAAYVDNSSLTIKKPNELSRVLGLKTLATHGLAAVNSVPWDTIANYAKPFLNKVVSTTTNIVTRCLNRVCTNYMPYFFTLLLQLCTFTRSTNSRIKASMPTTIAKNTVKSVGKFCLEASFNYLKSPNFSKLINIIIWFLLLSVCLGSLIYSTAALGVLMSNLGMPSYCTGYREGYLNSTNVTIATYCTGSIPCSVCLSGLDSLDTYPSLETIQITISSFKWDLTAFGLVAEWFLAYILFTRFFYVLGLAAIMQLFFSYFAVHFISNSWLMWLIINLVQMAPISAMVRMYIFFASFYYVWKSYVHVVDGCNSSTCMMCYKRNRATRVECTTIVNGVRRSFYVYANGGKGFCKLHNWNCVNCDTFCAGSTFISDEVARDLSLQFKRPINPTDQSSYIVDSVTVKNGSIHLYFDKAGQKTYERHSLSHFVNLDNLRANNTKGSLPINVIVFDGKSKCEESSAKSASVYYSQLMCQPILLLDQALVSDVGDSAEVAVKMFDAYVNTFSSTFNVPMEKLKTLVATAEAELAKNVSLDNVLSTFISAARQGFVDSDVETKDVVECLKLSHQSDIEVTGDSCNNYMLTYNKVENMTPRDLGACIDCSARHINAQVAKSHNIALIWNVKDFMSLSEQLRKQIRSAAKKNNLPFKLTCATTRQVVNVVTTKIALKGG

SEQ ID NO: 16198 - protein, 1946 aa, Artificial Sequence
  SARS-CoV-2__MT627414.1__non-structural protein 3 (NSP3)
MAPTKVTFGDDTVIEVQGYKSVNITFELDERIDKVLNEKCSAYTVELGTEVNEFACVVADAVIKTLQPVSELLTPLGIDLDEWSMATYYLFDESGEFKLASHMYCSFYPPDEDEEEGDCEEEEFEPSTQYEYGTEDDYQGKPLEFGATSAALQPEEEQEEDWLDDDSQQTVGQQDGSEDNQTTTIQTIVEVQPQLEMELTPVVQTIEVNSFSGYLKLTDNVYIKNADIVEEAKKVKPTVVVNAANVYLKHGGGVAGALNKATNNAMQVESDDYIATNGPLKVGGSCVLSGHNLAKHCLHVVGPNVNKGEDIQLLKSAYENFNQHEVLLAPLLSAGIFGADPIHSLRVCVDTVRTNVYLAVFDKNLYDKLVSSFLEMKSEKQVEQKIAEIPKEEVKPFITESKPSVEQRKQDDKKIKACVEEVTTTLEETKFLTENLLLYIDINGNLHPDSATLVSDIDITFLKKDASYIVGDVVQEGVLTAVVIPTKKAGGTTEMLAKALRKVPTDNYITTYPGQGLNGYTVEEAKTVLKKCKSAFYILPSIISNEKQEILGTVSWNLREMLAHAEETRKLMPVCVETKAIVSTIQRKYKGIKIQEGVVDYGARFYFYTSKTTVASLINTLNDLNETLVTMPLGYVTHGLNLEEAARYMRSLKVPATVSVSSPDAVTAYNGYLTSSSKTPEEHFIETISLAGSYKDWSYSGQSTQLGIEFLKRGDKSVYYTSNPTTFHLDGEVITFDNLKTLLSLREVRTIKVFTTVDNINLHTQVVDMSMTYGQQFGPTYLDGADVTKIKPHNSHEGKTFYVLPNDDTLRVEAFEYYHTTDPSFLGRYMSALNHTKKWKYPQVNGLTSIKWADNNCYLATALLTLQQIELKFNPPALQDAYYRARAGEAANFCALILAYCNKTVGELGDVRETMSYLFQHANLDSCKRVLNVVCKTCGQQQTTLKGVEAVMYMGTLSYEQFKKGVQIPCTCGKQATKYLVQQESPFVMMSAPPAQYELKHGTFTCASEYTGNYQCGHYKHITSKETLYCIDGALLTKSSEYKGPITDVFYKENSYTTTIKPVTYKLDGVVCTEIDPKLDNYYKKDNSYFTEQPIDLVPNQPYPNASFDNFKFVCDNIKFADDLNQLTGYKKPASRELKVTFFPDLNGDVVAIDYKHYTPSFKKGAKLLHKPIVWHVNNATNKATYKPNTWCIRCLWSTKPVETSNSFDVLKSEDAQGMDNLACEDLKPVSEEVVENPTIQKDVLECNVKTTEVVGDIILKPANNSLKITEEVGHTDLMAAYVDNSSLTIKKPNELSRVLGLKTLATHGLAAVNSVPWDTIANYAKPFLNKVVSTTTNIVTRCLNRVCTNYMPYFFTLLLQLCTFTRSTNSRIKASMPTTIAKNTVKSVGKFCLEASFNYLKSPNFSKLINIIIWFLLLSVCLGSLIYSTAALGVLMSNLGMPSYCTGYREGYLNSTNVTIATYCTGSIPCSVCLSGLDSLDTYPSLETIQITISSFKWDLTAFGLVAEWFLAYILFTRFFYVLGLAAIMQLFFSYFAVHFISNSWLMWLIINLVQMAPISAMVRMYIFFASFYYVWKSYVHVVDGCNSSTCMMCYKRNRATRVECTTIVNGVRRSFYVYANGGKGFCKLHNWNCVNCDTFCAGSTFISDEVARDLSLQFKRPINPTDQSSYIVDSVTVKNGSIHLYFDKAGQKTYERHSLSHFVNLDNLRANNTKGSLPINVIVFDGKSKCEESSAKSASVYYSQLMCQPILLLDQALVSDVGDSAEVAVKMFDAYVNTFSSTFNVPMEKLKTLVATAEAELAKNVSLDNVLSTFISAARQGFVDSDVETKDVVECLKLSHQSDIEVTGDSCNNYMLTYNKVENMTPRDLGACIDCSARHINAQVAKSHNIALIWNVKDFMSLSEQLRKQIRSAAKKNNLPFKLTCATTRQVVNVVTTKIALKGG

SEQ ID NO: 16199 - protein, 1946 aa, Artificial Sequence
  SARS-CoV-2__MT627437.1__non-structural protein 3 (NSP3)
MAPTKVTFGDDTVIEVQGYKSVNITFELDERIDKVLNEKCSAYTVELGTEVNEFACVVADAVIKTLQPVSELLTPLGIDLDEWSMATYYLFDESGEFKLASHMYCSFYPPDEDEEEGDCEEEEFEPSTQYEYGTEDDYQGKPLEFGATSAALQPEEEQEEDWLDDDSQQTVGQQDGSEDNQTTTIQTIVEVQPQLEMELTPVVQTIEVNSFSGYLKLTDNVYIKNADIVEEAKKVKPTVVVNAANVYLKHGGGVAGALNKATNNAMQVESDDYIATNGPLKVGGSCVLSGHNLAKHCLHVVGPNVNKGEDIQLLKSAYENFNQHEVLLAPLLSAGIFGADPIHSLRVCVDTVRTNVYLAVFDKNLYDKLVSSFLEMKSEKQVEQKIAEIPKEEVKPFITESKPSVEQRKQDDKKIKACVEEVTTTLEETKFLTENLLLYIDINGNLHPDSATLVSDIDITFLKKDAPYIVGDVVQEGVLTAVVIPTKKAGGTTEMLAKALRKVPTDNYITTYPGQGLNGYTVEEAKTVLKKCKSAFYILPSIISNEKQEILGTVSWNLREMLAHAEETRKLMPVCVETKAIVSTIQRKYKGIKIQEGVVDYGARFYFYTSKTTVASLINTLNDLSETLVTMPLGYVTHGLNLEEAARYMRSLKVPATVSVSSPDAVTAYNGYLTSSSKTPEEHFIETISLAGSYKDWSYSGQSTQLGIEFLKRGDKSVYYTSNPTTFHLDGEVITFDNLKTLLSLREVRTIKVFTTVDNINLHTQVVDMSMTYGQQFGPTYLDGADVTKIKPHNSHEGKTFYVLPNDDTLRVEAFEYYHTTDPSFLGRYMSALNHTKKWKYPQVNGLTSIKWADNNCYLATALLTLQQIELKFNPPALQDAYYRARAGEAANFCALILAYCNKTVGELGDVRETMSYLFQHANLDSCKRVLNVVCKTCGQQQTTLKGVEAVMYMGTLSYEQFKKGVQIPCTCGKQATKYLVQQESPFVMMSAPPAQYELKHGTFTCASEYTGNYQCGHYKHITSKETLYCIDGALLTKSSEYKGPITDVFYKENSYTTTIKPVTYKLDGVVCTEIDPKLDNYYKKDNSYFTEQPIDLVPNQPYPNASFDNFKFVCDNIKFADDLNQLTGYKKPASRELKVTFFPDLNGDVVAIDYKHYTPSFKKGAKLLHKPIVWHVNNATNKATYKPNTWCIRCLWSTKPVETSNSFDVLKSEDAQGMDNLACEDLKPVSEEVVENPTIQKDVLECNVKTTEVVGDIILKPANNSLKITEEVGHTDLMAAYVDNSSLTIKKPNELSRVLGLKTLATHGLAAVNSVPWDTIANYAKPFLNKVVSTTTNIVTRCLNRVCTNYMPYFFTLLLQLCTFTRSTNSRIKASMPTTIAKNTVKSVGKFCLEASFNYLKSPNFSKLINIIIWFLLLSVCLGSLIYSTAALGVLMSNLGMPSYCTGYREGYLNSTNVTIATYCTGSIPCSVCLSGLDSLDTYPSLETIQITISSFKWDLTAFGLVAEWFLAYILFTRFFYVLGLAAIMQLFFSYFAVHFISNSWLMWLIINLVQMAPISAMVRMYIFFASFYYVWKSYVHVVDGCNSSTCMMCYKRNRATRVECTTIVNGVRRSFYVYANGGKGFCKLHNWNCVNCDTFCAGSTFISDEVARDLSLQFKRPINPTDQSSYIVDSVTVKNGSIHLYFDKAGQKTYERHSLSHFVNLDNLRANNTKGSLPINVIVFDGKSKCEESSAKSASVYYSQLMCQPILLLDQALVSDVGDSAEVAVKMFDAYVNTFSSTFNVPMEKLKTLVATAEAELAKNVSLDNVLSTFISAARQGFVDSDVETKDVVECLKLSHQSDIEVTGDSCNNYMLTYNKVENMTPRDLGACIDCSARHINAQVAKSHNIALIWNVKDFMSLSEQLRKQIRSAAKKNNLPFKLTCATTRQVVNVVTTKIALKGG

SEQ ID NO: 16200 - protein, 1946 aa, Artificial Sequence
  SARS-CoV-2__MT627748.1__non-structural protein 3 (NSP3)
MAPTKVTFGDDTVIEVQGYKSVNITFELDERIDKVLNEKCSAYTVELGTEVNEFACVVADAVIKTLQPVSELLTPLGIDLDEWSMATYYLFDESGEFKLASHMYCSFYPPDEDEEEGDCEEEEFEPSTQYEYGTEDDYQGKPLEFGATSAALQPEEEQEEDWLDDDSQQTVGQQDGSEDNQTTTIQTIVEVQPQLEMELTPVVQTIEVNSFSGYLKLTDNVYIKNADIVEEAKKVKPTVVVNAANVYLKHGGGVAGALNKATNNAMQVESDDYIATNGPLKVGGSCVLSGHNLAKHCLHVVGPNVNKGEDIQLLKSAYENFNQHEVLLAPLLSAGIFGADPIHSLRVCVDTVRTNVYLAVFDKNLYDKLVSSFLEMKSEKQVEQKIAEIPKEEVKPFITESKPSVEQRKQDDKKIKACVEEVTTTLEETKFLTENLLLYIDINGNLHPDSATLVSDIDITFLKKDAPYIVGDVVQEGVLTAVVIPTKKAGGTTEMLAKALRKVPTDNYITTYPGQGLNGYTVEEAKTVLKKCKSAFYILPSIISNEKQEILGTVSWNLREMLAHAEETRKLMPVCVETKAIVSTIQRKYKGIKIQEGVVDYGARFYFYTSKTTVASLINTLNDLNETLVTMPLGYVTHGLNLEEAARYMRSLKVPATVSVSSPDAVTAYNGYLTSSSKTPEEHFIETISLAGSYKDWSYSGQSTQLGIEFLKRGDKSVYYTSNPTTFHLDGEVITFDNLKTLLSLREVRTIKVFTTVDNINLHTQVVDMSMTYGQQFGPTYLDGADVTKIKPHNSHEGKTFYVLPNDDTLRVEAFEYYHTTDPSFLGRYMSALNHTKKWKYPQVNGLTSIKWADNNCYLATALLTLQQIELKFNPPALQDAYYRARAGEAANFCALILAYCNKTVGELGDVRETMSYLFQHANLDSCKRVLNVVCKTCGQQQTTLKGVEAVMYMGTLSYEQFKKGVQIPCTCGKQATKYLVQQESPFVMMSAPPAQYELKYGTFTCASEYTGNYQCGHYKHITSKETLYCIDGALLTKSSEYKGPITDVFYKENSYTTTIKPVTYKLDGVVCTEIDPKLDNYYKKDNSYFTEQPIDLVPNQPYPNASFDNFKFVCDNIKFADDLNQLTGYKKPASRELKVTFFPDLNGDVVAIDYKHYTPSFKKGAKLLHKPIVWHVNNATNKATYKPNTWCIRCLWSTKPVETSNSFDVLKSEDAQGMDNLACEDLKPVSEEVVENPTIQKDVLECNVKTTEVVGDIILKPANNSLKITEEVGHTDLMAAYVDNSSLTIKKPNELSRVLGLKTLATHGLAAVNSVPWDTIANYAKPFLNKVVSTTTNIVTRCLNRVCTNYMPYFFTLLLQLCTFTRSTNSRIKASMPTTIAKNTVKSVGKFCLEASFNYLKSPNFSKLINIIIWFLLLSVCLGSLIYSTAALGVLMSNLGMPSYCTGYREGYLNSTNVTIATYCTGSIPCSVCLSGLDSLDTYPSLETIQITISSFKWDLTAFGLVAEWFLAYILFTRFFYVLGLAAIMQLFFSYFAVHFISNSWLMWLIINLVQMAPISAMVRMYIFFASFYYVWKSYVHVVDGCNSSTCMMCYKRNRATRVECTTIVNGVRRSFYVYANGGKGFCKLHNWNCVNCDTFCAGSTFISDEVARDLSLQFKRPINPTDQSSYIVDSVTVKNGSIHLYFDKAGQKTYERHSLSHFVNLDNLRANNTKGSLPINVIVFDGKSKCEESSAKSASVYYSQLMCQPILLLDQALVSDVGDSAEVAVKMFDAYVNTFSSTFNVPMEKLKTLVATAEAELAKNVSLDNVLSTFISAARQGFVDSDVETKDVVECLKLSHQSDIEVTGDSCNNYMLTYNKVENMTPRDLGACIDCSARHINAQVAKSHNIALIWNVKDFMSLSEQLRKQIRSAAKKNNLPFKLTCATTRQVVNVVTTKIALKGG

SEQ ID NO: 16201 - protein, 1946 aa, Artificial Sequence
  SARS-CoV-2__MT627757.1__non-structural protein 3 (NSP3)
MAPTKVTFGDDTVIEVQGYKSVNITFELDERIDKVLNEKCSAYTVELGTEVNEFACVVADAVIKTLQPVSELLTPLGIDLDEWSMATYYLFDESGEFKLASHMYCSFYPPDEDEEEGDCEEEEFEPSTQYEYGTEDDYQGKPLEFGATSAALQPEEEQEEDWLDDDSQQTVVQQDGSEDNQTTTIQTIVEVQPQLEMELTPVVQTIEVNSFSGYLKLTDNVYIKNADIVEEAKKVKPTVVVNAANVYLKHGGGVAGALNKATNNAMQVESDDYIATNGPLKVGGSCVLSGHNLAKHCLHVVGPNVNKGEDIQLLKSAYENFNQHEVLLAPLLSAGIFGADPIHSLRVCVDTVRTNVYLAVFDKNLYDKLVSSFLEMKSEKQVEQKIAEIPKEEVKPFITESKPSVEQRKQDDKKIKACVEEVTTTLEETKFLTENLLLYIDINGNLHPDSATLVSDIDITFLKKDAPYIVGDVVQEGVLTAVVIPTKKAGGTTEMLAKALRKVPTDNYITTYPGQGLNGYTVEEAKTVLKKCKSAFYILPSIISNEKQEILGTVSWNLREMLAHAEETRKLMPVCVETKAIVSTIQRKYKGIKIQEGVVDYGARFYFYTSKTTVASLINTLNDLNETLVTMPLGYVTHGLNLEEAARYMRSLKVPATVSVSSPDAVTAYNGYLTSSSKTPEEHFIETISLAGSYKDWSYSGQSTQLGIEFLKRGDKSVYYTSNPTTFHLDGEVITFDNLKTLLSLREVRTIKVFTTVDNINLHTQVVDMSMTYGQQFGPTYLDGADVTKIKPHNSHEGKTFYVLPNDDTLRVEAFEYYHTTDPSFLGRYMSALNHTKKWKYPQVNGLTSIKWADNNCYLATALLTLQQIELKFNPPALQDAYYRARAGEAANFCALILAYCNKTVGELGDVRETMSYLFQHANLDSCKRVLNVVCKTCGQQQTTLKGVEAVMYMGTLSYEQFKKGVQIPCTCGKQATKYLVQQESPFVMMSAPPAQYELKHGTFTCASEYTGNYQCGHYKHITSKETLYCIDGALLTKSSEYKGPITDVFYKENSYTTTIKPVTYKLDGVVCTEIDPKLDNYYKKDNSYFTEQPIDLVPNQPYPNASFDNFKFVCDNIKFADDLNQLTGYKKPASRELKVTFFPDLNGDVVAIDYKHYTPSFKKGAKLLHKPIVWHVNNATNKATYKPNTWCIRCLWSTKPVETSNSFDVLKSEDAQGMDNLACEDLKPVSEEVVENPTIQKDVLECNVKTTEVVGDIILKPANNSLKITEEVGHTDLMAAYVDNSSLTIKKPNELSRVLGLKTLATHGLAAVNSVPWDTIANYAKPFLNKVVSTTTNIVTRCLNRVCTNYMPYFFTLLLQLCTFTRSTNSRIKASMPTTIAKNTVKSVGKFCLEASFNYLKSPNFSKLINIIIWFLLLSVCLGSLIYSTAALGVLMSNLGMPSYCTGYREGYLNSTNVTIATYCTGSIPCSVCLSGLDSLDTYPSLETIQITISSFKWDLTAFGLVAEWFLAYILFTRFFYVLGLAAIMQLFFSYFAVHFISNSWLMWLIINLVQMAPISAMVRMYIFFASFYYVWKSYVHVVDGCNSSTCMMCYKRNRATRVECTTIVNGVRRSFYVYANGGKGFCKLHNWNCVNCDTFCAGSTFISDEVARDLSLQFKRPINPTDQSSYIVDSVTVKNGSIHLYFDKAGQKTYERHSLSHFVNLDNLRANNTKGSLPINVIVFDGKSKCEESSAKSASVYYSQLMCQPILLLDQALVSDVGDSAEVAVKMFDAYVNTFSSTFNVPMEKLKTLVATAEAELAKNVSLDNVLSTFISAARQGFVDSDVETKDVVECLKLSHQSDIEVTGDSCNNYMLTYNKVENMTPRDLGACIDCSARHINAQVAKSHNIALIWNVKDFMSLSEQLRKQIRSAAKKNNLPFKLTCATTRQVVNVVTTKIALKGG

SEQ ID NO: 16202 - protein, 1946 aa, Artificial Sequence
  SARS-CoV-2__MT628061.1__non-structural protein 3 (NSP3)
MAPTKVTFGDDTVIEVQGYKSVNITFELDERIDKVLNEKCSAYTVELGTEVNEFACVVADAVIKTLQPVSELLTPLGIDLDEWSMATYYLFDESGEFKLASHMYCSFYPPDEDEEEGDCEEEEFEPSTQYEYGTEDDYQGKPLEFGATSAALQPEEEQEEDWLDDDSQQTVGQQDGSEDNQTTTIQTIVEVQPQLEMELTPVVQTIEVNSFSGYLKLTDNVYIKNADIVEEAKKVKPTVVVNAANVYLKHGGGVAGALNKATNNAMQVESDDYIATNGPLKVGGSCVLSGHNLAKHCLHVVGPNVNKGEDIQLLKSAYENFNQHEVLLAPLLSAGIFGADPIHSLRVCVDTVRTNVYLAVFDKNLYDKLVSSFLEMKSEKQVEQKIAEIPKEEVKPFITESKPSVEQRKQDDKKIKACVEEVTTTLEETKFLTENLLLYIDINGNLHPDSATLVSDIDITFLKKDAPYIVGDVVQEGVLTAVVIPTKKAGGTTEMLAKALRKVPTDNYITTYPGQGLNGYTVEEAKTVLKKCKSAFYILPSIISNEKQEILGTVSWNLREMLAHAEETRKLMPVCVETKAIVSTIQRKYKGIKIQEGVVDYGARFYFYTSKTTVASLINTLNDLNETLVTMPLGYVTHGLNLEEAARYMRSLKVPATVSVSSPDAVTAYNGYLTSSSKTPEEHFIETISLAGSYKDWSYSGQSTQLGIEFLKRGDKSVYYTSNPTTFHLDGEVITFDNLKTLLSLREVRTIKVFTTVDNINLHTQVVDMSMTYGQQFGPTYLDGADVTKIKPHNSHEGKTFYVLPNDDTLRVEAFEYYHTTDPSFLGRYMSALNHTKKWKYPQVNGLTSIKWADNNCYLATALLTLQQIELKFNPPALQDAYYRARAGEAANFCALILAYCNKTVGELGDVRETMSYLFQHANLDSCKRVLNVVCKTCGQQQTTLKGVEAVMYMGTLSYEQFKKGVQIPCTCGKQATKYLVQQESPFVMMSAPPAQYELKHGTFTCASEYTGNYQCGHYKHITSKETLYCIDGALLTKSSEYKGPITDVFYKENSYTTTIKPVTYKLDGVVCTEIDPKLDNYYKKDNSYFTEQPIDLVPNQPYPNASFDNFKFVCDNIKFADDLNQLTGYKKPASRELKVTFFPDLNGDVVAIDYKHYTPSFKKGAKLLHKPIVWHVNNATNKATYKPNTWCIRCLWSTKPVETSNSFDVLKSEDAQGMDNLACEDLKPVSEEVVENPTIQKDVLECNVKTTEVVGDIILKPANNSLKITEEVGHTDLMAAYVDNSSLTIKKPNELSRVLGLKTLATHGLAAVNSVPWDTIANYAKPFLNKVVSTTTNIVTRCLNRVCTNYMPYFFTLLLQLCTFTRSTNSRIKASMPTTIAKNTVKSVGKFCLEASFNYLKSPNFSKLINIIIWFLLLSVCLGSLIYSTAALGVLMSNLGMPFYCTGYREGYLNSTNVTIATYCTGSIPCSVCLSGLDSLDTYPSLETIQITISSFKWDLTAFGLVAEWFLAYILFTRFFYVLGLAAIMQLFFSYFAVHFISNSWLMWLIINLVQMAPISAMVRMYIFFASFYYVWKSYVHVVDGCNSSTCMMCYKRNRATRVECTTIVNGVRRSFYVYANGGKGFCKLHNWNCVNCDTFCAGSTFISDEVARDLSLQFKRPINPTDQSSYIVDSVTVKNGSIHLYFDKAGQKTYERHSLSHFVNLDNLRANNTKGSLPINVIVFDGKSKCEESSAKSASVYYSQLMCQPILLLDQALVSDVGDSAEVAVKMFDAYVNTFSSTFNVPMEKLKTLVATAEAELAKNVSLDNVLSTFISAARQGFVDSDVETKDVVECLKLSHQSDIEVTGDSCNNYMLTYNKVENMTPRDLGACIDCSARHINAQVAKSHNIALIWNVKDFMSLSEQLRKQIRSAAKKNNLPFKLTCATTRQVVNVVTTKIALKGG

SEQ ID NO: 16203 - protein, 1946 aa, Artificial Sequence
  SARS-CoV-2__MT628098.1__non-structural protein 3 (NSP3)
MAPTKVTFGDDTVIEVQGYKSVNITFELDERIDKVLNEKCSAYTVELGTEVNEFACVVADAVIKTLQPVSELLTPLGIDLDEWSMATYYLFDESGEFKLASHMYCSFYPPDEDEEEGDCEEEEFEPSTQYEYGTEDDYQGKPLEFGATSAALQPEEEQEEDWLDDDSQQTVGQQDGSEDNQTTTIQTIVEVQPQLEMELTPVVQTIEVNSFSGYLKLTDNVYIKNADIVEEAKKVKPTVVVNAANVYLKHGGGVAGALNKATNNAMQVESDDYIATNGPLKVGGSCVLSGHNLAKHCLHVVGPNVNKGEDIQLLKSAYENFNQHEVLLAPLLSAGIFGADPIHSLRVCVDTVRTNVYLAVFDKNLYDKLVSSFLEMKSEKQVEQKIAEIPKEEVKPFITESKPSVEQRKQDDKKIKACVEEVTTTLEETKFLTENLLLYIDINGNLHPDSATLVSDIDITFLKKDAPYIVGDVVQEGVLTAVVIPTKKAGGTTEMLAKALRKVPTDNYITTYPGQGLNGYTVEEAKTVLKKCKSAFYILPSIISNEKQEILGTVSWNLREMLAHAEETRKLMPVCVETKAIVSTIQRKYKGIKIQEGVVDYGARFYFYTSKTTVASLINTLNDLNETLVTMPLGYVTHGLNLEEAARYMRSLKVPATVSVSSPDAVTAYNGYLTSSSKTPEEHFIETISLAGSYKDWSYSGQSTQLGIEFLKRGDKSVYYTSNPTTFHLDGEVITFDNLKTLLSLREVRTIKVFTTVDNINLHTQVVDMSMTYGQQFGPTYLDGADVTKIKPHNSHEGKTFYVLPNDDTLRVEAFEYYHTTDPSFLGRYMSALNHTKKWKYPQVNGLTSIKWADNNCYLATALLTLQQIELKFNPPALQDAYYRARAGEAANFCALILAYCNKTVGELGDVRETMSYLFQHANLDSCKRVLNVVCKTCGQQQTTLKGVEAVMYMGTLSYEQFKKGVQIPCTCGKQATKYLVQQESPFVMMSAPPAQYELKHGTFTCASEYTGNYQCGHYKHITSKETLYCIDGALLTKSSEYKGPITDVFYKENSYTTTIKPVTYKLDGVVCTEIDPKLDNYYKKDNSYFTEQPIDLVPNQPYPNASFDNFKFVCDNIKFADDLNQLTGYKKPASRELKVTFFPDLNGDVVAIDYKHYTPSFKKGAKLLHKPIVWHVNNATNKATYKPNTWCIRCLWSTKPVETSNSFDVLKSEDAQGMDNLACEDLKPVSEEVVENPTIQKDVLECNVKTTEVVGDIILKPANNSLKITEEVGHTDLMAAYVDNSSLTIKKPNELSRVLGLKTLATHGLAAVNSVPWDTIANYAKPFLNKVVSTTTNIVTRCLNRVCTNYMPYFFTLLLQLCTFTRSTNSRIKASMPTTIAKNTVKSVGKFCLEASFNYLKSPNFSKLINIIIWFLLLSVCLGSLIYSTAALGVLMSNLGMPSYCTGYREGYLNSTNVTIATYCTGSIPCSVCLSGLDSLDTYPSLETIQITISSFKWDLTAFGLVAEWFLAYILFTRFFYVLGLAAIMQLFFSYFAVHFISNSWLMWLIINLVQMAPISAMVRMYIFFASFYYVWKSYVHVVDGCNSSTCMMCYKRNRATRVECTTIVNGVRRSFYVYANGGKGFCKLHNWNCVNCDTFCAGSTFISDEVARDLSLQFKRPINPTDQSSYIVDSVTVKNGSIHLYFDKAGQKTYERHSLSHFVNLDNLRANNTKGSLPINVIVFDGKSKCEESSAKSASVYYSQLMCQPILLLDQALVSDVGDSAEVAVKMFDAYVNTFSSTFNVPMEKLKTLVATAEAELAKNVSLDNVLSTFISAARQGFVDSDVETKDVVECLKLSHQSDIEVTGDSCNNYMLTYNKVENMTPRDLGACIDCSARHINAQVAKSHNIALIWNVKDFMSLSEQLRKQIRSAAKKNNLPFKLTCATTRQVVNVITTKIALKGG

SEQ ID NO: 16204 - protein, 1946 aa, Artificial Sequence
  SARS-CoV-2__MT628104.1__non-structural protein 3 (NSP3)
MAPTKVTFGDDTVIEVQGYKSVNITFELDERIDKVLNEKCSAYTVELGTEVNEFACVVADAVIKTLQPVSELLTPLGIDLDEWSMATYYLFDESGEFKLASHMYCSFYPPDEDEEEGDCEEEEFEPSTQYEYGTEDDYQGKPLEFGATSAALQPEEEQEEDWLDDDSQQTVGQQDGSEDNQTTTIQTIVEVQPQLEMELTPVVQTIEVNSFSGYLKLTDNVYIKNADIVEEAKKVKPTVVVNAANVYLKHGGGVAGALNKATNNAMQVESDDYIATNGPLKVGGSCVLSGHNLAKHCLHVVGPNVNKGEDIQLLKSAYENFNQHEVLLAPLLSAGIFGADPIHSLRVCVDTVRTNVYLAVFDKNLYDKLVSSFLEMKSEKQVEQKIAEIPKEEVKPFITESKPSVEQRKQDDKKIKACVEEVTTTLEETKFLTENLLLYIDINGNLHPDSATLVSDIDITFLKKDAPYIVGDVVQEGVLTAVVIPTKKAGGTTEMLAKALRKVPTDNYITTYPGQGLNGYTVEEAKTVLKKCKSAFYILPSIISNEKQEILGTVSWNLREMLAHAEETRKLMPVCVETKAIVSTIQRKYKGIKIQEGVVDYGARFYFYTSKTTVASLINTLNDLNETLVTMPLGYVTHGLNLEEAARYMRSLKVPATVSVSSPDAVTAYNGYLTSSSKTPEEHFIEIISLAGSYKDWSYSGQSTQLGIEFLKRGDKSVYYTSNPTTFHLDGEVITFDNLKTLLSLREVRTIKVFTTVDNINLHTQVVDMSMTYGQQFGPTYLDGADVTKIKPHNSHEGKTFYVLPNDDTLRVEAFEYYHTTDPSFLGRYMSALNHTKKWKYPQVNGLTSIKWADNNCYLATALLTLQQIELKFNPPALQDAYYRARAGEAANFCALILAYCNKTVGELGDVRETMSYLFQHANLDSCKRVLNVVCKTCGQQQTTLKGVEAVMYMGTLSYEQFKKGVQIPCTCGKQATKYLVQQESPFVMMSAPPAQYELKHGTFTCASEYTGNYQCGHYKHITSKETLYCIDGALLTKSSEYKGPITDVFYKENSYTTTIKPVTYKLDGVVCTEIDPKLDNYYKKDNSYFTEQPIDLVPNQPYPNASFDNFKFVCDNIKFADDLNQLTGYKKPASRELKVTFFPDLNGDVVAIDYKHYTPSFKKGAKLLHKPIVWHVNNATNKATYKPNTWCIRCLWSTKPVETSNSFDVLKSEDAQGMGNLACEDLKPVSEEVVENPTIQKDVLECNVKTTEVVGDIILKPANNSLKITEEVGHTDLMAAYVDNSSLTIKKPNELSRVLGLKTLAIHGLAAVNSVPWDTIANYAKPFLNKVVSTTTNIVTRCLNRVCTNYMPYFFTLLLQLCTFTRSTNSRIKASMPTTIAKNTVKSVGKFCLEASFNYLKSPNFSKLINIIIWFLLLSVCLGSLIYSTAALGVLMSNLGMPSYCTGYREGYLNSTNVTIATYCTGSIPCSVCLSGLDSLDTYPSLETIQITISSFKWDLTAFGLVAEWFLAYILFTRFFYVLGLAAIMQLFFSYFAVHFISNSWLMWLIINLVQMAPISAMVRMYIFFASFYYVWKSYVHVVDGCNSSTCMMCYKRNRATRVECTTIVNGVRRSFYVYANGGKGFCKLHNWNCVNCDTFCAGSTFISDEVARDLSLQFKRPINPTDQSSYIVDSVTVKNGSIHLYFDKAGQKTYERHSLSHFVNLDNLRANNTKGSLPINVIVFDGKSKCEESSAKSASVYYSQLMCQPILLLDQALVSDVGDSAEVAVKMFDAYVNTFSSTFNVPMEKLKTLVATAEAELAKNVSLDNVLSTFISAARQGFVDSDVETKDVVECLKLSHQSDIEVTGDSCNNYMLTYNKVENMTPRDLGACIDCSARHINAQVAKSHNIALIWNVKDFMSLSEQLRKQIRSAAKKNNLPFKLTCATTRQVVNVVTTKIALKGG

SEQ ID NO: 16205 - protein, 1946 aa, Artificial Sequence
  SARS-CoV-2__MT628127.1__non-structural protein 3 (NSP3)
MAPTKVTFGDDTVIEVQGYKSVNITFELDERIDKVLNEKCSAYTVELGTEVNEFACVVADAVIKTLQPVSELLTPLGIDLDEWSMATYYLFDESGEFKLASHMYCSFYPPDEDEEEGDCEEEEFEPSTQYEYGTEDDYQGKPLEFGATSAALQPEEEQEEDWLDDDSQQTVGQQDGSEDNQTTTIQTIVEVQPQLEMELTPVVQTIEVNSFSGYLKLTDNVYIKNADIVEEAKKVKPTVVVNAANVYLKHGGGVAGALNKATNNAMQVESDDYIATNGPLKVGGSCVLSGHNLAKHCLHVVGPNVNKGEDIQLLKSAYENFNQHEVLLAPLLSAGIFGADPIHSLRVCVDTVRTNVYLAVFDKNLYDKLVSSFLEMKSEKQVEQKIAEIPKEEVKPFITESKPSVEQRKQDDKKIKACVEEVTTTLEETKFLTENLLLYIDINGNLHPDSATLVSDIDITFLKKDAPYIVGDVVQEGVLTAVVIPTKKAGGTTEMLAKALRKVPTDNYITTYPGQGLNGYTVEEAKTVLKKCKSAFYILPSIISNEKQEILGTVSWNLREMLAHAEETRKLMPVCVETKAIVSTIQRKYKGIKIQEGVVDYGARFYFYTSKTTVASLINTLNDLNETLVTMPLGYVTHGLNLEEAARYMRSLKVPATVSVSSPDAVTAYNGYLTSSSKTPEEHFIETISLAGSYKDWSYSGQSTQLGIEFLKRGDKSVYYTSNPTTFHLDGEVITFDNLKTLLSLREVRTIKVFTTVDNINLHTQVVDMSMTYGQQFGPTYLDGADVTKIKPHNSHEGKTFYVLPNDDTLRVEAFEYYHTTDPSFLGRYMSALNHTKKWKYPQVNGLTSIKWADNNCYLATALLTLQQIELKFNPPALQDAYYRARAGEAANFCALILAYCNKTVGELGDVRETMSYLFQHANLDSCKRVLNVVCKTCGQQQTTLKGVEAVMYMGTLSYEQFKKGVQIPCTCGKQATKYLVQQESPFVMMSAPPAQYELKHGTFTCASEYTGNYQCGHYKHITSKETLYCIDGALLTKSSEYKGPITDVFYKENSYTTTIKPVTYKLDGVVCTEIDPKLDNYYKKDNSYFTEQPIDLVPNQPYPNASFDNFKFVCDNIKFADDLNQLTGYKKPASRELKVTFFPDLNGDVVAIDYKHYTPSFKKGAKLLHKPIVWHVNNATNKATYKPNTWCIRCLWSTKPVETSNSFDVLKSEDAQGMDNLACEDLQPVSEEVVENPTIQKDVLECNVKTTEVVGDIILKPANNSLKITEEVGHTDLMAAYVDNSSLTIKKPNELSRVLGLKTLATHGLAAVNSVPWDTIANYAKPFLNKVVSTTTNIVTRCLNRVCTNYMPYFFTLLLQLCTFTRSTNSRIKASMPTTIAKNTVKSVGKFCLEASFNYLKSPNFSKLINIIIWFLLLSVCLGSLIYSTAALGVLMSNLGMPSYCTGYREGYLNSTNVTIATYCTGSIPCSVCLSGLDSLDTYPSLETIQITISSFKWDLTAFGLVAEWFLAYILFTRFFYVLGLAAIMQLFFSYFAVHFISNSWLMWLIINLVQMAPISAMVRMYIFFASFYYVWKSYVHVVDGCNSSTCMMCYKRNRATRVECTTIVNGVRRSFYVYANGGKGFCKLHNWNCVNCDTFCAGSTFISDEVARDLSLQFKRPINPTDQSSYIVDSVTVKNGSIHLYFDKAGQKTYERHSLSHFVNLDNLRANNTKGSLPINVIVFDGKSKCEESSAKSASVYYSQLMCQPILLLDQALVSDVGDSAEVAVKMFDAYVNTFSSTFNVPMEKLKTLVATAEAELAKNVSLDNVLSTFISAARQGFVDSDVETKDVVECLKLSHQSDIEVTGDSCNNYMLTYNKVENMTPRDLGACIDCSARHINAQVAKSHNIALIWNVKDFMSLSEQLRKQIRSAAKKNNLPFKLTCATTRQVVNVVTTKIALKGG

SEQ ID NO: 16206 - protein, 1946 aa, Artificial Sequence
  SARS-CoV-2__MT628152.1__non-structural protein 3 (NSP3)
MAPTKVTFGDDTVIEVQGYKSVNITFELDERIDKVLNEKCSAYTVELGTEVNEFACVVADAVIKTLQPVSELLTPLGIDLDEWSMATYYLFDESGEFKLASHMYCSFYPPDEDEEEGDCEEEEFEPSTQYEYGTEDDYQGKPLEFGATSAALQPEEEQEEDWLDDDSQQTVGQQDGSEDNQTTTIQTIVEVQPQLEMELTPVVQTIEVNSFSGYLKLTDNVYIKNADIVEEAKKVKPTVVVNAANVYLKHGGGVAGALNKATNNAMQVESDDYIATNGPLKVGGSCVLSGHNLAKHCLHVVGPNVNKGEDIQLLKSAYENFNQHEVLLAPLLSAGIFGADPIHSLRVCVDTVRTNVYLAVFDKNLYDKLVSSFLEMKSEKQVEQKIAEIPKEEVKPFITESKPSVEQRKQDDKKIKACVEEVTTTLEETKFLTENLLLYIDINGNLHPDSATLVSDIDITFLKKDAPYIVGDVVQEGVLTAVVIPTKKAGGTTEMLAKALRKVPTDNYITTYPGQGLNGYTVEEAKTVLKKCKSAFYILPSIISNEKQEILGTVSWNLREMLAHAEETRKLMPVCVETKAIVSTIQRKYKGIKIQEGVVDYGARFYFYTSKTTVASLINTLNDLNETLVTMPLGYVTHGLNLEEAARYMRSLKVPATVSVSSPDAVTAYNGYLTSSSKTPEEHFIETISLAGSYKDWSYSGQSTQLGIEFLKRGDKSVYYTSNPTTFHLDGEVITFDNLKTLLSLREVRTIKVFTTVDNINLHTQVVDMSMTYGQQFGPTYLDGADVTKIKPHNSHEGKTFYVLPNDDTLRVEAFEYYHTTDPSFLGRYMSALNHTKKWKYPQVNGLTSIKWADNNCYLATALLTLQQIELKFNPPALQDAYYRARAGEAANFCALILAYCNKTVGELGDVRETMSYLFQHANLDSCKRVLNVVCKTCGQQQTTLKGVEAVMYMGTLSYEQFKKGVQIPCTCGKQATKYLVQQESPFVMMSAPPAQYELKHGTFTCASEYTGNYQCGHYKHITSKETLYCIDGALLTKSSEYKGPITDVFYKENSYTTTIKPVTYKLDGVVCTEIDPKLDNYYKKDNSYFTEQPIDLVSNQPYPNASFDNFKFVCDNIKFADDLNQLTGYKKPASRELKVTFFPDLNGDVVAIDYKHYTPSFKKGAKLLHKPIVWHVNNATNKATYKPNTWCIRCLWSTKPVETSNSFDVLKSEDAQGMDNLACEDLKPVSEEVVENPTIQKDVLECNVKTTEVVGDIILKPANNSLKITEEVGHTDLMAAYVDNSSLTIKKPNELSRVLGLKTLATHGLAAVNSVPWDTIANYAKPFLNKVVSTTTNIVTRCLNRVCTNYMPYFFTLLLQLCTFTRSTNSRIKASMPTTIAKNTVKSVGKFCLEASFNYLKSPNFSKLINIIIWFLLLSVCLGSLIYSTAALGVLMSNLGMPSYCTGYREGYLNSTNVTIATYCTGSIPCSVCLSGLDSLDTYPSLETIQITISSFKWDLTAFGLVAEWFLAYILFTRFFYVLGLAAIMQLFFSYFAVHFISNSWLMWLIINLVQMAPISAMVRMYIFFASFYYVWKSYVHVVDGCNSSTCMMCYKRNRATRVECTTIVNGVRRSFYVYANGGKGFCKLHNWNCVNCDTFCAGSTFISDEVARDLSLQFKRPINPTDQSSYIVDSVTVKNGSIHLYFDKAGQKTYERHSLSHFVNLDNLRANNTKGSLPINVIVFDGKSKCEESSAKSASVYYSQLMCQPILLLDQALVSDVGDSAEVAVKMFDAYVNTFSSTFNVPMEKLKTLVATAEAELAKNVSLDNVLSTFISAARQGFVDSDVETKDVVECLKLSHQSDIEVTGDSCNNYMLTYNKVENMTPRDLGACIDCSARHINAQVAKSHNIALIWNVKDFMSLSEQLRKQIRSAAKKNNLPFKLTCATTRQVVNVVTTKIALKGG

SEQ ID NO: 16207 - protein, 1946 aa, Artificial Sequence
  SARS-CoV-2__MT628204.1__non-structural protein 3 (NSP3)
MAPTKVTFGDDTVIEVQGYKSVNITFELDERIDKVLNEKCSAYTVELGTEVNEFACVVADAVIKTLQPVSELLTPLGIDLDEWSMAIYYLFDESGEFKLASHMYCSFYPPDEDEEEGDCEEEEFEPSTQYEYGTEDDYQGKPLEFGATSAALQPEEEQEEDWLDDDSQQTVGQQDGSEDNQTTTIQTIVEVQPQLEMELTPVVQTIEVNSFSGYLKLTDNVYIKNADIVEEAKKVKPTVVVNAANVYLKHGGGVAGALNKATNNAMQVESDDYIATNGPLKVGGSCVLSGHNLAKHCLHVVGPNVNKGEDIQLLKSAYENFNQHEVLLAPLLSAGIFGADPIHSLRVCVDTVRTNVYLAVFDKNLYDKLVSSFLEMKSEKQVEQKIAEIPKEEVKPFITESKPSVEQRKQDDKKIKACVEEVTTTLEETKFLTENLLLYIDINGNLHPDSATLVSDIDITFLKKDAPYIVGDVVQEGVLTAVVIPTKKAGGTTEMLAKALRKVPTDNYITTYPGQGLNGYTVEEAKTVLKKCKSAFYILPSIISNEKQEILGTVSWNLREMLAHAEETRKLMPVCVETKAIVSTIQRKYKGIKIQEGVVDYGARFYFYTSKTTVASLINTLNDLNETLVTMPLGYVTHGLNLEEAARYMRSLKVPATVSVSSPDAVTAYNGYLTSSSKTPEEHFIETISLAGSYKDWSYSGQSTQLGIEFLKRGDKSVYYTSNPTTFHLDGEVITFDNLKTLLSLREVRTIKVFTTVDNINLHTQVVDMSMTYGQQFGPTYLDGADVTKIKPHNSHEGKTFYVLPNDDTLRVEAFEYYHTTDPSFLGRYMSALNHTKKWKYPQVNGLTSIKWADNNCYLATALLTLQQIELKFNPPALQDAYYRARAGEAANFCALILAYCNKTVGELGDVRETMSYLFQHANLDSCKRVLNVVCKTCGQQQTTLKGVEAVMYMGTLSYEQFKKGVQIPCTCGKQATKYLVQQESPFVMMSAPPAQYELKHGTFTCASEYTGNYQCGHYKHITSKETLYCIDGALLTKSSEYKGPITDVFYKENSYTTTIKPVTYKLDGVVCTEIDPKLDNYYKKDNSYFTEQPIDLVPNQPYPNASFDNFKFVCDNIKFADDLNQLTGYKKPASRELKVTFFPDLNGDVVAIDYKHYTPSFKKGAKLLHKPIVWHVNNATNKATYKPNTWCIRCLWSTKPVETSNSFDVLKSEDAQGMDNLACEDLKPVSEEVVENPTIQKDVLECNVKTTEVVGDIILKPANNSLKITEEVGHTDLMAAYVDNSSLTIKKPNELSRVLGLKTLATHGLAAVNSVPWDTIANYAKPFLNKVVSTTTNIVTRCLNRVCTNYMPYFFTLLLQLCTFTRSTNSRIKASMPTTIAKNTVKSVGKFCLEASFNYLKSPNFSKLINIIIWFLLLSVCLGSLIYSTAALGVLMSNLGMPSYCTGYREGYLNSTNVTIATYCTGSIPCSVCLSGLDSLDTYPSLETIQITISSFKWDLTAFGLVAEWFLAYILFTRFFYVLGLAAIMQLFFSYFAVHFISNSWLMWLIINLVQMAPISAMVRMYIFFASFYYVWKSYVHVVDGCNSSTCMMCYKRNRATRVECTTIVNGVRRSFYVYANGGKGFCKLHNWNCVNCDTFCAGSTFISDEVARDLSLQFKRPINPTDQSSYIVDSVTVKNGSIHLYFDKAGQKTYERHSLSHFVNLDNLRANNTKGSLPINVIVFDGKSKCEESSAKSASVYYSQLMCQPILLLDQALVSDVGDSAEVAVKMFDAYVNTFSSTFNVPMEKLKTLVATAEAELAKNVSLDNVLSTFISAARQGFVDSDVETKDVVECLKLSHQSDIEVTGDSCNNYMLTYNKVENMTPRDLGACIDCSARHINAQVAKSHNIALIWNVKDFMSLSEQLRKQIRSAAKKNNLPFKLTCATTRQVVNVVTTKIALKGG

SEQ ID NO: 16208 - protein, 1946 aa, Artificial Sequence
  SARS-CoV-2__MT628215.1__non-structural protein 3 (NSP3)
MAPTKVTFGDDTVIEVQGYKSVNITFELDERIDKVLNEKCSAYTVELGTEVNEFACVVADAVIKTLQPVSELLTPLGIDLDEWSMATYYLFDESGEFKLASHMYCSFYPPDEDEEEGDCEEEEFEPSTQYEYGTEDDYQGKPLEFGATSAALQPEEEQEEDWLDDDSQQTVGQQDGSEDNQTTTIQTIVEVQPQLEMELTPVVQTIEVNSFSGYLKLTDNVYIKNADIVEEAKKVKPTVVVNAANVYLKHGGGVAGALNKATNNAMQVESDDYIATNGPLKVGGSCVLSGHNLAKHCLHVVGPNVNKGEDIQLLKSAYENFNQHEVLLAPLLSAGIFGADPIHSLRVCVDTVRTNVYLAVFDKNLYDKLVSSFLEMKSEKQVEQKIAEIPKEEVKPFITESKPSVEQRKQDDKKIKACVEEVTTTLEETKFLTENLLLYIDINGNLHPDSATLVSDIDITFLKKDAPYIVGDVVQEGVLTAVVIPTKKAGGTTEMLAKALRKVPTDNYITTYPGQGLNGYTVEEAKTVLKKCKSAFYILPSIISNEKQEILGTVSWNLREMLAHAEETRKLMPVCVETKAIVSTIQRKYKGIKIQEGVVDYGARFYFYTSKTTVASLINTLNDLNETLVTMPLGYVTHGLNLEEAARYMRSLKVPATVSVSSPDAVTAYNGYLTSSSKTPEEHFIETISLAGSYKDWSYSGQSTQLGIEFLKRGDKSVYYTSNPTTFHLDGEVITFDNLKTLLSLREVRTIKVFTTVDNINLHTQVVDMSMTYGQQFGPTYLDGADVTKIKPHNSHEGKTFYVLPNDDTLRVEAFEYYHTTDPSFLGRYMSALNHTKKWKYPQVNGLTSIKWADNNCYLATALLTLQQIELKFNPPALQDAYYRARAGEAANFCALILAYCNKTVGELGDVRETMSYLFQHANLDSCKRVLNVVCKTCGQQQTTLKGVEAVMYMGTLSYEQFKKGVQIPCTCGKQATKYLVQQESPFVMMSAPPAQYELKHGTFTCASEYTGNYQCGHYKHITSKETLYCIDGALLTKSSEYKGPITDVFYKENSYTTTIKPVTYKLDGVVCTEIDPKLDNYYKKDNSYFTEQPIDLVPNQPYPNASFDNFKFVCDNIKFADDLNQLTGYKKPASRELKVTFFPDLNGDVVAIDYKHYTPSFKKGAKLLHKPIVWHVNNSTNKATYKPNTWCIRCLWSTKPVETSNSFDVLKSEDAQGMDNLACEDLKPVSEEVVENPTIQKDVLECNVKTTEVVGDIILKPANNSLKITEEVGHTDLMAAYVDNSSLTIKKPNELSRVLGLKTLATHGLAAVNSVPWDTIANYAKPFLNKVVSTTTNIVTRCLNRVCTNYMPYFFTLLLQLCTFTRSTNSRIKASMPTTIAKNTVKSVGKFCLEASFNYLKSPNFSKLINIIIWFLLLSVCLGSLIYSTAALGVLMSNLGMPSYCTGYREGYLNSTNVTIATYCTGSIPCSVCLSGLDSLDTYPSLETIQITISSFKWDLTAFGLVAEWFLAYILFTRFFYVLGLAAIMQLFFSYFAVHFISNSWLMWLIINLVQMAPISAMVRMYIFFASFYYVWKSYVHVVDGCNSSTCMMCYKRNRATRVECTTIVNGVRRSFYVYANGGKGFCKLHNWNCVNCDTFCAGSTFISDEVARDLSLQFKRPINPTDQSSYIVDSVTVKNGSIHLYFDKAGQKTYERHSLSHFVNLDNLRANNTKGSLPINVIVFDGKSKCEESSAKSASVYYSQLMCQPILLLDQALVSDVGDSAEVAVKMFDAYVNTFSSTFNVPMEKLKTLVATAEAELAKNVSLDNVLSTFISAARQGFVDSDVETKDVVECLKLSHQSDIEVTGDSCNNYMLTYNKVENMTPRDLGACIDCSARHINAQVAKSHNIALIWNVKDFMSLSEQLRKQIRSAAKKNNLPFKLTCATTRQVVNVVTTKIALKGG

SEQ ID NO: 16209 - protein, 1946 aa, Artificial Sequence
  SARS-CoV-2__MT628218.1__non-structural protein 3 (NSP3)
MAPTKVTFGDDTVIEVQGYKSVNITFELDERIDKVLNEKCSAYTVELGTEVNEFACVVADAVIKTLQPVSELLTPLGIDLDEWSMATYYLFDESGEFKLASHMYCSFYPPDEDEEEGDCEEEEFEPSTQYEYGTEDDYQGKPLEFGATSAALQPEEEQEEDWLDDDSQQTVGQQDGSEDNQTTTIQTIVEVQPQLEMELTPVVQTIEVNSFSGYLKLTDNVYIKNADIVEEAKKVKPTVVVNAANVYLKHGGGVAGALNKATNNAMQVESDDYIATNGPLKVGGSCVLSGHNLAKHCLHVVGPNVNKGEDIQLLKSAYENFNQHEVLLAPLLSAGIFGADPIHSLRVCVDTVRTNVYLAVFDKNLYDKLVSSFLEMKSEKQVEQKIAEIPKEEVKPFITESKPSVEQRKQDDKKIKACVEEVTTTLEETKFLTENLLLYIDINGNLHPDSATLVSDIDITFLKKDAPYIVGDVVQEGVLTAVVIPTKKAGGTTEMLAKALRKVPTDNYITTYPGQGLNGYTVEEAKTVLKKCKSAFYILPSIISNEKQEILGTVSWNLREMLAHAEETRKLMPVCVETKAIVSTIQRKYKGIKIQEGVVDYGARFYFYTSKTTVASLINTLNDLNETLVTMPLGYVTHSLNLEEAARYMRSLKVPATVSVSSPDAVTAYNGYLTSSSKTPEEHFIETISLAGSYKDWSYSGQSTQLGIEFLKRGDKSVYYTSNPTTFHLDGEVITFDNLKTLLSLREVRTIKVFTTVDNINLHTQVVDMSMTYGQQFGPTYLDGADVTKIKPHNSHEGKTFYVLPNDDTLRVEAFEYYHTTDPSFLGRYMSALNHTKKWKYPQVNGLTSIKWADNNCYLATALLTLQQIELKFNPPALQDAYYRARAGEAANFCALILAYCNKTVGELGDVRETMSYLFQHANLDSCKRVLNVVCKTCGQQQTTLKGVEAVMYMGTLSYEQFKKGVQIPCTCGKQATKYLVQQESPFVMMSAPPAQYELKHGTFTCASEYTGNYQCGHYKHITSKETLYCIDGALLTKSSEYKGPITDVFYKENSYTTTIKPVTYKLDGVVCTEIDPKLDNYYKKDNSYFTEQPIDLVPNQPYPNASFDNFKFVCDNIKFADDLNQLTGYKKPASRELKVTFFPDLNGDVVAIDYKHYTPSFKKGAKLLHKPIVWHVNNATNKATYKPNTWCIRCLWSTKPVETSNSFDVLKSEDAQGMDNLACEDLKPVSEEVVENPTIQKDVLECNVKTTEVVGDIILKPANNSLKITEEVGHTDLMAAYVDNSSLTIKKPNELSRVLGLKTLATHGLAAVNSVPWDTIANYAKPFLNKVVSTTTNIVTRCLNRVCTNYMPYFFTLLLQLCTFTRSTNSRIKASMPTTIAKNTVKSVGKFCLEASFNYLKSPNFSKLINIIIWFLLLSVCLGSLIYSTAALGVLMSNLGMPSYCTGYREGYLNSTNVTIATYCTGSIPCSVCLSGLDSLDTYPSLETIQITISSFKWDLTAFGLVAEWFLAYILFTRFFYVLGLAAIMQLFFSYFAVHFISNSWLMWLIINLVQMAPISAMVRMYIFFASFYYVWKSYVHVVDGCNSSTCMMCYKRNRATRVECTTIVNGVRRSFYVYANGGKGFCKLHNWNCVNCDTFCAGSTFISDEVARDLSLQFKRPINPTDQSSYIVDSVTVKNGSIHLYFDKAGQKTYERHSLSHFVNLDNLRANNTKGSLPINVIVFDGKSKCEESSAKSASVYYSQLMCQPILLLDQALVSDVGDSAEVAVKMFDAYVNTFSSTFNVPMEKLKTLVATAEAELAKNVSLDNVLSTFISAARQGFVDSDVETKDVVECLKLSHQSDIEVTGDSCNNYMLTYNKVENMTPRDLGACIDCSARHINAQVAKSHNIALIWNVKDFMSLSEQLRKQIRSAAKKNNLPFKLTCATTRQVVNVVTTKIALKGG

SEQ ID NO: 16210 - protein, 1946 aa, Artificial Sequence
  SARS-CoV-2__MT628230.1__non-structural protein 3 (NSP3)
MAPTKVTFGDDTVIEVQGYKSVNITFELDERIDKVLNEKCSAYTVELGTEVNEFACVVADAVIKTLQPVSELLTPLGIDLDEWSMATYYLFDESGEFKLASHMYCSFYPPDEDEEEGDCEEEEFEPSTQYEYGTEDDYQGKPLEFGATSAALQPEEEQEEDWLDDDSQQTVGQQDGSEDNQTTTIQTIVEVQPQLEMELTPVVQTIEVNSFSGYLKLTDNVYIKNADIVEEAKKVKPTVVVNAANVYLKHGGGVAGALNKATNNAMQVESDDYIATNGPLKVGGSCVLSGHNLAKHCLHVVGPNVNKGEDIQLLKSAYENFNQHEVLLAPLLSAGIFGADPIHSLRVCVDTVRTNVYLAVFDKNLYDKLVSSFLEMKSEKQVEQKIAEIPKEEVKPFITESKPSVEQRKQDDKKIKACVEEVTTTLEETKFLTENLLLYIDINGNLHPDSATLVSDIDITFLKKDAPYIVGDVVQEGVLTAVVIPTKKAGGTTEMLAKALRKVPTDNYITTYPGQGLNGYTVEEAKTVLKKCKSAFYILPSIISNEKQEILGTVSWNLREMLAHAEETRKLMPVCVETKAIVSTIQRKYKGIKIQEGVVDYGARFYFYTSKTTVASLINTLNDLNETLVTMPLGYVTHGLNLEEAARYMRSLKVPATVSVSSPDAVTAYNGYLTSSSKTPEEHFIEIISLAGSYKDWSYSGQSTQLGIEFLKRGDKSVYYTSNPTTFHLDGEVITFDNLKTLLSLREVRTIKVFTTVDNINLHTQVVDMSMTYGQQFGPTYLDGADVTKIKPHNSHEGKTFYVLPNDDTLRVEAFEYYHTTDPSFLGRYMSALNHTKKWKYPQVNGLTSIKWADNNCYLATALLTLQQIELKFNPPALQDAYYRARAGEAANFCALILAYCNKTVGELGDVRETMSYLFQHANLDSCKRVLNVVCKTCGQQQTTLKGVEAVMYMGTLSYEQFKKGVQIPCTCGKQATKYLVQQESPFVMMSAPPAQYELKHGTFTCASEYTGNYQCGHYKHITSKETLYCIDGALLTKSSEYKGPITDVFYKENSYTTTIKPVTYKLDGVVCTEIDPKLDNYYKKDNSYFTEQPIDLVPNQPYPNASFDNFKFVCDNIKFADDLNQLTGYKKPASRELKVTFFPDLNGDVVAIDYKHYTPSFKKGAKLLHKPIVWHVNNATNKATYKPNTWCIRCLWSTKPVETSNSFDVLKSEDAQGMDNLACEDLKPVSEEVVENPTIQKDVLECNVKTTEVVGDIILKPANNSLKITEEVGHTDLMAAYVDNSSLTIKKPNELSRVLGLKTLATHGLAAVNSVPWDTIANYAKPFLNKVVSTTTNIVTRCLNRVCTNYMPYFFTLLLQLCTFTRSTNSRIKASMPTTIAKSTVKSVGKFCLEASFNYLKSPNFSKLINIIIWFLLLSVCLGSLIYSTAALGVLMSNLGMPSYCTGYREGYLNSTNVTIATYCTGSIPCSVCLSGLDSLDTYPSLETIQITISSFKWDLTAFGLVAEWFLAYILFTRFFYVLGLAAIMQLFFSYFAVHFISNSWLMWLIINLVQMAPISAMVRMYIFFASFYYVWKSYVHVVDGCNSSTCMMCYKRNRATRVECTTIVNGVRRSFYVYANGGKGFCKLHNWNCVNCDTFCAGSTFISDEVARDLSLQFKRPINPTDQSSYIVDSVTVKNGSIHLYFDKAGQKTYERHSLSHFVNLDNLRANNTKGSLPINVIVFDGKSKCEESSAKSASVYYSQLMCQPILLLDQALVSDVGDSAEVAVKMFDAYVNTFSSTFNVPMEKLKTLVATAEAELAKNVSLDNVLSTFISAARQGFVDSDVETKDVVECLKLSHQSDIEVTGDSCNNYMLTYNKVENMTPRDLGACIDCSARHINAQVAKSHNIALIWNVKDFMSLSEQLRKQIRSAAKKNNLPFKLTCATTRQVVNVVTTKIALKGG

SEQ ID NO: 16211 - protein, 1946 aa, Artificial Sequence
  SARS-CoV-2__MT628231.1__non-structural protein 3 (NSP3)
MAPTKVTFGDDTVIEVQGYKSVNITFELDERIDKVLNEKCSAYTVELGTEVNEFACVVADAVIKTLQPVSELLTPLGIDLDEWSMATYYLFDESGEFKLASHMYCSFYPPDEDEEEGDCEEEEFEPSTQYEYGTEDDYQGKPLEFGATSAALQPEEEQEEDWLDDDSQQTVGQQDGSEDNQTTTIQTIVEVQPQLEMELTPVVQTIEVNSFSGYLKLTDNVYIKNADIVEEAKKVKPTVVVNAANVYLKHGGGVAGALNKATNNAMQVESDDYIATNGPLKVGGSCVLSGHNLAKHCLHVVGPNVNKGEDIQLLKSAYENFNQHEVLLAPLLSAGIFGADPIHSLRVCVDTVRTNVYLAVFDKNLYDKLVSSFLEMKSEKQVEQKIAEIPKEEVKPFITESKPSVEQRKQDDKKIKACVEEVTTTLEETKFLTENLLLYIDINGNLHPDSATLVSDIDITFLKKDAPYIVGDVVQEGVLTAVVIPTKKAGGTTEMLAKALRKVPTDNYITTYPGQGLNGYTVEEAKTVLKKCKSAFYILPSIISNEKQEILGTVSWNLREMLAHAEETRKLMPVCVETKAIVSTIQRKYKGIKIQEGVVDYGARFYFYTSKTTVASLINTLNDLNETLVTMPLGYVTHGLNLEEAARYMRSLKVPATVSVSSPDAVTAYNGYLTSSSKTPEEHFIEIISLAGSYKDWSYSGQSTQLGIEFLKRGDKSVYYTSNPTTFHLDGEVITFDNLKTLLSLREVRTIKVFTTVDNINLHTQVVDMSMTYGQQFGPTYLDGADVTKIKPHNSHEGKTFYVLPNDDTLRVEAFEYYHTTDPSFLGRYMSALNHTKKWKYPQVNGLTSIKWADNNCYLATALLTLQQIELKFNPPALQDAYYRARAGEAANFCALILAYCNKTVGELGDVRETMSYLFQHANLDSCKRVLNVVCKTCGQQQTTLKGVEAVMYMGTLSYEQFKKGVQIPCTCGKQATKYLVQQESPFVMMSAPPAQYELKHGTFTCASEYTGNYQCGHYKHITSKETLYCIDGALLTKSSEYKGPITDVFYKENSYTTTIKPVTYKLDGVVCTEIDPKLDNYYKKDNSYFTEQPIDLVPNQPYPNASFDNFKFVCDNIKFADDLNQLTGYKKPASRELKVTFFPDLNGDVVAIDYKHYTPSFKKGAKLLHKPIVWHVNNATNKATYKPNTWCIRCLWSTKPVETSNSFDVLKSEDAQGMDNLACEDLKPVSEEVVENPTIQKDVLECNVKTTEVVGDIILKPANNSLKITEEVGHTDLMAAYVDNSSLTIKKPNELSRVLGLKTLATHGLAAVNSVPWDTIANYAKPFLNKVVSTTTNIVTRCLNRVCTNYMPYFFTLLLQLCTFTRSTNSRIKASMPTTIAKNTVKSVGKFCLEASFNYLKSPNFSKLINIIIWFLLLSVCLGSLIYSTAALGVLMSNLGMPSYCTGYREGYLNSTNVTIATYCTGSIPCSVCLSGLDSLDTYPSLETIQITISSFKWDLTAFGLVAEWFLAYILFTRFFYVLGLAAIMQLFFSYFAVHFISNSWLMWLIINLVQMAPISAMVRMYIFFASFYYVWKSYVHVVDGCNSSTCMMCYKRNRATRVECTTIVNGVRRSFYVYANGGKGFCKLHNWNCVNCDTFCAGSTFISDEVARDLSLQFKRPINPTDQSSYIVDSVTVKNGSIHLYFDKAGQKTYERHSLSHFVNLDNLRANNTKGSLPINVIVFDGKSKCEESSAKSASVYYSQLMCQPILLLDQALVSDVGDSAEVAVKMFDAYVNTFSSTFNVPMEKLKTLVATAEAELAKNVSLDNVLSTFISAARQGFVDSDVETKDVVECLKLSHQSDIEVTGDSCNNYMLTYNKVENMTPRDLGACIDCSARHINAQVAKSHNIALIWNVKDFMSLSEQLRKQIRSAAKKNNLPFKLTCATTRQVVNVVTTKIALKGG

SEQ ID NO: 16212 - protein, 1946 aa, Artificial Sequence
  SARS-CoV-2__MT628273.1__non-structural protein 3 (NSP3)
MAPTKVTFGDDTVIEVQGYKSVNITFELDERIDKVLNEKCSAYTVELGTEVNEFACVVADAVIKTLQPVSELLTPLGIDLDEWSMATYYLFDESGEFKLASHMYCSFYPPDEDEEEGDCEEEEFEPSTQYEYGTEDDYQGKPLEFGATSAALQPEEEQEEDWLDDDSQQTVGQQDGSEDNQTTTIQTIVEVQPQLEMELTPVVQTIEVNSFSGYLKLTDNVYIKNADIVEEAKKVKPTVVVNAANVYLKHGGGVAGALNKATNNAMQVESDDYIATNGPLKVGGSCVLSGHNLAKHCLHVVGPNVNKGEDIQLLKSAYENFNQHEVLLAPLLSAGIFGADPIHSLRVCVDTVRTNVYLAVFDKNLYDKLVSSFLEMKSEKQVEQKIAEIPKEEVKPFITESKPSVEQRKQDDKKIKACVEEVTTTLEETKFLTENLLLYIDINGNLHPDSATLVSDIDITFLKKDAPYIVGDVVQEGVLTAVVIPTKKAGGTTEMLAKALRKVPTDNYITTYPGQGLNGYTVEEAKTVLKKCKSAFYILPSIISNEKQEILGTVSWNLREMLAHAEETRKLMPVCVETKAIVSTIQRKYKGIKIQEGVVDYGARFYFYTSKTTVASLINTLNDLNETLVTMPLGYVTHGLNLEEAARYMRSLKVPATVSVSSPDAVTAYNGYLTSSSKTPEEHFIETISLAGSYKDWSYSGQSTQLGIEFLKRGDKSVYYTSNPTTFHLDGEVITFDNLKTLLSLREVRTIKVFTTVDNINLHTQVVDMSMTYGQQFGPTYLDGADVTKIKPHNSHEGKTFYVLPNDDTLRVEAFEYYHTTDPSFLGRYMSALNHTKKWKYPQVNGLTSIKWADNNCYLATALLTLQQIELKFNPPALQDAYYRARAGEAANFCALILAYCNKTVGELGDVRETMSYLFQHANLDSCKRVLNVVCKTCGQQQTTLKGVEAVMYMGTLSYEQFKKGVQIPCTCGKQATKYLVQQESPFVMMSAPPAQYELKHGTFTCASEYTGNYQCGHYKHITSKETLYCIDGALLTKSSEYKGPITDVFYKENSYTTTIKPVTYKLDGVVCTEIDPKLDNYYKKDNSYFTEQPIDLVPNQPYPNASFDNFKFVCDNIKFADDLNQLTGYKKPASRELKVTFFPDLNGDVVAIDYKHYTPSFKKGAKLLHKPIVWHVNNATNKATYKPNTWCIRCLWSTKPVETSNSFDVLKSEDARGMDNLACEDLKPVSEEVVENPTIQKDVLECNVKTTEVVGDIILKPANNSLKITEEVGHTDLMAAYVDNSSLTIKKPNELSRVLGLKTLATHGLAAVNSVPWDTIANYAKPFLNKVVSTTTNIVTRCLNRVCTNYMPYFFTLLLQLCTFTRSTNSRIKASMPTTIAKNTVKSVGKFCLEASFNYLKSPNFSKLINIIIWFLLLSVCLGSLIYSTAALGVLMSNLGMPSYCTGYREGYLNSTNVTIATYCTGSIPCSVCLSGLDSLDTYPSLETIQITISSFKWDLTAFGLVAEWFLAYILFTRFFYVLGLAAIMQLFFSYFAVHFISNSWLMWLIINLVQMAPISAMVRMYIFFASFYYVWKSYVHVVDGCNSSTCMMCYKRNRATRVECTTIVNGVRRSFYVYANGGKGFCKLHNWNCVNCDTFCAGSTFISDEVARDLSLQFKRPINPTDQSSYIVDSVTVKNGSIHLYFDKAGQKTYERHSLSHFVNLDNLRANNTKGSLPINVIVFDGKSKCEESSAKSASVYYSQLMCQPILLLDQALVSDVGDSAEVAVKMFDAYVNTFSSTFNVPMEKLKTLVATAEAELAKNVSLDNVLSTFISAARQGFVDSDVETKDVVECLKLSHQSDIEVTGDSCNNYMLTYNKVENMTPRDLGACIDCSARHINAQVAKSHNIALIWNVKDFMSLSEQLRKQIRSAAKKNNLPFKLTCATTRQVVNVVTTKIALKGG

SEQ ID NO: 16213 - protein, 1946 aa, Artificial Sequence
  SARS-CoV-2__MT632495.1__non-structural protein 3 (NSP3)
MAPTKVTFGDDTVIEVQGYKSVNITFELDERIDKVLNEKCSAYTVELGTEVNEFACVVADAVIKTLQPVSELLTPLGIDLDEWSMATYYLFDESGEFKLASHMYCSFYPPDEDEEEGDCEEEEFEPSTQYEYGTEDDYQGKPLEFGATSAALQPEEEQEEDWLDDDSQQTVGQQDGSEDNQTTTIQTIVEVQPQLEMELTPVVQTIEVNSFSGYLKLTDNVYIKNADIVEEAKKVKPTVVVNAANVYLKHGGGVAGALNKATNNAMQVESDDYIATNGPLKVGGSCVLSGHNFAKHCLHVVGPNVNKGEDIQLLKSAYENFNQHEVLLAPLLSAGIFGADPIHSLRVCVDTVRTNVYLAVFDKNLYDKLVSSFLEMKSEKQVEQKIAEIPKEEVKPFITESKPSVEQRKQDDKKIKACVEEVTTTLEETKFLTENLLLYIDINGNLHPDSATLVSDIDITFLKKDAPYIVGDVVQEGVLTAVVIPTKKAGGTTEMLAKALRKVPTDNYITTYPGQGLNGYTVEEAKTVLKKCKSAFYILPSIISNEKQEILGTVSWNLREMLAHAEETRKLMPVCVETKAIVSTIQRKYKGIKIQEGVVDYGARFYFYTSKTTVASLINTLNDLNETLVTMPLGYVTHGLNLEEAARYMRSLKVPVTVSVSSPDAVTAYNGYLTSSSKTPEEHFIETISLAGSYKDWSYSGQSTQLGIEFLKRGDKSVYYTSNPTTFHLDGEVITFDNLKTLLSLREVRTIKVFTTVDNINLHTQVVDMSMTYGQQFGPTYLDGADVTKIKPHNSHEGKTFYVLPNDDTLRVEAFEYYHTTDPSFLGRYMSALNHTKKWKYPQVNGLTSIKWADNNCYLATALLTLQQIELKFNPPALQDAYYRARAGEAANFCALILAYCNKTVGELGDVRETMSYLFQHANLDSCKRVLNVVCKTCGQQQTTLKGVEAVMYMGTLSYEQFKKGVQIPCTCGKQATKYLVQQESPFVMMSAPPAQYELKHGTFTCASEYTGNYQCGHYKHITSKETLYCIDGALLTKSSEYKGPITDVFYKENSYTTTIKPVTYKLDGVVCTEIDPKLDNYYKKDNSYFTEQPIDLVPNQPYPNASFDNFKFVCDNIKFADDLNQLTGYKKPASRELKVTFFPDLNGDVVAIDYKHYTPSFKKGAKLLHKPIVWHVNNATNKATYKPNTWCIRCLWSTKPVETSNSFDVLKSEDAQGMDNLACEDLKPVSEEVVENPTIQKDVLECNVKTTEVVGDIILKPANNSLKITEEVGHTDLMAAYVDNSSLTIKKPNELSRVLGLKTLATHGLAAVNSVPWDTIANYAKPFLNKVVSTTTNIVTRCLNRVCTNYMPYFFTLLLQLCTFTRSTNSRIKASMPTTIAKNTVKSVGKFCLEASFNYLKSPNFSKLINIIIWFLLLSVCLGSLIYSTAALGVLMSNLGMPSYCTGYREGYLNSTNVTIATYCTGSIPCSVCLSGLDSLDTYPSLETIQITISSFKWDLTAFGLVAEWFLAYILFTRFFYVLGLAAIMQLFFSYFAVHFISNSWLMWLIINLVQMAPISAMVRMYIFFASFYYVWKSYVHVVDGCNSSTCMMCYKRNRATRVECTTIVNGVRRSFYVYANGGKGFCKLHNWNCVNCDTFCAGSTFISDEVARDLSLQFKRPINPTDQSSYIVDSVTVKNGSIHLYFDKAGQKTYERHSLSHFVNLDNLRANNTKGSLPINVIVFDGKSKCEESSAKSASVYYSQLMCQPILLLDQALVSDVGDSAEVAVKMFDAYVNTFSSTFNVPMEKLKTLVATAEAELAKNVSLDNVLSTFISAARQGFVDSDVETKDVVECLKLSHQSDIEVTGDSCNNYMLTYNKVENMTPRDLGACIDCSARHINAQVAKSHNIALIWNVKDFMSLSEQLRKQIRSAAKKNNLPFKLTCATTRQVVNVVTTKIALKGG

SEQ ID NO: 16214 - protein, 1946 aa, Artificial Sequence
  SARS-CoV-2__MT632503.1__non-structural protein 3 (NSP3)
MAPTKVTFGDDTVIEVQGYKSVNITFELDERIDKVLNEKCSAYTVELGTEVNEFACVVADAVIKTLQPVSELLTPLGIDLDEWSMATYYLFDESGEFKLASHMYCSFYPPDEDEEEGDCEEEEFEPSTQYEYGTEDDYQGKPLEFGATSAALQPEEEQEEDWLDDDSQQTVGQQDGSEDNQTTTIQTIVEVQPQLEMELTPVVQTIEVNSFSGYLKLTDNVYIKNADIVEEAKKVKPTVVVNAANVYLKHGGGVAGALNKATNNAMQVESDDYIATNGPLKVGGSCVLSGHNLAKHCLHVVGPNVNKGEDIQLLKSAYENFNQHEVLLAPLLSAGIFGADPIHSLRVCVDTVRTNVYLAVFDKNLYDKLVSSFLEMKSEKQVEQKIAEIPKEEVKPFITESKPSVEQRKQDDKKIKACVEEVTTTLEETKFLTENLLLYIDINGNLHPDSATLVSDIDITFLKKDAPYIVGDVVQEGVLTAVVIPTKKAGGTTEMLAKALRKVPTDNYITTYPGQGLNGYTVEEAKTVLKKCKSAFYILPSIISNEKQEILGTVSWNLREMLAHAEETRKLMPVCVETKAIVSTIQRKYKGIKIQEGVVDYGARFYFYTSKTTVASLINTLNDLNETLVTMPLGYVTHGLNLEEAARYMRSLKVPATVSVSSPDAVTAYNGYLTSSSKTPEEHFIETISLAGSYKDWSYSGQSTQLGIEFLKRGDKSVYYTSNPTTFHLDGEVITFDNLKTLLSLREVRTIKVFTTVDNINLHTQVVDMSMTYGQQFGPTYLDGADVTKIKPHNSHEGKTFYVLPNDDTLRVEAFEYYHTTDPSFLGRYMSALNHTKKWKYPQVNGLTSIKWADNNCYLATALLTLQQIELKFNPPALQDAYYRARAGEAANFCALILAYCNKTVGELGDVRETMSYLFQHANLDSCKRVLNVVCKTCGQQQTTLKGVEAVMYMGTLSYEQFKKGVQIPCTCGKQATKYLVQQESPFVMMSAPPAQYELKHGTFTCASEYTGNYQCGHYKHITSKETLYCIDGALLTKSSEYKGPITDVFYKENSYTTTIKPVTYKLDGVVCTEIDPKLDNYYKKDNSYFTEQPIDLVPNQPYPNASFDNFKFVCDNIKFADDLNQLTGYKKPASRELKVTFFPDLNGDVVAIDYKHYTPSFKKGAKLLHKPIVWHVNNATNKATYKPNTWCIRCLWSTKPVETSNSFDVLKSEDAQGMDNLACEDLKPVSEEVVENPTIQKDVLECNVKTTEVVGDIILKPANNSLKITEEVGHTDLMAAYVDNSSLTIKKPNELSRVLGLKTLATHGLAAVNSVPWDTIANYAKPFLNKVVSTTTNIVTRCLNRVCTNYMPYFFTLLLQLCTFTRSTNSRIKASMPTTIAKNTVKSVGKFCLEASFNYLKSPNFSKLINIIIWFLLLSVCLGSLIYSTAALGVLMSNLGMPSYCTGYREGYLNSTNVTIATYCTGSIPCSVCLSGLDSLDTYPSLETIQITISSFKWDLTAFGLVAEWFLAYILFTRFFYVLGLAAIMQLFFSYFAVHFISNSWLMWLIINLVQMAPISAMVRMYIFFASFYYVWKSYVHVVDGCNSSTCMMCYKRNRATRVECTTIVNGVRRSFYVYANGGKGFCKLHNWNCVNCDTFCAGSTFISDEVARDLSLQFKRPINPTDQSSYIVDSVTVKNGSIHLYFDKAGQKTYERHSLSHFVNLDNLRANNTKGSLPINVIVFDGKSKCEESSAKSASVYYSQLMCQPILLLDQALVSDVGDSAEVAVKMFDAYVNTFSSTFNVPMEKLKTLVATAEAELAKNVSLDNVLSIFISAARQGFVDSDVETKDVVECLKLSHQSDIEVTGDSCNNYMLTYNKVENMTPRDLGACIDCSARHINAQVAKSHNIALIWNVKDFMSLSEQLRKQIRSAAKKNNLPFKLTCATTRQVVNVVTTKIALKGG

SEQ ID NO: 16215 - protein, 1946 aa, Artificial Sequence
  SARS-CoV-2__MT632621.1__non-structural protein 3 (NSP3)
MAPTKVTFGDDTVIEVQGYKSVNITFELDERIDKVLNEKCSAYTVELGTEVNEFACVVADAVIKTLQPVSELLTPLGIDLDEWSMATYYLFDESGEFKLASHMYCSFYPPDEDEEEGDCEEEEFEPSTQYEYGTEDDYQGKPLEFGATSAALQPEEEQEEDWLDDDSQQTVGQQDGSEDNQTTTIQTIVEVQPQLEMELTPVVQTIEVNSFSGYLKLTDNVYIKNADIVEEAKKVKPTVVVNAANVYLKHGGGVAGALTKATNNAMQVESDDYIATNGPLKVGGSCVLSGHNLAKHCLHVVGPNVNKGEDIQLLKSAYENFNQHEVLLAPLLSAGIFGADPIHSLRVCVDTVRTNVYLAVFDKNLYDKLVSSFLEMKSEKQVEQKIAEIPKEEVKPFITESKPSVEQRKQDDKKIKACVEEVTTTLEETKFLTENLLLYIDINGNLHPDSATLVSDIDITFLKKDAPYIVGDVVQEGVLTAVVIPTKKAGGTTEMLAKALRKVPTDNYITTYPGQGLNGYTVEEAKTVLKKCKSAFYILPSIISNEKQEILGTVSWNLREMLAHAEETRKLMPVCVETKAIVSTIQRKYKGIKIQEGVVDYGARFYFYTSKTTVASLINTLNDLNETLVTMPLGYVTHGLNLEEAARYMRSLKVPATVSVSSPDAVTAYNGYLTSSSKTPEEHFIETISLAGSYKDWSYSGQSTQLGIEFLKRGDKSVYYTSNPTTFHLDGEVITFDNLKTLLSLREVRTIKVFTTVDNINLHTQVVDMSMTYGQQFGPTYLDGADVTKIKPHNSHEGKTFYVLPNDDTLRVEAFEYYHTTDPSFLGRYMSALNHTKKWKYPQVNGLTSIKWADNNCYLATALLTLQQIELKFNPPALQDAYYRARAGEAANFCALILAYCNKTVGELGDVRETMSYLFQHANLDSCKRVLNVVCKTCGQQQTTLKGVEAVMYMGTLSYEQFKKGVQIPCTCGKQATKYLVQQESPFVMMSAPPAQYELKHGTFTCASEYTGNYQCGHYKHITSKETLYCIDGALLTKSSEYKGPITDVFYKENSYTTTIKPVTYKLDGVVCTEIDPKLDNYYKKDNSYFTEQPIDLVPNQPYPNASFDNFKFVCDNIKFADDLNQLTGYKKPASRELKVTFFPDLNGDVVAIDYKHYTPSFKKGAKLLHKPIVWHVNNATNKATYKPNTWCIRCLWSTKPVETSNSFDVLKSEDAQGMDNLACEDLKPVSEEVVENPTIQKDVLECNVKTTEVVGDIILKPANNSLKITEEVGHTDLMAAYVDNSSLTIKKPNELSRVLGLKTLATHGLAAVNSVPWDTIANYAKPFLNKVVSTTTNIVTRCLNRVCTNYMPYFFTLLLQLCTFTRSTNSRIKASMPTTIAKNTVKSVGKFCLEASFNYLKSPNFSKLINIIIWFLLLSVCLGSLIYSTAALGVLMSNLGMPSYCTGYREGYLNSTNVTIATYCTGSIPCSVCLSGLDSLDTYPSLETIQITISSFKWDLTAFGLVAEWFLAYILFTRFFYVLGLAAIMQLFFSYFAVHFISNSWLMWLIINLVQMAPISAMVRMYIFFASFYYVWKSYVHVVDGCNSSTCMMCYKRNRATRVECTTIVNGVRRSFYVYANGGKGFCKLHNWNCVNCDTFCAGSTFISDEVARDLSLQFKRPINPTDQSSYIVDSVTVKNGSIHLYFDKAGQKTYERHSLSHFVNLDNLRANNTKGSLPINVIVFDGKSKCEESSAKSASVYYSQLMCQPILLLDQALVSDVGDSAEVAVKMFDAYVNTFSSTFNVPMEKLKTLVATAEAELAKNVSLDNVLSTFISAARQGFVDSDVETKDVVECLKLSHQSDIEVTGDSCNNYMLTYNKVENMTPRDLGACIDCSARHINAQVAKSHNIALIWNVKDFMSLSEQLRKQIRSAAKKNNLPFKLTCATTRQVVNVVTTKIALKGG

SEQ ID NO: 16216 - protein, 1946 aa, Artificial Sequence
  SARS-CoV-2__MT632626.1__non-structural protein 3 (NSP3)
MAPTKVTFGDDTVIEVQGYKSVNITFELDERIDKVLNEKCSAYTVELGTEVNEFACVVADAVIKTLQPVSELLTPLGIDLDEWSMATYYLFDESGEFKLASHMYCSFYPPDEDEEEGDCEEEEFEPSTQYEYGTEDDYQGKPLEFGATSAALQPEEEQEEDWLDDDSQQTVGQQDGSEDNQTTTIQTIVEVQPQLEMELTPVVQTIEVNSFSGYLKLTDNVYIKNADIVEEAKKVKPTVVVNAANVYLKHGGGVAGALNKATNNAMQVESDDYIATNGPLKVGGSCVLSGHNLAKHCLHVVGPNVNKGEDIQLLKSAYENFNQHEVLLAPLLSAGIFGADPIHSLRVCVDTVRTNVYLAVFDKNLYDKLVSSFLEMKSEKQVEQKIAEIPKEEVKPFITESKPSVEQRKQDDKKIKACVEEVTTTLEETKFLTENLLLYIDINGNLHPDSATLVSDIDVTFLKKDAPYIVGDVVQEGVLTAVVIPTKKAGGTTEMLAKALRKVPTDNYITTYPGQGLNGYTVEEAKTVLKKCKSAFYILPSIISNEKQEILGTVSWNLREMLAHAEETRKLMPVCVETKAIVSTIQRKYKGIKIQEGVVDYGARFYFYTSKTTVASLINTLNDLNETLVTMPLGYVTHGLNLEEAARYMRSLKVPATVSVSSPDAVTAYNGYLTSSSKTPEEHFIETISLAGSYKDWSYSGQSTQLGIEFLKRGDKSVYYTSNPTTFHLDGEVITFDNLKTLLSLREVRTIKVFTTVDNINLHTQVVDMSMTYGQQFGPTYLDGADVTKIKPHNSHEGKTFYVLPNDDTLRVEAFEYYHTTDPSFLGRYMSALNHTKKWKYPQVNGLTSIKWADNNCYLATALLTLQQIELKFNPPALQDAYYRARAGEAANFCALILAYCNKTVGELGDVRETMSYLFQHANLDSCKRVLNVVCKTCGQQQTTLKGVEAVMYMGTLSYEQFKKGVQIPCTCGKQATKYLVQQESPFVMMSAPPAQYELKHGTFTCASEYTGNYQCGHYKHITSKETLYCIDGALLTKSSEYKGPITDVFYKENSYTTTIKPVTYKLDGVVCTEIDPKLDNYYKKDNSYFTEQPIDLVPNQPYPNASFDNFKFVCDNIKFADDLNQLTGYKKPASRELKVTFFPDLNGDVVAIDYKHYTPSFKKGAKLLHKPIVWHVNNATNKATYKPNTWCIRCLWSTKPVETSNSFDVLKSEDAQGMDNLACEDLKPVSEEVVENPTIQKDVLECNVKTTEVVGDIILKPANNSLKITEEVGHTDLMAAYVDNSSLTIKKPNELSRVLGLKTLATHGLAAVNSVPWDTIANYAKPFLNKVVSTTTNIVTRCLNRVCTNYMPYFFTLLLQLCTFTRSTNSRIKASMPTTIAKNTVKSVGKFCLEASFNYLKSPNFSKLINIIIWFLLLSVCLGSLIYSTAALGVLMSNLGMPSYCTGYREGYLNSTNVTIATYCTGSIPCSVCLSGLDSLDTYPSLETIQITISSFKWDLTAFGLVAEWFLAYILFTRFFYVLGLAAIMQLFFSYFAVHFISNSWLMWLIINLVQMAPISAMVRMYIFFASFYYVWKSYVHVVDGCNSSTCMMCYKRNRATRVECTTIVNGVRRSFYVYANGGKGFCKLHNWNCVNCDTFCAGSTFISDEVARDLSLQFKRPINPTDQSSYIVDSVTVKNGSIHLYFDKAGQKTYERHSLSHFVNLDNLRANNTKGSLPINVIVFDGKSKCEESSAKSASVYYSQLMCQPILLLDQALVSDVGDSAEVAVKMFDAYVNTFSSTFNVPMEKLKTLVATAEAELAKNVSLDNVLSTFISAARQGFVDSDVETKDVVECLKLSHQSDIEVTGDSCNNYMLTYNKVENMTPRDLGACIDCSARHINAQVAKSHNIALIWNVKDFMSLSEQLRKQIRSAAKKNNLPFKLTCATTRQVVNVVTTKIALKGG

SEQ ID NO: 16217 - protein, 1946 aa, Artificial Sequence
  SARS-CoV-2__MT632766.1__non-structural protein 3 (NSP3)
MAPTKVTFGDDTVIEVQGYKSVNITFELDERIDKVLNEKCSAYTVELGTEVNEFACVVADAVIKTLQPVSELLTPLGIDLDEWSMATYYLFDESGEFKLASHMYCSFYPPDEDEEEGDCEEEEFEPSTQYEYGTEDDYQGKPLEFGATSAALQPEEEQEEDWLDDDSQQTVGQQDGSEDNQTTTIQTIVEVQPQLEMELTPVVQTIEVNSFSGYLKLTDNVYIKNADIVEEAKKVKPTVVVNAANVYLKHGGGVAGALNKATNNAMQVESDDYIATNGPLKVGGSCVLSGHNLAKHCLHVVGPNVNKGEDIQLLKSAYENFNQHEVLLAPLLSAGIFGADPIHSLRVCVDTVRTNVYLAVFDKNLYDKLVSSFLEMKSEKQVEQKIAEIPKEEVKPFITESKPSVEQRKQDDKKIKACVEEVTTTLEETKFLTENLLLYIDINGNLHPDSATLVSDIDITFLKKDAPYIVGDVVQEGVLTAVVIPTKKAGGTTEMLAKALRKVPTDNYITTYPGQGLNGYTVEEAKTVLKKCKSAFYILPSIISNEKQEILGTVSWNLREMLAHAEETRKLMPVCVETKAIVSTIQRKYKGIKIQEGVVDYGARFYFYTSKTTVASLINTLNDLNETLVTMPLGYVTHGLNLEEAARYMRSLKVPATVSVSSPDAVTAYNGYLTSSSKTPEEHFIETISLAGSYKDWSYSGQSTQLGIEFLKRGDKSVYYTSNPTTFHLDGEVITFDNLKTLLSLREVRTIKVFTTVDNINLHTQVVDMSMTYGQQFGPTYLDGADVTKIKPHNSHEGKTFYVLPNDDTLRVEAFEYYHTTDPSFLGRYMSALNHTKKWKYPQVNGLTSIKWADNNCYLATVLLTLQQIELKFNPPALQDAYYRARAGEAANFCALILAYCNKTVGELGDVRETMSYLFQHANLDSCKRVLNVVCKTCGQQQTTLKGVEAVMYMGTLSYEQFKKGVQIPCTCGKQATKYLVQQESPFVMMSAPPAQYELKHGTFTCASEYTGNYQCGHYKHITSKETLYCIDGALLTKSSEYKGPITDVFYKENSYTTTIKPVTYKLDGVVCTEIDPKLDNYYKKDNSYFTEQPIDLVPNQPYPNASFDNFKFVCDNIKFADDLNQLTGYKKPASRELKVTFFPDLNGDVVAIDYKHYTPSFKKGAKLLHKPIVWHVNNATNKATYKPNTWCIRCLWSTKPVETSNSFDVLKSEDAQGMDNLACEDLKPVSEEVVENPTIQKDVLECNVKTTEVVGDIILKPANNSLKITEEVGHTDLMAAYVDNSSLTIKKPNELSRVLGLKTLATHGLAAVNSVPWDTIANYARPFLNKVVSTTTNIVTRCLNRVCTNYMPYFFTLLLQLCTFTRSTNSRIKASMPTTIAKNTVKSVGKFCLEASFNYLKSPNFSKLINIIIWFLLLSVCLGSLIYSTAALGVLMSNLGMPSYCTGYREGYLNSTNVTIATYCTGSIPCSVCLSGLDSLDTYPSLETIQITISSFKWDLTAFGLVAEWFLAYILFTRFFYVLGLAAIMQLFFSYFAVHFISNSWLMWLIINLVQMAPISAMVRMYIFFASFYYVWKSYVHVVDGCNSSTCMMCYKRNRATRVECTTIVNGVRRSFYVYANGGKGFCKLHNWNCVNCDTFCAGSTFISDEVARDLSLQFKRPINPTDQSSYIVDSVTVKNGSIHLYFDKAGQKTYERHSLSHFVNLDNLRANNTKGSLPINVIVFDGKSKCEESSAKSASVYYSQLMCQPILLLDQALVSDVGDSAEVAVKMFDAYVNTFSSTFNVPMEKLKTLVATAEAELAKNVSLDNVLSTFISAARQGFVDSDVETKDVVECLKLSHQSDIEVTGDSCNNYMLTYNKVENMTPRDLGACIDCSARHINAQVAKSHNIALIWNVKDFMSLSEQLRKQIRSAAKKNNLPFKLTCATTRQVVNVVTTKIALKGG

SEQ ID NO: 16218 - protein, 1946 aa, Artificial Sequence
  SARS-CoV-2__MT632776.1__non-structural protein 3 (NSP3)
MAPTKVTFGDDTVIEVQGYKSVNITFELDERIDKVLNEKCSAYTVELGTEVNEFACVVADAVIKTLQPVSELLTPLGIDLDEWSMATYYLFDESGEFKLASHMYCSFYPPDEDEEEGDCEEEEFEPSTQYEYGTEDDYQGKPLEFGATSAALQLEEEQEEDWLDDDSQQTVGQQDGSEDNQTTTIQTIVEVQPQLEMELTPVVQTIEVNSFSGYLKLTDNVYIKNADVVEEAKKVKPTVVVNAANVYLKHGGGVAGALNKATNNAMQVESDDYIATNGPLKVGGSCVLSGHNLAKHCLHVVGPNVNKGEDIQLLKSAYENFNQHEVLLAPLLSAGIFGADPIHSLRVCVDTVRTNVYLAVFDKNLYDKLVSSFLEMKSEKQVEQKIAEIPKEEVKPFITESKPSVEQRKQDDKKIKACVEEVTTTLEETKFLTENLLLYIDINGNLHPDSATLVSDIDITFLKKDAPYIVGDVVQEGVLTAVVIPTKKAGGTTEMLAKALRKVPTDNYITTYPGQGLNGYTVEEAKTVLKKCKSAFYILPSIISNEKQEILGTVSWNLREMLAHAEETRKLMPVCVETKAIVSTIQRKYKGIKIQEGVVDYGARFYFYTSKTTVASLINTLNDLNETLVTMPLGYVTHGLNLEEAARYMRSLKVPATVSVSSPDAVTAYNGYLTSSSKTPEEHFIETISLAGSYKDWSYSGQSTQLGIEFLKRGDKSVYYTSNPTTFHLDGEVITFDNLKTLLSLREVRTIKVFTTVDNINLHTQVVDMSMTYGQQFGPTYLDGADVTKIKPHNSHEGKTFYVLPNDDTLRVEAFEYYHTTDPSFLGRYMSALNHTKKWKYPQVNGLTSIKWADNNCYLATALLTLQQIELKFNPPALQDAYYRARAGEAANFCALILAYCNKTVGELGDVRETMSYLFQHANLDSCKRVLNVVCKTCGQQQTTLKGVEAVMYMGTLSYEQFKKGVQIPCTCGKQATKYLVQQESPFVMMSAPPAQYELKHGTFTCASEYTGNYQCGHYKHITSKETLYCIDGALLTKSSEYKGPITDVFYKENSYTTTIKPVTYKLDGVVCTEIDPKLDNYYKKDNSYFTEQPIDLVPNQPYPNASFDNFKFVCDNIKFADDLNQLTGYKKPASRELKVTFFPDLNGDVVAIDYKHYTPSFKKGAKLLHKPIVWHVNNATNKATYKPNTWCIRCLWSTKPVETSNSFDVLKSEDAQGMDNLACEDLKPVSEEVVENPTIQKDVLECNVKTTEVVGDIILKPANNSLKITEEVGHTDLMAAYVDNSSLTIKKPNELSRVLGLKTLATHGLAAVNSVPWDTIANYAKPFLNKVVSTTTNIVTRCLNRVCTNYMPYFFTLLLQLCTFTRSTNSRIKASMPTTIAKNTVKSVGKFCLEASFNYLKSPNFSKLINIIIWFLLLSVCLGSLIYSTAALGVLMSNLGMPSYCTGYREGYLNSTNVTIATYCTGSIPCSVCLSGLDSLDTYPSLETIQITISSFKWDLTAFGLVAEWFLAYILFTRFFYVLGLAAIMQLFFSYFAVHFISNSWLMWLIINLVQMAPISAMVRMYIFFASFYYVWKSYVHVVDGCNSSTCMMCYKRNRATRVECTTIVNGVRRSFYVYANGGKGFCKLHNWNCVNCDTFCAGSTFISDEVARDLSLQFKRPINPTDQSSYIVDSVTVKNGSIHLYFDKAGQKTYERHSLSHFVNLDNLRANNTKGSLPINVIVFDGKSKCEESSAKSASVYYSQLMCQPILLLDQALVSDVGDSAEVAVKMFDAYVNTFSSTFNVPMEKLKTLVATAEAELAKNVSLDNVLSTFISAARQGFVDSDVETKDVVECLKLSHQSDIEVTGDSCNNYMLTYNKVENMTPRDLGACIDCSARHINAQVAKSHNIALIWNVKDFMSLSEQLRKQIRSAAKKNNLPFKLTCATTRQVVNVVTTKIALKGG

SEQ ID NO: 16219 - protein, 1946 aa, Artificial Sequence
  SARS-CoV-2__MT632780.1__non-structural protein 3 (NSP3)
MAPTKVTFGDDTVIEVQGYKSVNITFELDERIDKVLNEKCSAYTVELGTEVNEFACVVADAVIKTLQPVSELLTPLGIDLDEWSMATYYLFDESGEFKLASHMYCSFYPPDEDEEEGDCEEEEFEPSTQYEYGTEDDYQGKPLEFGATSAALQPEEEQEEDWLDDDSQQTVGQQDGSEDNQTTTIQTIVEVQPQLEMELTPVVQTIEVNSFSGYLKLTDNVYIKNADIVEEAKKVKPTVVVNAANVYLKHGGGVAGALNKATNNAMQVESDDYIATNGPLKVGGSCVLSGHNLAKHCLHVVGPNVNKGEDIQLLKSAYENFNQHEVLLAPLLSAGIFGADPIHSLRVCVDTVRTNVYLAVFDKNLYDKLVSSFLEMKSEKQVEQKIAEIPKEEVKPFITESKPSVEQRKQDDKKIKACVEEVTTTLEETKFLTENLLLYIDINGNLHPDSATLVSDIDITFLKKDAPYIVGDVVQEGVLTAVVIPTKKAGGTTEMLAKALRKVPTDNYITTYPGQGLNGYTVEEAKTVLKKCKSAFYILPSIISNEKQEILGTVSWNLREMLAHAEETRKLMPVCVETKAIVSTIQRKYKGIKIQEGVVDYGARFYFYTSKTTVASLINTLNDLNETLVTMPLGYVTHGLNLEEAARYMRSLKVPATVSVSSPDAVTAYNGYLTSSSKTPEEHFIETISLAGSYKDWSYSGQSTQLGIEFLKRGDKSVYYTSNPTTFHLDGEVITFDNLKTLLSLREVRTIKVFTTVDNINLHTQVVDMSMTYGQQFGPTYLDGADVTKIKPHNSHEGKTFYVLPNDDTLRVEAFEYYHTTDPSFLGRYMSALNHTKKWKYPQVNGLTSIKWADNNCYLATALLTLQQIELKFNPPALQDAYYRARAGEAANFCALILAYCNKTVGELGDVRETMSYLFQHANLDSCKRVLNVVCKTCGQQQTTLKGVEAVMYMGTLSYEQFKKGVQIPCTCGKQATKYLVQQESPFVMMSAPPAQYELKHGTFTCASEYTGNYQCGHYKHITSKETLYCIDGALLTKSSEYKGPITDVFYKENSYTTTIKPVTYKLDGVVCTEIDPKLDNYYKKDNSYFTEQPIDLVPNQPYPNASFDNFKFVCDNIKFADDLNQLTGYKKPASRELKVTFFPDLNGDVVAIDYKHYTPSFKKGAKLLHKPIVWHVNNATNKATYKPNTWCIRCLWSTKPVETSNSFDVLKSEDAQGMDNLACEDLKPVSEEVVENPTIQKDVLECNVKTTEVVGDIILKPANNSLKITEEVGHTDLMAAYVDNSSLTIKKPNELSRVLGLKTLATHGLAAVNSVPWDTIANYAKPFLNKVVSTTTNIVTRCLNRVCTNYMPYFFTLLLQLCTFTRSTNSRIKASMPTTIAKNTVKSVGKFCLEASFNYLKSPNFSKLINIIIWFLLLSVCLGSLIYSTAALGVLMSNLGMPSYCTGYREGYLNSTNVTIATYCTGSIPCSVCLSGLDSLDTYPSLETIQITISSFKWDLTAFGLVAEWFLAYILFTRFFYVLGLAAIMQLFFSYFAVHFISNSWLMWLIINLVQMAPISAMVRMYIFFASFYYVWKSYVHVVDGCNSSTCMMCYKRNRATRVECTTIVNGVRKSFYVYANGGKGFCKLHNWNCVNCDTFCAGSTFISDEVARDLSLQFKRPINPTDQSSYIVDSVTVKNGSIHLYFDKAGQKTYERHSLSHFVNLDNLRANNTKGSLPINVIVFDGKSKCEESSAKSASVYYSQLMCQPILLLDQALVSDVGDSAEVAVKMFDAYVNTFSSTFNVPMEKLKTLVATAEAELAKNVSLDNVLSTFISAARQGFVDSDVETKDVVECLKLSHQSDIEVTGDSCNNYMLTYNKVENMTPRDLGACIDCSARHINAQVAKSHNIALIWNVKDFMSLSEQLRKQIRSAAKKNNLPFKLTCATTRQVVNVVTTKIALKGG

SEQ ID NO: 16220 - protein, 1946 aa, Artificial Sequence
  SARS-CoV-2__MT632793.1__non-structural protein 3 (NSP3)
MAPTKVTFGDDTVIEVQGYKSVNITFELDERIDKVLNEKCSAYTVELGTEVNEFACVVADAVIKTLQPVSELLTPLGIDLDEWSMATYYLFDESGEFKLASHMYCSFYPPDEDEEEGDCEEEEFEPSTQYEYGTEDDYQGKPLEFGATSAALQPEEEQEEDWLDDDSQQTVGQQDGSEDNQTTTIQTIVEVQPQLEMELTPVVQTIEVNSFSGYLKLTDNVYIKNADIVEEAKKVKPTVVVNAANVYLKHGGGVAGALNKATNNAMQVESDDYIATNGPLKVGGSCVLSGHNLAKHCLHVVGPNVNKGEDIQLLKSAYENFNQHEVLLAPLLSAGIFGADPIHSLRVCVDTVRTNVYLAVFDKNLYDKLVSSFLEMKSEKQVEQKIAEIPKEEVKPFITESKPSVEQRKQDDKKIKACVEEVTTTLEETKFLTENLLLYIDINGNLHPDSATLVSDIDITFLKKDAPYIVGDVVQEGVLTAVVIPTKKAGGTTEMLAKALRKVPTDNYITTYPGQGLNGYTVEEAKTVLKKCKSAFYILPSIISNEKQEILGTVSWNLREMLAHAEETRKLMPVCVETKAIVSTIQRKYKGIKIQEGVVDYGARFYFYTSKTTVASLINTLNDLNETLVTMPLGYVTHGLNLEEAARYMRSLKVPATVSVSSPDAVTAYNGYLTSSSKTPEEHFIETISLAGSYKDWSYSGQSTQLGIEFLKRGDKSVYYTSNPTTFHLDGEVITFDNLKTLLSLREVRTIKVFTTVDNINLHTQVVDMSMTYGQQFGPTYLDGADVTKIKPHNSHEGKTFYVLPNDDTLRVEAFEYYHTTDPSFLGRYMSALNHTKKWKYPQVNGLTSIKWADNNCYLATALLTLQQIELKFNPPALQDAYYRARAGEAANFCALILAYCNKTVGELGDVRETMSYLFQHANLDSCKRVLNVVCKTCGQQQTTLKGVEAVMYMGTLSYEQFKKGVQIPCTCGKQATKYLVQQESPFVMMSAPPAQYELKHGTFTCASEYTGNYQCGHYKHIISKETLYCIDGALLTKSSEYKGPITDVFYKENSYTTTIKPVTYKLDGVVCTEIDPKLDNYYKKDNSYFTEQPIDLVPNQPYPNASFDNFKFVCDNIKFADDLNQLTGYKKPASRELKVTFFPDLNGDVVAIDYKHYTPSFKKGAKLLHKPIVWHVNNATNKATYKPNTWCIRCLWSTKPVETSNSFDVLKSEDAQGMDNLACEDLKPVSEEVVENPTIQKDVLECNVKTTEVVGDIILKPANNSLKITEEVGHTDLMAAYVDNSSLTIKKPNELSRVLGLKTLATHGLAAVNSVPWDTIANYAKPFLNKVVSTTTNIVTRCLNRVCTNYMPYFFTLLLQLCTFTRSTNSRIKASMPTTIAKNTVKSVGKFCLEASFNYLKSPNFSKLINIIIWFLLLSVCLGSLIYSTAALGVLMSNLGMPSYCTGYREGYLNSTNVTIATYCTGSIPCSVCLSGLDSLDTYPSLETIQITISSFKWDLTAFGLVAEWFLAYILFTRFFYVLGLAAIMQLFFSYFAVHFISNSWLMWLIINLVQMAPISAMVRMYIFFASFYYVWKSYVHVVDGCNSSTCMMCYKRNRATRVECTTIVNGVRRSFYVYANGGKGFCKLHNWNCVNCDTFCAGSTFISDEVARDLSLQFKRPINPTDQSSYIVDSVTVKNGSIHLYFDKAGQKTYERHSLSHFVNLDNLRANNTKGSLPINVIVFDGKSKCEESSAKSASVYYSQLMCQPILLLDQALVSDVGDSAEVAVKMFDAYVNTFSSTFDVPMEKLKTLVATAEAELAKNVSLDNVLSTFISAARQGFVDSDVETKDVVECLKLSHQSDIEVTGDSCNNYMLTYNKVENMTPRDLGACIDCSARHINAQVAKSHNIALIWNVKDFMSLSEQLRKQIRSAAKKNNLPFKLTCATTRQVVNVVTTKIALKGG

SEQ ID NO: 16221 - protein, 1946 aa, Artificial Sequence
  SARS-CoV-2__MT632820.1__non-structural protein 3 (NSP3)
MAPTKVTFGDDTVIEVQGYKSVNITFELDERIDKVLNEKCSAYTVELGTEVNEFACVVADAVIKTLQPVSELLTPLGIDLDEWSMATYYLFDESGEFKLASHMYCSFYPPDEDEEEGDCEEEEFEPSTQYEYGTEDDYQGKPLEFGATSAALQPEEEQEEDWLDDDSQQTVGQQDGSEDNQTTTIQTIVEVQPQLEMELTPVVQTIEVNSFSGYLKLTDNVYIKNADIVEEAKKVKPTVVVNAANVYLKHGGGVAGALNKATNNAMQVESDDYIATNGPLKVGGSCVLSGHNLAKHCLHVVGPNVNKGEDIQLLKSAYENFNQHEVLLAPLLSAGIFGADPIHSLRVCVDTVRTNVYLAVFDKNLYDKLVSSFLEMKSEKQVEQKIAEIPKEEVKPFITESKPSVEQRKQDDKKIKACVEEVTTTLEETKFLTENLLLYIDINGNLHPDSATLVSDIDITFLKKDAPYIVGDVVQEGVLTAVVIPTKKAGGTTEMLAKALRKVPTDNYITTYPGQGLNGYTVEEAKTVLKKCKSAFYILPSIISNEKQEILGTVSWNLREMLAHAEETRKLMPVCVETKAIVSTIQRKYKGIKIQEGVVDYGARFYFYTSKTTVASLINTLNDLNETLVTMPLGYVTHGLNLEEAARYMRSLKVPATVSVSSPDAVTAYNGYLTSSSKTPEEHFIETISLAGSYKDWSYSGQSTQLGIEFLKRGDKSVYYTSNPTTFHLDGEVITFDNLKTLLSLREVRTIKVFTTVDNINLHTQVVDMSMTYGQQFGPTYLDGADVTKIKPHNSHEGKTFYVLPNDDTLRVEAFEYYHTTDPSFLGRYMSALNHTKKWKYPQVNGLTSIKWADNNCYLATALLTLQQIELKFNPPALQDAYYRARAGEAANFCALILAYCNKTVGELGDVRETMSYLFQHANLDSCKRVLNVVCKTCGQQQTTLKGVEAVMYMGTLSYEQFKKGVQIPCTCGKQATKYLVQQESPFVMMSAPPAQYELKHGTFTCASEYTGNYQCGHYKHITSKETLYCIDGALLTKSSEYKGPITDVFYKENSYTTTIKPVTYKLDGVVCTEIDPKLDNYYKKDNSYFTEQPIDLVPNQPYPNASFDNFKFVCDNIKFADDLNQLTGYKKPASRELKVTFFPDLNGDVVAIDYKHYTPSFKKGAKLLHKPIVWHVNNATNKATYKPNTWCIRCLWSTKPVETSNSFDVLKSEDAQGMDNLACEDLKPVSEEVVENPTIQKDVLECNVKTTEVVGDIILKPANNSLKITEKVGHTDLMAAYVDNSSLTIKKPNELSRVLGLKTLATHGLAAVNSVPWDTIANYAKPFLNKVVSTTTNIVTRCLNRVCTNYMPYFFTLLLQLCTFTRSTNSRIKASMPTTIAKNTVKSVGKFCLEASFNYLKSPNFSKLINIIIWFLLLSVCLGSLIYSTAALGVLMSNLGMPSYCTGYREGYLNSTNVTIATYCTGSIPCSVCLSGLDSLDTYPSLETIQITISSFKWDLTAFGLVAEWFLAYILFTRFFYVLGLAAIMQLFFSYFAVHFISNSWLMWLIINLVQMAPISAMVRMYIFFASFYYVWKSYVHVVDGCNSSTCMMCYKRNRATRVECTTIVNGVRRSFYVYANGGKGFCKLHNWNCVNCDTFCAGSTFISDEVARDLSLQFKRPINPTDQSSYIVDSVTVKNGSIHLYFDKAGQKTYERHSLSHFVNLDNLRANNTKGSLPINVIVFDGKSKCEESSAKSASVYYSQLMCQPILLLDQALVSDVGDSAEVAVKMFDAYVNTFSSTFNVPMEKLKTLVATAEAELAKNVSLDNVLSTFISAARQGFVDSDVETKDVVECLKLSHQSDIEVTGDSCNNYMLTYNKVENMTPRDLGACIDCSARHINAQVAKSHNIALIWNVKDFMSLSEQLRKQIRSAAKKNNLPFKLTCATTRQVVNVVTTKIALKGG

SEQ ID NO: 16222 - protein, 1946 aa, Artificial Sequence
  SARS-CoV-2__MT632822.1__non-structural protein 3 (NSP3)
MAPTKVTFGDDTVIEVQGYKSVNITFELDERIDKVLNEKCSAYTVELGTEVNEFACVVADAVIKTLQPVSELLTPLGIDLDEWSMATYYLFDESGEFKLASHMYCSFYPPDEDEEEGDCEEEEFEPSTQYEYGTEDDYQGKPLEFGATSAALQPEEEQEEDWLDDDSQQTVGQQDGSEDNQTTTIQTIVEVQPQLEMELTPVVQTIEVNSFSGYLKLTDNVYIKNADIVEEAKKVKPTVVVNAANVYLKHGGGVAGALNKATNNAMQVESDDYIATNGPLKVGGSCVLSGHNLAKHCLHVVGPNVNKGEDIQLLKSAYENFNQHEVLLAPLLSAGIFGADPIHSLRVCVDTVRTNVYLAVFDKNLYDKLVSSFLEMKSEKQVEQKIAEIPKEEVKPFITESKPSVEQRKQDDKKIKACVEEVTTTLEETKFLTENLLLYIDINGNLHPDSATLVSDIDITFLKKDAPYIVGDVVQEGVLTAVVIPTKKAGGTTEMLAKALRKVPTDNYITTYPGQGLNGYTVEEAKTVLKKCKSAFYILPSIISNEKQEILGTVSWNLREMLAHAEETRKLMPVCVETKAIVSTIQRKYKGIKIQEGVVDYGARFYFYTSKTTVASLINTLNDLNETLVTMPLGYVTHGLNLEEAARYMRSLKVPATVSVSSPDAVTAYNGYLTSSSKTPEEHFIETISLASSYKDWSYSGQSTQLGIEFLKRGDKSVYYTSNPTTFHLDGEVITFDNLKTLLSLREVRTIKVFTTVDNINLHTQVVDMSMTYGQQFGPTYLDGADVTKIKPHNSHEGKTFYVLPNDDTLRVEAFEYYHTTDPSFLGRYMSALNHTKKWKYPQVNGLTSIKWADNNCYLATALLTLQQIELKFNPPALQDAYYRARAGEAANFCALILAYCNKTVGELGDVRETMSYLFQHANLDSCKRVLNVVCKTCGQQQTTLKGVEAVMYMGTLSYEQFKKGVQIPCTCGKQATKYLVQQESPFVMMSAPPAQYELKHGTFTCASEYTGNYQCGHYKHITSKETLYCIDGALLTKSSEYKGPITDVFYKENSYTTTIKPVTYKLDGVVCTEIDPKLDNYYKKDNSYFTEQPIDLVPNQPYPNASFDNFKFVCDNIKFADDLNQLTGYKKPASRELKVTFFPDLNGDVVAIDYKHYTPSFKKGAKLLHKPIVWHVNNATNKATYKPNTWCIRCLWSTKPVETSNSFDVLKSEDAQGMDNLACEDLKPVSEEVVENPTIQKDVLECNVKTTEVVGDIILKPANNSLKITEEVGHTDLMAAYVDNSSLTIKKPNELSRVLGLKTLATHGLAAVNSVPWDTIANYAKPFLNKVVSTTTNIVTRCLNRVCTNYMPYFFTLLLQLCTFTRSTNSRIKASMPTTIAKNTVKSVGKFCLEASFNYLKSPNFSKLINIIIWFLLLSVCLGSLIYSTAALGVLMSNLGMPSYCTGYREGYLNSTNVTIATYCTGSIPCSVCLSGLDSLDTYPSLETIQITISSFKWDLTAFGLVAEWFLAYILFTRFFYVLGLAAIMQLFFSYFAVHFISNSWLMWLIINLVQMAPISAMVRMYIFFASFYYVWKSYVHVVDGCNSSTCMMCYKRNRATRVECTTIVNGVRRSFYVYANGGKGFCKLHNWNCVNCDTFCAGSTFISDEVARDLSLQFKRPINPTDQSSYIVDSVTVKNGSIHLYFDKAGQKTYERHSLSHFVNLDNLRANNTKGSLPINVIVFDGKSKCEESSAKSASVYYSQLMCQPILLLDQALVSDVGDSAEVAVKMFDAYVNTFSSTFNVPMEKLKTLVATAEAELAKNVSLDNVLSTFISAARQGFVDSDVETKDVVECLKLSHQSDIEVTGDSCNNYMLTYNKVENMTPRDLGACIDCSARHINAQVAKSHNIALIWNVKDFMSLSEQLRKQIRSAAKKNNLPFKLTCATTRQVVNVVTTKIALKGG

SEQ ID NO: 16223 - protein, 1946 aa, Artificial Sequence
  SARS-CoV-2__MT632834.1__non-structural protein 3 (NSP3)
MAPTKVTFGDDTVIEVQGYKSVNITFELDERIDKVLNEKCSAYTVELGTEVNEFACVVADAVIKTLQPVSELLTPLGIDLDEWSMATYYLFDESGEFKLASHMYCSFYPPDEDEEEGDCEEEEFEPSTQYEYGTEDDYQGKPLEFGATSAALQPEEEQEEDWLDDDSQQTVGQQDGSEDNQTTTIQTIVEVQPQLEMELTPVVQTIEVNSFSGYLKLTDNVYIKNADIVEEAKKVKPTVVVNAANVYLKHGGGVAGALNKATNNAMQVESDDYIATNGPLKVGGSCVLSGHNLAKHCLHVVGPNVNKGEDIQLLKSAYENFNQHEVLLAPLLSAGIFGADPIHSLRVCVDTVRTNVYLAVFDKNLYDKLVSSFLEMKSEKQVEQKIAEIPKEEVKPFITESKPSVEQRKQDDKKIKACVEEVTTTLEETKFLTENLLLYIDINGNLHPDSATLVSDIDITFLKKDAPYIVGDVVQEGVLTAVVIPTKKAGGTTEMLAKALRKVPTDNYITTYPGQGLNGYTVEEAKTVLKKCKSAFYILPSIISNEKQEILGTVSWNLREMLAHAEETRKLMPVCVETKAIVSTIQRKYKGIKIQEGVVDYGARFYFYTSKTTVASLINTLNDLNETLVTMPLGYVTHGLNLEEAARYMRSLKVPATVSVSSPDAVTAYNGYLTSSSKTPEEHFIETISLAGSYKDWSYSGQSTQLGIEFLKRGDKSVYYTSNPTTFHLDGEVITFDNLKTLLSLREVRTIKVFTTVDNINLHTQVVDMSMTYGQQFGPTYLDGADVTKIKPHNSHEGKTFYVLPNDDTLRVEAFEYYHTTDPSFLGRYMSALNHTKKWKYPQVNGLTSIKWADNNCYLATALLTLQQIELKFNPPALQDAYYRARAGEAANFCALILAYCNKTVGELGDVRETMSYLFQHANLDSCKRVLNVVCKTCGQQQTTLKGVEAVMYMGTLSYEQFKKGVQIPCTCGKQATKYLVQQESPFVMMSAPPAQYELKHGTFTCASEYTGNYQCGHYKHITSKETLYCIDGALLTKSSEYKGPITDVFYKENSYTTTIKPVTYKLDGVVCTEIDPKLDNYYKKDNSYFTEQPIDLVPNQPYPNASFDNFKFVCDNIKFADDLNQLTGYKKPASRELKVTFFPDLNGDVVAIDYKHYTPSFKKGAKLLHKPIVWHVNNATNKATYKPNTWCIRCLWSTKPVETSNSFDVLKSEDAQGMDNLACEDLKPVSEEVVENPTIQKDVLECNVKTTEVVGDIILKPANNSLKITEEVGHTDLMAAYVDNSSLTIKKPNELSRVLGLKTLATHGLAAVNSVPWDTIANYAKPFLNKVVSTTTNIVTRCLNRVCTNYMPYFFTLLLQLCTFTRSTNSRIKASMPTTIAKNTVKSVGKFCLEASFNYLKSPNFSKLINIIIWFLLLSVCLGSLIYSTAALGVLMSNLGMPSYCTGYREGYLNSTNVTIATYCTGSIPCSVCLSGLDSLDTYPSLETIQITISSFKWDLTAFGLVAEWFLAYILFTRFFYVLGLAAIMQLFFSYFAVHFISNSWLMWLIINLVQMAPISAMVRMYIFFALFYYVWKSYVHVVDGCNSSTCMMCYKRNRATRVECTTIVNGVRRSFYVYANGGKGFCKLHNWNCVNCDTFCAGSTFISDEVARDLSLQFKRPINPTDQSSYIVDSVTVKNGSIHLYFDKAGQKTYERHSLSHFVNLDNLRANNTKGSLPINVIVFDGKSKCEESSAKSASVYYSQLMCQPILLLDQALVSDVGDSAEVAVKMFDAYVNTFSSTFNVPMEKLKTLVATAEAELAKNVSLDNVLSTFISAARQGFVDSDVETKDVVECLKLSHQSDIEVTGDSCNNYMLTYNKVENMTPRDLGACIDCSARHINAQVAKSHNIALIWNVKDFMSLSEQLRKQIRSAAKKNNLPFKLTCATTRQVVNVVTTKIALKGG

SEQ ID NO: 16224 - protein, 1946 aa, Artificial Sequence
  SARS-CoV-2__MT632840.1__non-structural protein 3 (NSP3)
MAPTKVTFGDDTVIEVQGYKSVNITFELDERIDKVLNEKCSAYTVELGTEVNEFACVVADAVIKTLQPVSELLTPLGIDLDEWSMATYYLFDESGEFKLASHMYCSFYPPDEDEEEGDCEEEEFEPSTQYEYGTEDDYQGKPLEFGATSAALQPEEEQEEDWLDDDSQQTVGQQDGSEDNQTTTIQTIVEVQPQLEMELTPVVQTIEVNSFSGYLKLTDNVYIKNADIVEEAKKVKPTVVVNAANVYLKHGGGVAGALNKATNNAMQVESDDYIATNGPLKVGGSCVLSGHNLAKHCLHVVGPNVNKCEDIQLLKSAYENFNQHEVLLAPLLSAGIFGADPIHSLRVCVDTVRTNVYLAVFDKNLYDKLVSSFLEMKSEKQVEQKIAEIPKEEVKPFITESKPSVEQRKQDDKKIKACVEEVTTTLEETKFLTENLLLYIDINGNLHPDSATLVSDIDITFLKKDAPYIVGDVVQEGVLTAVVIPTKKAGGTTEMLAKALRKVPTDNYITTYPGQGLNGYTVEEAKTVLKKCKSAFYILPSIISNEKQEILGTVSWNLREMLAHAEETRKLMPVCVETKAIVSTIQRKYKGIKIQEGVVDYGARFYFYTSKTTVASLINTLNDLNETLVTMPLGYVTHGLNLEEAARYMRSLKVPATVSVSSPDAVTAYNGYLTSSSKTPEEHFIETISLAGSYKDWSYSGQSTQLGIEFLKRGDKSVYYTSNPTTFHLDGEVITFDNLKTLLSLREVRTIKVFTTVDNINLHTQVVDMSMTYGQQFGPTYLDGADVTKIKPHNSHEGKTFYVLPNDDTLRVEAFEYYHTTDPSFLGRYMSALNHTKKWKYPQVNGLTSIKWADNNCYLATALLTLQQIELKFNPPALQDAYYRARAGEAANFCALILAYCNKTVGELGDVRETMSYLFQHANLDSCKRVLNVVCKTCGQQQTTLKGVEAVMYMGTLSYEQFKKGVQIPCTCGKQATKYLVQQESPFVMMSAPPAQYELKHGTFTCASEYTGNYQCGHYKHITSKETLYCIDGALLTKSSEYKGPITDVFYKENSYTTTIKPVTYKLDGVVCTEIDPKLDNYYKKDNSYFTEQPIDLVPNQPYPNASFDNFKFVCDNIKFADDLNQLTGYKKPASRELKVTFFPDLNGDVVAIDYKHYTPSFKKGAKLLHKPIVWHVNNATNKATYKPNTWCIRCLWSTKPVETSNSFDVLKSEDAQGMDNLACEDLKPVSEEVVENPTIQKDVLECNVKTTEVVGDIILKPANNSLKITEEVGHTDLMAAYVDNSSLTIKKPNELSRVLGLKTLATHGLAAVNSVPWDTIANYARPFLNKVVSTTTNIVTRCLNRVCTNYMPYFFTLLLQLCTFTRSTNSRIKASMPTTIAKNTVKSVGKFCLEASFNYLKSPNFSKLINIIIWFLLLSVCLGSLIYSTAALGVLMSNLGMPSYCTGYREGYLNSTNVTIATYCTGSIPCSVCLSGLDSLDTYPSLETIQITISSFKWDLTAFGLVAEWFLAYILFTRFFYVLGLAAIMQLFFSYFAVHFISNSWLMWLIINLVQMAPISAMVRMYIFFASFYYVWKSYVHVVDGCNSSTCMMCYKRNRATRVECTTIVNGVRRSFYVYANGGKGFCKLHNWNCVNCDTFCAGSTFISDEVARDLSLQFKRPINPTDQSSYIVDSVTVKNGSIHLYFDKAGQKTYERHSLSHFVNLDNLRANNTKGSLPINVIVFDGKSKCEESSAKSASVYYSQLMCQPILLLDQALVSDVGDSAEVAVKMFDAYVNTFSSTFNVPMEKLKTLVATAEAELAKNVSLDNVLSTFISAARQGFVDSDVETKDVVECLKLSHQSDIEVTGDSCNNYMLTYNKVENMTPRDLGACIDCSARHINAQVAKSHNIALIWNVKDFMSLSEQLRKQIRSAAKKNNLPFKLTCATTRQVVNVVTTKIALKGG

SEQ ID NO: 16225 - protein, 1946 aa, Artificial Sequence
  SARS-CoV-2__MT632866.1__non-structural protein 3 (NSP3)
MAPTKVTFGDDTVIEVQGYKSVNITFELDERIDKVLNEKCSAYTVELGTEVNEFACVVADAVIKTLQPVSELLTPLGIDLDEWSMATYYLFDESGEFKLASHMYCSFYPPDEDEEEGDCEEEEFEPSTQYEYGTEDDYQGKPLEFGATSAALQPEEEQEEDWLDDDSQQTVGQQDGSEDNQTTTIQTIVEVQPQLEMELTPVVQTIEVNSFSGYLKLTDNVYIKNADIVEEAKKVKPTVVVNAANVYLKHGGGVAGALNKATNNAMQVESDDYIATNGPLKVGGSCVLSGHNLAKHCLHVVGPNVNKGEDIQLLKSAYENFNQHEVLLAPLLSAGIFGADPIHSLRVCVDTVRTNVYLAVFDKNLYDKLVSSFLEMKSEKQVEQKIAEIPKEEVKPFITESKPSVEQRKQDDKKIKACVEEVTTTLEETKFLTENLLLYIDINGNLHPDSATLVSDIDITFLKKDAPYIVGDVVQEGVLTAVVIPTKKAGGTTEMLAKALRKVPTDNYITTYPGQGLNGYTVEEAKTVLKKCKSAFYILPSIISNEKQEILGTVSWNLREMLAHAEETRKLMPVCVETKAIVSTIQRKYKGIKIQEGVVDYGARFYFYTSKTTVASLINTLNDLNETLVTMPLGYVTHGLNLEEAARYMRSLKVPATVSVSSPDAVTAYNGYLTSSSKTPEEHFIETISLAGSYKDWSYSGQSTQLGIEFLKRGDKSVYYTSNPTTFHLDGEVITFDNLKTLLSLREVRTIKVFTTVDNINLHTQVVDMSMTYGQQFGPTYLDGADVTKIKPHNSHEGKTFYVLPNDDTLRVEAFEYYHTTDPSFLGRYMSALNHTKKWKYPQVNGLTSIKWADNNCYLATALLTLQQIELKFNPPALQDAYYRARAGEAANFCALILAYCNKTVGELGDVRETMSYLFQHANLDSCKRVLNVVCKTCGQQQTTLKGVEAVMYMGTLSYEQFKKGVQIPCTCGKQATKYLVQQESPFVMMSAPPAQYELKHGTFTCASEYTGNYQCGHYKHITSKETLYCIDGALLTKSSEYKGPITDVFYKENSYTTTIKPVTYKLDGVVCTEIDPKLDNYYKKDNSYFTEQPIDLVPNQPYPNASFDNFKFVCDNIKFADDLNQLTGYKKPASRELKVTFFPDLNGDVVAIDYKHYTPSFKKGAKLLHKPIVWHVNNATNKATYKPNTWCIRCLWSTKPVETSNSFDVLKSEDAQGMDNLACEDLKPVSEEVVENPTIQKDVLECNVKTTEVVGDIILKPANNSLKITEEVGHTDLMAAYVDNSSLTIKKPNELSRVLGLKTLATHGLAAVNSVPWDTIANYAKPFLNKVVSTTTNIVTRCLNRVCTNYMPYFFTLLLQLCTFTRSTNSRIKASMPTTIAKNTVKSVGKFCLEASFNYLKSPNFSKLINIIIWFLLLSVCLGSLIYSTAALGVLMSNLGMPSYCTGYREGYLNSTNVTIATYCTGSIPCSVCLSGLDSLDTYPSLETIQITISSFKWDLTAFGLVAEWFLAYILFTRFFYVLGLAAIMQLFFSYFAVHFISNSWLMWLIINLVQMAPISAMVRMYIFFASFYYVWKSYVHVVDGCNSSTCMMCYKRNRATRVECTTIVNGVRRSFYVYANGGKGFCKLHNWNCVNCDTFCAGSTFISDEVARDLSLQFKRPINPTDQSSYIVDSVTVKNGSIHLYFDKAGQKTYERHSLSHFVNLDNLRANNTKGSLPINVIVFDGKSKCEESSAKSASVYYSQLMCQPILLLDQALVSDVGDSAEVAVKMFDAYVNTFSSTFNVPMEKLKTLVATAEAELAKNVSLGNVLSTFISAARQGFVDSDVETKDVVECLKLSHQSDIEVTGDSCNNYMLTYNKVENMTPRDLGACIDCSARHINAQVAKSHNIALIWNVKDFMSLSEQLRKQIRSAAKKNNLPFKLTCATTRQVVNVVTTKIALKGG

SEQ ID NO: 16226 - protein, 1946 aa, Artificial Sequence
  SARS-CoV-2__MT632921.1__non-structural protein 3 (NSP3)
MAPTKVTFGDDTVIEVQGYKSVNITFELDERIDKVLNEKCSAYTVELGTEVNEFACVVADAVIKTLQPVSELLTPLGIDLDEWSMATYYLFDESGEFKLASHMYCSFYPPDEDEEEGDCEEEEFEPSTQYEYGTEDDYQGKPLEFGATSAALQPEEEQEEDWLDDDSQQTVGQQDGSEDNQTTTIQTIVEVQPQLEMELTPVVQTIEVNSFSGYLKLTDNVYIKNADIVEEAKKVKPTVVVNAANVYLKHGGGVAGALNKATNNAMQVESDDYIATNGPLKVGGSCVLSGHNLAKHCLHVVGPNVNKGEDIQLLKSAYENFNQHEVLLAPLLSAGIFGADSIHSLRVCVDTVRTNVYLAVFDKNLYDKLVSSFLEMKSEKQVEQKIAEIPKEEVKPFITESKPSVEQRKQDDKKIKACVEEVTTTLEETKFLTENLLLYIDINGNLHPDSATLVSDIDITFLKKDAPYIVGDVVQEGVLTAVVIPTKKAGGTTEMLAKALRKVPTDNYITTYPGQGLNGYTVEEAKTVLKKCKSAFYILPSIISNEKQEILGTVSWNLREMLAHAEETRKLMPVCVETKAIVSTIQRKYKGIKIQEGVVDYGARFYFYTSKTTVASLINTLNDLNETLVTMPLGYVTHGLNLEEAARYMRSLKVPATVSVSSPDAVTAYNGYLTSSSKTPEEHFIETISLAGSYKDWSYSGQSTQLGIEFLKRGDKSVYYTSNPTTFHLDGEVITFDNLKTLLSLREVRTIKVFTTVDNINLHTQVVDMSMTYGQQFGPTYLDGADVTKIKPHNSHEGKTFYVLPNDDTLRVEAFEYYHTTDPSFLGRYMSALNHTKKWKYPQVNGLTSIKWADNNCYLATALLTLQQIELKFNPPALQDAYYRARAGEAANFCALILAYCNKTVGELGDVRETMSYLFQHANLDSCKRVLNVVCKTCGQQQTTLKGVEAVMYMGTLSYEQFKKGVQIPCTCGKQATKYLVQQESPFVMMSAPPAQYELKHGTFTCASEYTGNYQCGHYKHITSKETLYCIDGALLTKSSEYKGPITDVFYKENSYTTTIKPVTYKLDGVVCTEIDPKLDNYYKKDNSYFTEQPIDLVPNQPYPNASFDNFKFVCDNIKFADDLNQLTGYKKPASRELKVTFFPDLNGDVVAIDYKHYTPSFKKGAKLLHKPIVWHVNNATNKATYKPNTWCIRCLWSTKPVETSNSFDVLKSEDAQGMDNLACEDLKPVSEEVVENPTIQKDVLECNVKTTEVVGDIILKPANNSLKITEEVGHTDLMAAYVDNSSLTIKKPNELSRVLGLKTLATHGLAAVNSVPWDTIANYAKPFLNKVVSTTTNIVTRCLNRVCTNYMPYFFTLLLQLCTFTRSTNSRIKASMPTTIAKNTVKSVGKFCLEASFNYLKSPNFSKLINIIIWFLLLSVCLGSLIYSTAALGVLMSNLGMPSYCTGYREGYLNSTNVTIATYCTGSIPCSVCLSGLDSLDTYPSLETIQITISSFKWDLTAFGLVAEWFLAYILFTRFFYVLGLAAIMQLFFSYFAVHFISNSWLMWLIINLVQMAPISAMVRMYIFFASFYYVWKSYVHVVDGCNSSTCMMCYKRNRATRVECTTIVNGVRRSFYVYANGGKGFCKLHNWNCVNCDTFCAGSTFISDEVARDLSLQFKRPINPTDQSSYIVDSVTVKNGSIHLYFDKAGQKTYERHSLSHFVNLDNLRANNTKGSLPINVIVFDGKSKCEESSAKSASVYYSQLMCQPILLLDQALVSDVGDSAEVAVKMFDAYVNTFSSTFNVPMEKLKTLVATAEAELAKNVSLDNVLSTFISAARQGFVDSDVETKDVVECLKLSHQSDIEVTGDSCNNYMLTYNKVENMTPRDLGACIDCSARHINAQVAKSHNIALIWNVKDFMSLSEQLRKQIRSAAKKNNLPFKLTCATTRQVVNVVTTKIALKGG

SEQ ID NO: 16227 - protein, 1946 aa, Artificial Sequence
  SARS-CoV-2__MT632930.1__non-structural protein 3 (NSP3)
MAPTKVTFGDDTVIEVQGYKSVNITFELDERIDKVLNEKCSAYTVELGTEVNEFACVVADAVIKTLQPVSELLTPLGIDLDEWSMATYYLFDESGEFKLASHMYCSFYPPDEDEEEGDCEEEEFEPSTQYEYGTEDDYQGKPLEFGATSAALQPEEEQEEDWLDDDSQQTVGQQDGSEDNQTTTIQTIVEVQPQLEMELTPVVQTIEVNSFSGYLKLTDNVYIKNADIVEEAKKVKPTVVVNAANVYLKHGGGVAGALNKATNNAMQVESDDYIATNGPLKVGGSCVLSGHNLAKHCLHVVGPNVNKGEDIQLLKSAYENFNQHEVLLAPLLSAGIFGADPIHSLRVCVDTVRTNVYLAVFDKNLYDKLVSSFLEMKSEKQVEQKIAEIPKEEVKPFITESKPSVEQRKQDDKKIKACVEEVTTTLEETKFLTENLLLYIDINGNLHPDSATLVSDIDITFLKKDAPYIVGDVVQEGVLTAVVIPTKKAGGTTEMLAKALRKVPTDNYITTYPGQGLNGYTVEEAKTVLKKCKSAFYILPSIISNEKQEILGTVSWNLREMLAHAEETRKLMPVCVETKAIVSTIQRKYKGIKIQEGVVDYGARFYFYTSKTTVASLINTLNDLNETLVTMPLGYVTHGLNLEEAARYMRSLKVPATVSVSSPDAVTAYNGYLTSSSKTPEEHFIETISLAGSYKDWSYSGQSTQLGIEFLKRGDKSVYYTSNPTTFHLDGEVITFDNLKTLLSLREVRTIKVFTTVDNINLHTQVVDMSMTYGQQFGPTYLDGADVTKIKPHNSHEGKTFYVLPNDDTLRVEAFEYYHTTDPSFLGRYMSALNHTKKWKYPQVNGLTSIKWADNNCYLATALLTLQQIELKFNPPALQDAYYRARAGEAANFCALILAYCNKTVGELGDVRETMSYLFQHANLDSCKRVLNVVCKTCGQQQTTLKGVEAVMYMGTLSYEQFKKGVQIPCTCGKQATKYLVQQESPFVMMSAPPAQYELKHGTFTCASEYTGNYQCGHYKHITSKETLYCIDGALLTKSSEYKGPITDVFYKENSYTTTIKPVTYKLDGVVCTEIDPKLDNYYKKDNSYFTEQPIDLVPNQPYPNASFDNFKFVCDNIKFADDLNQLTGYKKPASRELKVTFFPDLNGDVVAIDYKHYTPSFKKGAKLLHKPIVWHVNNATNKATYKPNTWCIRCLWSTKPVETSNSFDVLKSEDAQGMDNLACEDLKPVSEEVVENPTIQKDVLECNVKTTEVVGDIILKPANNSLKITEEVGHTDLMAAYVDNSSLTIKKPNELSRVLGLKTLATHGLAAVNSVPWDTIANYAKPFLNKVVSTTTNIVTRCLNRVCTNYMPYFFTLLLQLCTFTRSTNSRIKASMPTTIAKNTVKSVGKFCLEASFNYLKSPNFSKLINIIIWFLLLSVCLGSLIYSTAALGVLMSNLGMPSYCTGYREGYLNSTNVTIATYCTGSIPCSVCLSGLDSLDTYPSLETIQITISSFKWDLTAFGLVAEWFLAYILFTRFFYVLGLAAIMQLFFSYFAVHFISNSWLMWLIINLVQMAPISAMVRMYIFFASFYYVWKSYVHVVDGCNSSTCMMCYKRNRATRVECTTIVNGVRRSFYVYANGGKGFCKLHNWNCVNCDTFCAGSTFISDEVARDLSLQFKRPINPTDQSSYIVDSVTVKNGSIHLYFDKAGQKTYERHSPSHFVNLDNLRANNTKGSLPINVIVFDGKSKCEESSAKSASVYYSQLMCQPILLLDQALVSDVGDSAEVAVKMFDAYVNTFSSTFNVPMEKLKTLVATAEAELAKNVSLDNVLSTFISAARQGFVDSDVETKDVVECLKLSHQSDIEVTGDSCNNYMLTYNKVENMTPRDLGACIDCSARHINAQVAKSHNIALIWNVKDFMSLSEQLRKQIRSAAKKNNLPFKLTCATTRQVVNVVTTKIALKGG

SEQ ID NO: 16228 - protein, 1946 aa, Artificial Sequence
  SARS-CoV-2__MT632954.1__non-structural protein 3 (NSP3)
MAPTKVTFGDDTVIEVQGYKSVNITFELDERIDKVLNEKCSAYTVELGTEVNEFACVVADAVIKTLQPVSELLTPLGIDLDEWSMATYYLFDESGEFKLASHMYCSFYPPDEDEEEGDCEEEEFEPSTQYEYGTEDDYQGKPLEFGATSAALQPEEEQEEDWLDDDSQQTVGQQDGSEDNQTTTIQTIVEVQPQLEMELTPVVQTIEVNSFSGYLKLTDNVYIKNADIVEEAKKVKPTVVVNAANVYLKHGGGVAGALNKATNNAMQVESDDYIATNGPLKVGGSCVLSGHNLAKHCLHVVGPNVNKGEDIQLLKSAYENFNQHEVLLAPLLSAGIFGADPIHSLRVCVDTVRTNVYLAVFDKNLYDKLVSSFLEMKSEKQVEQKIAEIPKEEVKPFITESKPSVEQRKQDDKKIKACVEEVTTTLEETKFLTENLLLYVDINGNLHPDSATLVSDIDITFLKKDAPYIVGDVVQEGVLTAVVIPTKKAGGTTEMLAKALRKVPTDNYITTYPGQGLNGYTVEEAKTVLKKCKSAFYILPSIISNEKQEILGTVSWNLREMLAHAEETRKLMPVCVETKAIVSTIQRKYKGIKIQEGVVDYGARFYFYTSKTTVASLINTLNDLNETLVTMPLGYVTHGLNLEEAARYMRSLKVPATVSVSSPDAVTAYNGYLTSSSKTPEEHFIETISLAGSYKDWSYSGQSTQLGIEFLKRGDKSVYYTSNPTTFHLDGEVITFDNLKTLLSLREVRTIKVFTTVDNINLHTQVVDMSMTYGQQFGPTYLDGADVTKIKPHNSHEGKTFYVLPNDDTLRVEAFEYYHTTDPSFLGRYMSALNHTKKWKYPQVNGLTSIKWADNNCYLATALLTLQQIELKFNPPALQDAYYRARAGEAANFCALILAYCNKTVGELGDVRETMSYLFQHANLDSCKRVLNVVCKTCGQQQTTLKGVEAVMYMGTLSYEQFKKGVQIPCTCGKQATKYLVQQESPFVMMSAPPAQYELKHGTFTCASEYTGNYQCGHYKHITSKETLYCIDGALLTKSSEYKGPITDVFYKENSYTTTIKPVTYKLDGVVCTEIDPKLDNYYKKDNSYFTEQPIDLVPNQPYPNASFDNFKFVCDNIKFADDLNQLTGYKKPASRELKVTFFPDLNGDVVAIDYKHYTPSFKKGAKLLHKPIVWHVNNATNKATYKPNTWCIRCLWSTKPVETSNSFDVLKSEDAQGMDNLACEDLKPVSEEVVENPTIQKDVLECNVKTTEVVGDIILKPANNSLKITEEVGHTDLMAAYVDNSSLTIKKPNELSRVLGLKTLATHGLAAVNSVPWDTIANYAKPFLNKVVSTTTNIVTRCLNRVCTNYMPYFFTLLLQLCTFTRSTNSRIKASMPTTIAKNTVKSVGKFCLEASFNYLKSPNFSKLINIIIWFLLLSVCLGSLIYSTAALGVLMSNLGMPSYCTGYREGYLNSTNVTIATYCTGSIPCSVCLSGLDSLDTYPSLETIQITISSFKWDLTAFGLVAEWFLAYILFTRFFYVLGLAAIMQLFFSYFAVHFISNSWLMWLIINLVQMAPISAMVRMYIFFASFYYVWKSYVHVVDGCNSSTCMMCYKRNRATRVECTTIVNGVRRSFYVYANGGKGFCKLHNWNCVNCDTFCAGSTFISDEVARDLSLQFKRPINPTDQSSYIVDSVTVKNGSIHLYFDKAGQKTYERHSLSHFVNLDNLRANNTKGSLPINVIVFDGKSKCEESSAKSASVYYSQLMCQPILLLDQALVSDVGDSAEVAVKMFDAYVNTFSSTFNVPMEKLKTLVATAEAELAKNVSLDNVLSTFISAARQGFVDSDVETKDVVECLKLSHQSDIEVTGDSCNNYMLTYNKVENMTPRDLGACIDCSARHINAQVAKSHNIALIWNVKDFMSLSEQLRKQIRSAAKKNNLPFKLTCATTRQVVNVVTTKIALKGG

SEQ ID NO: 16229 - protein, 1946 aa, Artificial Sequence
  SARS-CoV-2__MT614457.1__non-structural protein 3 (NSP3)
MAPTKVTFGDDTVIEVQGYKSVNITFELDERIDKVLNEKCSAYTVELGTEVNEFACVVADAVIKTLQPVSELLTPLGIDLDEWSMATYYLFDESGEFKLASHMYCSFYPPDEDEEEGDCEEEEFEPSTQYEYGTEDDYQGKPLEFGATSAALQPEEEQEEDWLDDDSQQTVGQQDGSEDNQTTTIQTIVEVQPQLEMELTPVVQTIEVNSFSGYLKLTDNVYIKNADIVEEAKKVKPTVVVNAANVYLKHGGGVAGALNKATNNAMQVESDDYIATNGPLKVGGSCVLSGHNLAKHCLHVVGPNVDKGEDIQLLKSAYENFNQHEVLLAPLLSAGIFGADPIHSLRVCVDTVRTNVYLAVFDKNLYDKLVSSFLEMKSEKQVEQKIAEIPKEEVKPFITESKPSVEQRKQDDKKIKACVEEVTTTLEETKFLTENLLLYIDINGNLHPDSATLVSDIDITFLKKDAPYIVGDVVQEGVLTAVVIPTKKAGGTTEMLAKALRKVPTDNYITTYPGQGLNGYTVEEAKTVLKKCKSAFYILPSIISNEKQEILGTVSWNLREMLAHAEETRKLMPVCVETKAIVSTIQRKYKGIKIQEGVVDYGARFYFYTSKTTVASLINTLNDLNETLVTMPLGYVTHGLNLEEAARYMRSLKVPATVSVSSPDAVTAYNGYLTSSSKTPEEHFIETISLAGSYKDWSYSGQSTQLGIEFLKRGDKSVYYTSNPTTFHLDGEVITFDNLKTLLSLREVRTIKVFTTVDNINLHTQVVDMSMTYGQQFGPTYLDGADVTKIKPHNSHEGKTFYVLPNDDTLRVEAFEYYHTTDPSFLGRYMSALNHTKKWKYPQVNGLTSIKWADNNCYLATALLTLQQIELKFNPPALQDAYYRARAGEAANFCALILAYCNKTVGELGDVRETMSYLFQHANLDSCKRVLNVVCKTCGQQQTTLKGVEAVMYMGTLSYEQFKKGVQIPCTCGKQATKYLVQQESPFVMMSAPPAQYELKHGTFTCASEYTGNYQCGHYKHITSKETLYCIDGALLTKSSEYKGPITDVFYKENSYTTTIKPVTYKLDGVVCTEIDPKLDNYYKKDNSYFTEQPIDLVPNQPYPNASFDNFKFVCDNIKFADDLNQLTGYKKPASRELKVTFFPDLNGDVVAIDYKHYTPSFKKGAKLLHKPIVWHVNNATNKATYKPNTWCIRCLWSTKPVETSNSFDVLKSEDAQGMDNLACEDLKPVSEEVVENPTIQKDVLECNVKTTEVVGDIILKPANNSLKITEEVGHTDLMAAYVDNSSLTIKKPNELSRVLGLKTLATHGLAAVNSVPWDTIANYAKPFLNKVVSTTTNIVTRCLNRVCTNYMPYFFTLLLQLCTFTRSTNSRIKASMPTTIAKNTVKSVGKFCLEASFNYLKSPNFSKLINIIIWFLLLSVCLGSLIYSTAALGVLMSNLGMPSYCTGYREGYLNSTNVTIATYCTGSIPCSVCLSGLDSLDTYPSLETIQITISSFKWDLTAFGLVAEWFLAYILFTRFFYVLGLAAIMQLFFSYFAVHFISNSWLMWLIINLVQMAPISAMVRMYIFFASFYYVWKSYVHVVDGCNSSTCMMCYKRNRATRVECTTIVNGVRRSFYVYANGGKGFCKLHNWNCVNCDTFCAGSTFISDEVARDLSLQFKRPINPTDQSSYIVDSVTVKNGSIHLYFDKAGQKTYERHSLSHFVNLDNLRANNTKGSLPINVIVFDGKSKCEESSAKSASVYYSQLMCQPILLLDQALVSDVGDSAEVAVKMFDAYVNTFSSTFNVPMEKLKTLVATAEAELAKNVSLDNVLSTFISAARQGFVDSDVETKDVVECLKLSHQSDIEVTGDSCNNYMLTYNKVENMTPRDLGACIDCSARHINAQVAKSHNIALIWNVKDFMSLSEQLRKQIRSAAKKNNLPFKLTCATTRQVVNVVTTKIALKGG

SEQ ID NO: 16230 - protein, 1946 aa, Artificial Sequence
  SARS-CoV-2__MT614462.1__non-structural protein 3 (NSP3)
MAPTKVTFGDDTVIEVQGYKSVNITFELDERIDKVLNEKCSAYTVELGTEVNEFACVVADAVIKTLQPVSELLTPLGIDLDEWSMATYYLFDESGEFKLASHMYCSFYPPDEDEEEGDCEEEEFEPSTQYEYGTEDDYQGKPLEFGATSAALQPEEEQEEDWLDDDSQQTVGQQDGSEDNQTTTIQTIVEVQPQLEMELTPVVQTIEVNSFSGYLKLTDNVYIKNADIVEEAKKVKPTVVVNAANVYLKHGGGVAGALNKATNNAMQVESDDYIATNGPLKVGGSCVLSGHNLAKHCLHVVGPNVNKGEDIQLLKSAYENFNQHEVLLAPLLSAGIFGADPIHSLRVCVDTVRTNVYLAVFDKNLYDKLVSSFLEMKSEKQVEQKIAEIPKEEVKPFITESKPSVEQRKQDDKKIKACVEEVTTTLEETKFLTENLLLYIDINGNLHPDSATLVSDIDITFLKKDAPYIVGDVVQEGVLTAVVIPTKKAGGTTEMLAKALRKVPTDNYITTYPGQGLNGYTVEEAKTVLKKCKSAFYILPSIISNEKQEILGTVSWNLREMLAHAEETRKLMPVCVETKAIVSTIQRKYKGIKIQEGVVDYGARFYFYTSKTTVASLINTLNDLNETLVTMPLGYVTHGLNLEEAARYMRSLKVPATVSVSSPDAVTAYNGYLTSSSKTPEEHFIETISLAGSYKDWSYSGQSTQLGIEFLKRGDKSVYYTSNPTTFHLDGEVITFDNLKTLLSLREVRTIKVFTTVDNINLHTQVVDMSMTYGQQFGPTYLDGADVTKIKPHNSHEGKTFYVLPNDDTLRVEAFEYYHTTDPSFLGRYMSALNHTKKWKYPQVNGLTSIKWADNNCYLATALLTLQQIELKFNPPALQDAYYRARAGEAANFCALILAYCNKTVGELGDVRETMSYLFQHANLDSCKRVLNVVCKTCGQQQTTLKGVEAVMYMGTLSYEQFKKGVQIPCTCGKQATKYLVQQESPFVMMSAPPAQYELKHGTFTCASEYTGNYQCGHYKHITSKETLYCIDGALLTKSSEYKGPITDVFYKENSYTTTIKPVTYKLDGVVCTEIDPKLDNYYKKDNSYFTEQPIDLVPNQPYPNASFDNFKFVCDNIKFADDLNQLTGYKKPASRELKVTFFPDLNGDVVAIDYKHYTPSFKKGAKLLHKPIVWHVNNATNKATYKPNTWCIRCLWSKKPVETSNSFDVLKSEDAQGMDNLACEDLKPVSEEVVENPTIQKDVLECNVKTTEVVGDIILKPANNSLKITEEVGHTDLMAAYVDNSSLTIKKPNELSRVLGLKTLATHGLAAVNSVPWDTIANYAKPFLNKVVSTTTNIVTRCLNRVCTNYMPYFFTLLLQLCTFTRSTNSRIKASMPTTIAKNTVKSVGKFCLEASFNYLKSPNFSKLINIIIWFLLLSVCLGSLIYSTAALGVLMSNLGMPSYCTGYREGYLNSTNVTIATYCTGSIPCSVCLSGLDSLDTYPSLETIQITISSFKWDLTAFGLVAEWFLAYILFTRFFYVLGLAAIMQLFFSYFAVHFISNSWLMWLIINLVQMAPISAMVRMYIFFASFYYVWKSYVHVVDGCNSSTCMMCYKRNRATRVECTTIVNGVRRSFYVYANGGKGFCKLHNWNCVNCDTFCAGSTFISDEVARDLSLQFKRPINPTDQSSYIVDSVTVKNGSIHLYFDKAGQKTYERHSLSHFVNLDNLRANNTKGSLPINVIVFDGKSKCEESSAKSASVYYSQLMCQPILLLDQALVSDVGDSAEVAVKMFDAYVNTFSSTFNVPMEKLKTLVATAEAELAKNVFLDNVLSTFISAARQGFVDSDVETKDVVECLKLSHQSDIEVTGDSCNNYMLTYNKVENMTPRDLGACIDCSARHINAQVAKSHNIALIWNVKDFMSLSEQLRKQIRSAAKKNNLPFKLTCATTRQVVNVVTTKIALKGG

SEQ ID NO: 16231 - protein, 1946 aa, Artificial Sequence
  SARS-CoV-2__MT614466.1__non-structural protein 3 (NSP3)
MAPTKVTFGDDTVIEVQGYKSVNITFELDERIDKVLNEKCSAYTVELGTEVNEFACVVADAVIKTLQPVSELLTPLGIDLDEWSMATYYLFDESGEFKLASHMYCSFYPPDEDEEEGDCEEEEFEPSTQYEYGTEDDYQGKPLEFGATSAALQPEEEQEEDWLDDDSQQTVGQQDGSEDNQTTTIQTIVEVQPQLEMELTPVVQTIEVNSFSGYLKLTDNVYIKNADIVEEAKKVKPTVVVNAANVYLKHGGGVAGALNKATNNAMQVESDDYIATNGPLKVGGSCVLSGHNLAKHCLHVVGPNVNKGEDIQLLKSAYENFNQHEVLLAPLLSAGIFGADPIHSLRVCVDTVRTNVYLAVFDKNLYDKLVSSFLEMKSEKQVEQKIAEIPKEEVKPFITESKPSVEQRKQDDKKIKACVEEVTTTLEETKFLTENLLLYIDINGNLHPDSATLVSDIDITFLKKDAPYIVGDVVQEGVLTAVVIPTKKAGGTTEMLAKALRKVPTDNYITTYPGQGLNGYTVEEAKTVLKKCKSAFYILPSIISNEKQEILGTVSWNLREMLAHAEETRKLMPVCVETKAIVSTIQRKYKGIKIQEGVVDYGARFYFYTSKTTVASLINTLNDLNETLVTMPLGYVTHGLNLEEAARYMRSLKVPATVSVSSPDAVTAYNGYLTSSSKTPEEHFIETISLAGSYKDWSYSGQSTQLGIEFLKRGDKSVYYTSNPTTFHLDGEVITFDNLKTLLSLREVRTIKVFTTVDNINLHTQVVDMSMTYGQQFGPTYLDGADVTKIKPHNSHEGKTFYVLPNDDTLRVEAFEYYHTTDPSFLGRYMSALNHTKKWKYPQVNGLTSIKWADNNCYLATALLTLQQIELKFNPPALQDAYYRARAGEAANFCALILAYCNKTVGELGDVRETMSYLFQHANLDSCKRVLNVVCKTCGQQQTTLKGVEAVMYMGTLSYEQFKKGVQIPCTCGKQATKYLVQQESPFVMMSAPPAQYELKHGTFTCASEYTGNYQCGHYKHITSKETLYCIDGALLTKSSEYKGPITDVFYKENSYTTTIKPVTYKLDGVVCTEIDPKLDNYYKKDNSYFTEQPIDLVPNQPYPNASFDNFKFVCDNIKFADDLNQLTGYKKPASRELKVTFFPDLNGDVVAIDYKHYTPSFKKGAKLLHKPIVWHVNNATNKATYKPNTWCIRCLWSTKPVETSNSFDVLKSEDAQGMDNLACEDLKPVSEEVVENPTIQKDVLECNVKTTEVVGDIILKPANNSLKITEEVGHTDLMAAYVDNSSLTIKKPNELSRVLGLKTLATHGLAAVNSVPWDTIANYAKPFLNKVVSTTTNIVTRCLNRVCTNYMPYFFTLLLQLCTFTRSTNSRIKASMPTTIAKNTVKSVGKFCLEASFNYLKSPNFSKLINVIIWFLLLSVCLGSLIYSTAALGVLMSNLGMPSYCTGYREGYLNSTNVTIATYCTGSIPCSVCLSGLDSLDTYPSLETIQITISSFKWDLTAFGLVAEWFLAYILFTRFFYVLGLAAIMQLFFSYFAVHFISNSWLMWLIINLVQMAPISAMVRMYIFFASFYYVWKSYVHVVDGCNSSTCMMCYKRNRATRVECTTIVNGVRRSFYVYANGGKGFCKLHNWNCVNCDTFCAGSTFISDEVARDLSLQFKRPINPTDQSSYIVDSVTVKNGSIHLYFDKAGQKTYERHSLSHFVNLDNLRANNTKGSLPINVIVFDGKSKCEESSAKSASVYYSQLMCQPILLLDQALVSDVGDSAEVAVKMFDAYVNTFSSTFNVPMEKLKTLVATAEAELAKNVSLDNVLSTFISAARQGFVDSDVETKDVVECLKLSHQSDIEVTGDSCNNYMLTYNKVENMTPRDLGACIDCSARHINAQVAKSHNIALIWNVKDFMSLSEQLRKQIRSAAKKNNLPFKLTCATTRQVVNVVTTKIALKGG

SEQ ID NO: 16232 - protein, 1946 aa, Artificial Sequence
  SARS-CoV-2__MT614546.1__non-structural protein 3 (NSP3)
MAPTKVTFGDDTVIEVQGYKSVNITFELDERIDKVLNEKCSAYTVELGTEVNEFACVVADAVIKTLQPVSELLTPLGIDLDEWSMATYYLFDESGEFKLASHMYCSFYPPDEDEEEGDCEEEEFEPSTQYEYGTEDDYQGKPLEFGATSAALQPEEEQEEDWLDDDSQQTVGQQDGSEDNQTTTIQTIVEVQPQLEMELTPVVQTIEVNSFSGYLKLTDNVYIKNADIVEEAKKVKPTVVVNAANVYLKHGGGVAGALNKATNNAMQVESDDYIATNGPLKVGGSCVLSGHNLAKHCLHVVGPNVNKGEDIQLLKSAYENFNQHEVLLAPLLSAGIFGADPIHSLRVCVDTVRTNVYLAVFDKNLYDKLVSSFLEMKSEKQVEQKIAEIPKEEVKPFITESKPSVEQRKQDDKKIKACVEEVTTTLEETKFLTENLLLYIDINGNLHPDSATLVSDIDITFLKKDAPYIVGDVVQEGVLTAVVIPTKKAGGTTEMLAKALRKVPTDNYITTYPGQGLNGYTVEEAKTVLKKCKSAFYILPSIISNEKQEILGTVSWNLREMLAHAEETRKLMPVCVETKAIVSTIQRKYKGIKIQEGVVDYGARFYFYTSKTTVASLINTLNDLNETLVTMPLGYVTHGLNLEEAARYMRSLKVPATVSVSSPDAVTAYNGYLTSSSKTPEEHFIETISLAGSYKDWSYSGQSTQLGIEFLKRGDKSVYYTSNPTTFHLDGEVITFDNLKTLLSLREVRTIKVFTTVDNINLHTQVVDMSMTYGQQFGPTYLDGADVTKIKPHNSHEGKTFYVLPNDDTLLVEAFEYYHTTDPSFLGRYMSALNHTKKWKYPQVNGLTSIKWADNNCYLATALLTLQQIELKFNPPALQDAYYRARAGEAANFCALILAYCNKTVGELGDVRETMSYLFQHANLDSCKRVLNVVCKTCGQQQTTLKGVEAVMYMGTLSYEQFKKGVQIPCTCGKQATKYLVQQESPFVMMSAPPAQYELKHGTFTCASEYTGNYQCGHYKHITSKETLYCIDGALLTKSSEYKGPITDVFYKENSYTTTIKPVTYKLDGVVCTEIDPKLDNYYKKDNSYFTEQPIDLVPNQPYPNASFDNFKFVCDNIKFADDLNQLTGYKKPASRELKVTFFPDLNGDVVAIDYKHYTPSFKKGAKLLHKPIVWHVNNATNKATYKPNTWCIRCLWSTKPVETSNSFDVLKSEDAQGMDNLACEDLKPVSEEVVENPTIQKDVLECNVKTTEVVGDIILKPANNSLKITEEVGHTDLMAAYVDNSSLTIKKPNELSRVLGLKTLATHGLAAVNSVPWDTIANYAKPFLNKVVSTTTNIVTRCLNRVCTNYMPYFFTLLLQLCTFTRSTNSRIKASMPTTIAKNTVKSVGKFCLEASFNYLKSPNFSKLINIIIWFLLLSVCLGSLIYSTAALGVLMSNLGMPSYCTGYREGYLNSTNVTIATYCTGSIPCSVCLSGLDSLDTYPSLETIQITISSFKWDLTAFGLVAEWFLAYILFTRFFYVLGLAAIMQLFFSYFAVHFISNSWLMWLIINLVQMAPISAMVRMYIFFASFYYVWKSYVHVVDGCNSSTCMMCYKRNRATRVECTTIVNGVRRSFYVYANGGKGFCKLHNWNCVNCDTFCAGSTFISDEVARDLSLQFKRPINPTDQSSYIVDSVTVKNGSIHLYFDKAGQKTYERHSLSHFVNLDNLRANNTKGSLPINVIVFDGKSKCEESSAKSASVYYSQLMCQPILLLDQALVSDVGDSAEVAVKMFDAYVNTFSSTFNVPMEKLKTLVATAEAELAKNVSLDNVLSTFISAARQGFVDSDVETKDVVECLKLSHQSDIEVTGDSCNNYMLTYNKVENMTPRDLGACIDCSARHINAQVAKSHNIALIWNVKDFMSLSEQLRKQIRSAAKKNNLPFKLTCATTRQVVNVVTTKIALKGG

SEQ ID NO: 16233 - protein, 1946 aa, Artificial Sequence
  SARS-CoV-2__MT614552.1__non-structural protein 3 (NSP3)
MAPTKVTFGDDTVIEVQGYKSVNITFELDERIDKVLNEKCSAYTVELGTEVNEFACVVADAVIKTLQPVSELLTPLGIDLDEWSMATYYLFDESGEFKLASHMYCSFYPPDEDEEEGDCEEEEFEPSTQYEYGTEDDYQGKPLEFGATSAALQPEEEQEEDWLDDDSQQTVGQQDGSEDNQTTTIQTIVEVQPQLEMELTPVVQTIEVNSFSGYLKLTDNVYIKNADIVEEAKKVKPTVVVNAANVYLKHGGGVAGALNKATNNAMQVESDDYIATNGPLKVGGSCVLSGHNLAKHCLHVVGPNVNKGEDIQLLKSAYENFNQHEVLLAPLLSAGIFGADPIHSLRVCVDTVRTNVYLAVFDKNLYDKLVSSFLEMKSEKQVEQKIAEIPKEEVKPFITESKPSVEQRKQDDKKIKACVEEVTTTLEETKFLTENLLLYIDINGNLHPDSATLVSDIDITFLKKDAPYIVGDVVQEGVLTAVVIPTKKAGGTTEMLAKALRKVPTDNYITTYPGQGLNGYTVEEAKTVLKKCKSAFYILPSIISNEKQEILGTVSWNLREMLAHAEETRKLMPVCVETKAIVSTIQRKYKGIKIQEGVVDYGARFYFYTSKTTVASLINTLNDLNETLVTMPLGYVTHGLNLEEAARYMRSLKVPATVSVSSPDAVTAYNGYLTSSSKTPEEHFIETISLAGSYKDWSYSGQSTQLGIEFLKRGDKSVYYTSNPTTFHLDGEVITFDNLKTLLSLREVRTIKVFTTVDNINLHTQVVDMSMTYGQQFGPTYLDGADVTKIKPHNSHEGKTFYVLPNDDTLRVEAFEYYHTTDPSFLGRYMSALNHTKKWKYPQVNGLTSIKWADNNCYLATALLTLQQIELKFNPPALQDAYYRARAGEAANFCALILAYCNKTVGELGDVRETMSYLFQHANLDSCKRVLNVVCKTCGQQQTTLKGVEAVMYMGTLSYEQFKKGVQIPCTCGKQATKYLVQQESPFVMMSAPPAQYELKHGTFTCASEYTGNYQCGHYKHITSKETLYCIDGALLTKSSEYKGPITDVFYKENSYTTTIKPVTYKLDGVVCTEIDPKLDNYYKKDNSYFTEQPIDLVPNQPYPNASFDNFKFVCDNIKFADDLNQLTGYKKPASRELKVTFFPDLNGDVVAIDYKHYTPSFKKGAKLLHKPIVWHVNNATNKATYKPNTWCIRCLWSTKPVETSNSFDVLKSEDAQGMDNLACEDLKPVSEEVVENPTIQKDVLECNVKTTEVVGDIILKPANNSLKITEEVGHTDLMAAYVDNSSLTIKKPNELSRVLGLKTLATHGLAAVNSVPWDTIANYAKPFLNKVVSTTTNIVTRCLNRVCTNYMPYFFTLLLQLCTFTRSTNSRIKASMPTTIAKNTVKSVGKFCLEASFNYLKSSNFSKLINIIIWFLLLSVCLGSLIYSTAALGVLMSNLGMPSYCTGYREGYLNSTNVTIATYCTGSIPCSVCLSGLDSLDTYPSLETIQITISSFKWDLTAFGLVAEWFLAYILFTRFFYVLGLAAIMQLFFSYFAVHFISNSWLMWLIINLVQMAPISAMVRMYIFFASFYYVWKSYVHVVDGCNSSTCMMCYKRNRATRVECTTIVNGVRRSFYVYANGGKGFCKLHNWNCVNCDTFCAGSTFISDEVARDLSLQFKRPINPTDQSSYIVDSVTVKNGSIHLYFDKAGQKTYERHSLSHFVNLDNLRANNTKGSLPINVIVFDGKSKCEESSAKSASVYYSQLMCQPILLLDQALVSDVGDSAEVAVKMFDAYVNTFSSTFNVPMEKLKTLVATAEAELAKNVSLDNVLSTFISAARQGFVDSDVETKDVVECLKLSHQSDIEVTGDSCNNYMLTYNKVENMTPRDLGACIDCSARHINAQVAKSHNIALIWNVKDFMSLSEQLRKQIRSAAKKNNLPFKLTCATTRQVVNVVTTKIALKGG

SEQ ID NO: 16234 - protein, 1946 aa, Artificial Sequence
  SARS-CoV-2__MT614556.1__non-structural protein 3 (NSP3)
MAPTKVTFGDDTVIEVQGYKSVNITFELDERIDKVLNEKCSTYTVELGTEVNEFACVVADAVIKTLQPVSELLTPLGIDLDEWSMATYYLFDESGEFKLASHMYCSFYPPDEDEEEGDCEEEEFEPSTQYEYGTEDDYQGKPLEFGATSAALQPEEEQEEDWLDDDSQQTVGQQDGSEDNQTTTIQTIVEVQPQLEMELTPVVQTIEVNSFSGYLKLTDNVYIKNADIVEEAKKVKPTVVVNAANVYLKHGGGVAGALNKATNNAMQVESDDYIATNGPLKVGGSCVLSGHNLAKHCLHVVGPNVNKGEDIQLLKSAYENFNQHEVLLAPLLSAGIFGADPIHSLRVCVDTVRTNVYLAVFDKNLYDKLVSSFLEMKSEKQVEQKIAEIPKEEVKPFITESKPSVEQRKQDDKKIKACVEEVTTTLEETKFLTENLLLYIDINGNLHPDSATLVSDIDITFLKKDAPYIVGDVVQEGVLTAVVIPTKKAGGTTEMLAKALRKVPTDNYITTYPGQGLNGYTVEEAKTVLKKCKSAFYILPSIISNEKQEILGTVSWNLREMLAHAEETRKLMPVCVETKAIVSTIQRKYKGIKIQEGVVDYGARFYFYTSKTTVASLINTLNDLNETLVTMPLGYVTHGLNLEEAARYMRSLKVPATVSVSSPDAVTAYNGYLTSSSKTPEEHFIETISLAGSYKDWSYSGQSTQLGIEFLKRGDKSVYYTSNPTTFHLDGEVITFDNLKTLLSLREVRTIKVFTTVDNINLHTQVVDMSMTYGQQFGPTYLDGADVTKIKPHNSHEGKTFYVLPNDDTLRVEAFEYYHTTDPSFLGRYMSALNHTKKWKYPQVNGLTSIKWADNNCYLATALLTLQQIELKFNPPALQDAYYRARAGEAANFCALILAYCNKTVGELGDVRETMSYLFQHANLDSCKRVLNVVCKTCGQQQTTLKGVEAVIYMGTLSYEQFKKGVQIPCTCGKQATKYLVQQESPFVMMSAPPAQYELKHGTFTCASEYTGNYQCGHYKHITSKETLYCIDGALLTKSSEYKGPITDVFYKENSYTTTIKPVTYKLDGVVCTEIDPKLDNYYKKDNSYFTEQPIDLVPNQPYPNASFDNFKFVCDNIKFADDLNQLTGYKKPASRELKVTFFPDLNGDVVAIDYKHYTPSFKKGAKLLHKPIVWHVNNATNKATYKPNTWCIRCLWSTKPVETSNSFDVLKSEDAQGMDNLACEDLKPVSEEVVENPTIQKDVLECNVKTTEVVGDIILKPANNSLKITEEVGHTDLMAAYVDNSSLTIKKPNELSRVLGLKTLATHGLAAVNSVPWDTIANYAKPFLNKVVSTTTNIVTRCLNRVCTNYMPYFFTLLLQLCTFTRSTNSRIKASMPTTIAKNTVKSVGKFCLEASFNYLKSPNFSKLINIIIWFLLLSVCLGSLIYSTAALGVLMSNLGMPSYCTGYREGYLNSTNVTIATYCTGSIPCSVCLSGLDSLDTYPSLETIQITISSFKWDLTAFGLVAEWFLAYILFTRFFYVLGLAAIMQLFFSYFAVHFISNSWLMWLIINLVQMAPISAMVRMYIFFASFYYVWKSYVHVVDGCNSSTCMMCYKRNRATRVECTTIVNGVRRSFYVYANGGKGFCKLHNWNCVNCDTFCAGSTFISDEVARDLSLQFKRPINPTDQSSYIVDSVTVKNGSIHLYFDKAGQKTYERHSLSHFVNLDNLRANNTKGSLPINVIVFDGKSKCEESSAKSASVYYSQLMCQPILLLDQALVSDVGDSAEVAVKMFDAYVNTFSSTFNVPMEKLKTLVATAEAELAKNVSLDNVLSTFISAARQGFVDSDVETKDVVECLKLSHQSDIEVTGDSCNNYMLTYNKVENMTPRDLGACIDCSARHINAQVAKSHNIALIWNVKDFMSLSEQLRKQIRSAAKKNNLPFKLTCATTRQVVNVVTTKIALKGG

SEQ ID NO: 16235 - protein, 1946 aa, Artificial Sequence
  SARS-CoV-2__MT510701.1__non-structural protein 3 (NSP3)
MAPTKVTFGDDTVIEVQGYKSVNITFELDERIDKVLNEKCSAYTVELGTEVNEFACVVADAVIKTLQPVSELLTPLGIDLDEWSMATYYLFDESGEFKLASHMYCSFYPPDEDEEEGDCEEEEFEPSTQYEYGTEDDYQGKPLEFGATSAALQPEEEQEEDWLDDDSQQTVGQQDGSEDNQTTTIQTIVEVQPQLEMELTPVVQTIEVNSFSGYLKLTDNVYIKNADIVEEAKKVKPTVVVNAANVYLKHGGGVAGALNKATNNAMQVESDDYIATNGPLKVGGSCVLSGHNLAKHCLHVVGPNVNKGEDIQLLKSAYENFNQHEVLLAPLLSAGIFGADPIHSLRVCVDTVRTNVYLAVFDKNLYDKLVSSFLEMKSEKQVEQKIAEIPKEEVKPFITESKPSVEQRKQDDKKIKACVEEVTTTLEETKFLTENLLLYIDINGNLHPDSATLVSDIDITFLKKDAPYIVGDVVQEGVLTAVVIPTKNAGGTTEMLAKALRKVPTDNYITTYPGQGLNGYTVEEAKTVLKKCKSAFYILPSIISNEKQEILGTVSWNLREMLAHAEETRKLMPVCVETKAIVSTIQRKYKGIKIQEGVVDYGARFYFYTSKTTVASLINTLNDLNETLVTMPLGYVTHGLNLEEAARYMRSLKVPATVSVSSPDAVTAYNGYLTSSSKTPEEHFIETISLAGSYKDWSYSGQSTQLGIEFLKRGDKSVYYTSNPTTFHLDGEVITFDNLKTLLSLREVRTIKVFTTVDNINLHTQVVDMSMTYGQQFGPTYLDGADVTKIKPHNSHEGKTFYVLPNDDTLRVEAFEYYHTTDPSFLGRYMSALNHTKNWKYPQVNGLTSIKWADNNCYLATALLTLQQIELKFNPPALQDAYYRARAGEAANFCALILAYCNKTVGELGDVRETMSYLFQHANLDSCKRVLNVVCKTCGQQQTTLKGVEAVMYMGTLSYEQFKKGVQIPCTCGKQATKYLVQQESPFVMMSAPPAQYELKHGTFTCASEYTGNYQCGHYKHITSKETLYCIDGALLTKSSEYKGPITDVFYKENSYTTTIKPVTYKLDGVVCTEIDPKLDNYYKKDNSYFTEQPIDLVPNQPYPNASFDNFKFVCDNIKFADDLNQLTGYKKPASRELKVTFFPDLNGDVVAIDYKHYTPSFKKGAKLLHKPIVWHVNNATNKATYKPNTWCIRCLWSTKPVETSNSFDVLKSEDAQGMDNLACEDLKPVSEEVVENPTIQKDVLECNVKTTEVVGDIILKPANNSLKITEEVGHTDLMAAYVDNSSLTIKKPNELSRVLGLKTLATHGLAAVNSVPWDTIANYAKPFLNKVVSTTTNIVTRCLNRVCTNYMPYFFTLLLQLCTFTRSTNSRIKASMPTTIAKNTVKSVGKFCLEASFNYLKSPNFSKLINIIIWFLLLSVCLGSLIYSTAALGVLMSNLGMPSYCTGYREGYLNSTNVTIATYCTGSIPCSVCLSGLDSLDTYPSLETIQITISSFKWDLTAFGLVAEWFLAYILFTRFFYVLGLAAIMQLFFSYFAVHFISNSWLMWLIINLVQMAPISAMVRMYIFFASFYYVWKSYVHVVDGCNSSTCMMCYKRNRATRVECTTIVNGVRRSFYVYANGGKGFCKLHNWNCVNCDTFCAGSTFISDEVARDLSLQFKRPINPTDQSSYIVDSVTVKNGSIHLYFDKAGQKTYERHSLSHFVNLDNLRANNTKGSLPINVIVFDGKSKCEESSAKSASVYYSQLMCQPILLLDQALVSDVGDSAEVAVKMFDAYVNTFSSTFNVPMEKLKTLVATAEAELAKNVSLDNVLSTFISAARQGFVDSDVETKDVVECLKLSHQSDIEVTGDSCNNYMLTYNKVENMTPRDLGACIDCSARHINAQVAKSHNIALIWNVKDFMSLSEQLRKQIRSAAKKNNLPFKLTCATTRQVVNVVTTKIALKGG

SEQ ID NO: 16236 - protein, 1946 aa, Artificial Sequence
  SARS-CoV-2__MT607252.1__non-structural protein 3 (NSP3)
MAPTKVTFGDDTVIEVQGYKSVNITFELDERIDKVLNEKCSAYTVELGTEVNEFACVVADAVIKTLQPVSELLTPLGIDLDEWSMATYYLFDESGEFKLASHMYCSFYPPDEDEEEGDCEEEEFEPSTQYEYGTEDDYQGKPLEFGATSAALQPEEEQEEDWLDDDSQQTVGQQDGSEDNQTTTIQTIVEVQPQLEMELTPVVQTIEVNSFSGYLKLTDNVYIKNADIVEEAKKVKPTVVVNAANVYLKHGGGVAGALNKATNNAMQVESDDYIATNGPLKVGGSCVLSGHNLAKHCLHVVGPNVNKGEDIQLLKSAYENFNQHEVLLAPLLSAGIFGADPIHSLRVCVDTVRTNVYLAVFDKNLYDKLVSSFLEMKSEKQVEQKIAEIPKEEVKPFITESKPSVEQRKQDDKKIKACVEEVTTTLEETKFLTENLLLYIDINGNLHPDSATLVSDIDITFLKKDAPYIVGDVVQEGVLTAVVIPTKKAGGTTEMLAKALRKVPTDNYITTYPGQGLNGYTVEEAKTVLKKCKSAFYILPSIISNEKQEILGTVSWNLREMLAHAEETRKLMPVCVETKAIVSTIQRKYKGIKIQEGVVDYGARFYFYTSKTTVASLINTLNDLNETLVTMPLGYVTHGLNLEEAARYMRSLKVPATVSVSSPDAVTAYNGYLTSSSKTPEEHFIETISLAGSYKDWSYSGQSTQLGIEFLKRGDKSVYYTSNPTTFHLDGEVITFDNLKTLLSLREVRTIKVFTTVDNINLHTQVVDMSMTYGQQFGPTYLDGADVTKIKPHNSHEGKTFYVLPNDDTLRVEAFEYYHTTDPSFLGRYMSALNHTKKWKYPQVNGLTSIKWADNNCYLATALLTLQQIELKFNPPALQDAYYRARAGEAANFCALILAYCNKTVGELGDVRETMSYLFQHANLDSCKRVLNVVCKTCGQQQTTLKGVEAVMYMGTLSYEQFKKGVQISCTCGKQATKYLVQQESPFVMMSAPPAQYELKHGTFTCASEYTGNYQCGHYKHITSKETLYCIDGALLTKSSEYKGPITDVFYKENSYTTTIKPVTYKLDGVVCTEIDPKLDNYYKKDNSYFTEQPIDLVPNQPYPNASFDNFKFVCDNIKFADDLNQLTGYKKPASRELKVTFFPDLNGDVVAIDYKHYTPSFKKGAKLLHKPIVWHVNNATNKATYKPNTWCIRCLWSTKPVETSNSFDVLKSEDAQGMDNLACEDLKPVSEEVVENPTIQKDVLECNVKTTEVVGDIILKPANNSLKITEEVGHTDLMAAYVDNSSLTIKKPNELSRVLGLKTLATHGLAAVNSVPWDTIANYAKPFLNKVVSTTTNIVTRCLNRVCTNYMPYFFTLLLQLCTFTRSTNSRIKASMPTTIAKNTVKSVGKFCLEASFNYLKSPNFSKLINIIIWFLLLSVCLGSLIYSTAALGVLMSNLGMPSYCTGYREGYLNSTNVTIATYCTGSIPCSVCLSGLDSLDTYPSLETIQITISSFKWDLTAFGLVAEWFLAYILFTRFFYVLGLAAIMQLFFSYFAVHFISNSWLMWLIINLVQMAPISAMVRMYIFFASFYYVWKSYVHVVDGCNSSTCMMCYKRNRATRVECTTIVNGVRRSFYVYANGGKGFCKLHNWNCVNCDTFCAGSTFISDEVARDLSLQFKRPINPTDQSSYIVDSVTVKNGSIHLYFDKAGQKTYERHSLSHFVNLDNLRANNTKGSLPINVIVFDGKSKCEESSAKSASVYYSQLMCQPILLLDQALVSDVGDSAEVAVKMFDAYVNTFSSTFNVPMEKLKTLVATAEAELAKNVSLDNVLSTFISAARQGFVDSDVETKDVVECLKLSHQSDIEVTGDSCNNYMLTYNKVENMTPRDLGACIDCSARHINAQVAKSHNIALIWNVKDFMSLSEQLRKQIRSAAKKNNLPFKLTCATTRQVVNVVTTKIALKGG

SEQ ID NO: 16237 - protein, 1946 aa, Artificial Sequence
  SARS-CoV-2__MT607602.1__non-structural protein 3 (NSP3)
MAPTKVTFGDDTVIEVQGYKSVNITFELDERIDKVLNEKCSAYTVELGTEVNEFACVVADAVIKTLQPVSELLTPLGIDLDEWSMATYYLFDESGEFKLASHMYCSFYPPDEDEEEGDCEEEEFEPSTQYEYGTEDDYQGKPLEFGATSAALQPEEEQEEDWLDDDSQQTVGQQDGSEDNQTTTIQTIVEVQPQLEMELTPVVQTIEVNSFSGYLKLTDNVYIKNADIVEEAKKVKPTVVVNAANVYLKHGGGVAGALNKATNNAMQVESDDYIATNGPLKVGGSCVLSGHNLAKHCLHVVGPNVNKGEDIQLLKSAYENFNQHEVLLAPLLSAGIFGADPIHSLRVCVDTVRTNVYLAVFDKNLYDKLVSSFLEMKSEKQVEQKIAEIPKEEVKPFITESKPSVEQRKQDDKKIKACVEEVTTTLEETKFLTENLLLYIDINGNLHPDSATLVSDIDITFLKKDAPYIVGDVVQEGVLTAVVIPTKKAGGTTEMLAKALRKVPTDNYITTYPGQGLNGYTVEEAKTVLKKCKSAFYILPSIISNEKQEILGTVSWNLREMLAHAEETRKLMPVCVETKAIVSTIQRKYKGIKIQEGVVDYGARFYFYTSKTTVASLINTLNDLNETLVTMPLGYVTHGLNLEEAARYMRSLKVPATVSVSSPDAVTAYNGYLTSSSKTPEEHFIETISLAGSYKDWSYSGQSTQLGIEFLKRGDKSVYYTSNPTTFHLDGEVITFDNLKTLLSLREVRTIKVFTTVDNINLHTQVVDMSMTYGQQFGPTYLDGADVTKIKPHNSHEGKTFYVLPNDDTLRVEAFEYYHTTDPSFLGRYMSALNHTKKWKYPQVNGLTSIKWADNNCYLATALLTLQQIELKFNPPALQDAYYRARAGEAANFCALILAYCNKTVGELGDVRETMGYLFQHANLDSCKRVLNVVCKTCGQQQTTLKGVEAVMYMGTLSYEQFKKGVQIPCTCGKQATKYLVQQESPFVMMSAPPAQYELKHGTFTCASEYTGNYQCGHYKHITSKETLYCIDGALLTKSSEYKGPITDVFYKENSYTTTIKPVTYKLDGVVCTEIDPKLDNYYKKDNSYFTEQPIDLVPNQPYPNASFDNFKFVCDNIKFADDLNQLTGYKKPASRELKVTFFPDLNGDVVAIDYKHYTPSFKKGAKLLHKPIVWHVNNATNKATYKPNTWCIRCLWSTKPVETSNSFDVLKSEDAQGMDNLACEDLKPVSEEVVENPTIQKDVLECNVKTTEVVGDIILKPANNSLKITEEVGHTDLMAAYVDNSSLTIKKPNELSRVLGLKTLATHGLAAVNSVPWDTIANYAKPFLNKVVSTTTNIVTRCLNRVCTNYMPYFFTLLLQLCTFTRSTNSRIKASMPTTIAKNTVKSVGKFCLEASFNYLKSPNFSKLINIIIWFLLLSVCLGSLIYSTAALGVLMSNLGMPSYCTGYREGYLNSTNVTIATYCTGSIPCSVCLSGLDSLDTYPSLETIQITISSFKWDLTAFGLVAEWFLAYILFTRFFYVLGLAAIMQLFFSYFAVHFISNSWLMWLIINLVQMAPISAMVRMYIFFASFYYVWKSYVHVVDGCNSSTCMMCYKRNRATRVECTTIVNGVRRSFYVYANGGKGFCKLHNWNCVNCDTFCAGSTFISDEVARDLSLQFKRPINPTDQSSYIVDSVTVKNGSIHLYFDKAGQKTYERHSLSHFVNLDNLRANNTKGSLPINVIVFDGKSKCEESSAKSASVYYSQLMCQPILLLDQALVSDVGDSAEVAVKMFDAYVNTFSSTFNVPMEKLKTLVATAEAELAKNVSLDNVLSTFISAARQGFVDSDVETKDVVECLKLSHQSDIEVTGDSCNNYMLTYNKVENMTPRDLGACIDCSARHINAQVAKSHNIALIWNVKDFMSLSEQLRKQIRSAAKKNNLPFKLTCATTRQVVNVVTTKIALKGG

SEQ ID NO: 16238 - protein, 1946 aa, Artificial Sequence
  SARS-CoV-2__MT607608.1__non-structural protein 3 (NSP3)
MAPTKVTFGDDTVIEVQGYKSVNITFELDERIDKVLNEKCSAYTVELGTEVNEFACVVADAVIKTLQPVSELLTPLGIDLDEWSMATYYLFDESGEFKLASHMYCSFYPPDEDEEEGDCEEEEFEPSTQYEYGTEDDYQGKPLEFGATSAALQPEEEQEEDWLDDDSQQTVGQQDGSEDNQTTTIQTIVEVQPQLEMELTPVVQTIEVNSFSGYLKLTDNVYIKNADIVEEAKKVKPTVVVNAANVYLKHGGGVAGALNKATNNAMQVESDDYIATNGPLKVGGSCVLSGHNLAKHCLHVVGPNVNKGEDIQLLKSAYENFNQHEVLLAPLLSAGIFGADPIHSLRVCVDTVRTNVYLAVFDKNLYDKLVSSFLEMKSEKQVEQKIAEIPKEEVKPFITESKPSVEQRKQDDKKIKACVEEVTTTLEETKFLTENLLLYIDINGNLHPDSATLVSDIDITFLKKDAPYIVGDVVQEGVLTAVVIPTKKAGGTTEMLAKALRKVPTDNYITTYPGQGLNGYTVEEAKTVLKKCKSAFYILPSIISNEKQEILGTVSWNLREMLAHAEETRKLMPVCVETKAIVSTIQRKYKGIKIQEGVVDYGARFYFYTSKTTVASLINTLNDLNETLVTMPLGYVTHGLNLEEAARYMRSLKVPATVSVSSPDAVTAYNGYLTSSSKTPEEHFIETISLAGSYKDWSYSGQSTQLGIEFLKRGDKSVYYTSNPTTFHLDGEVITFDNLKTLLSLREVRTIKVFTTVDNINLHTQVVDMSMTYGQQFGPTYLDGADVTKIKPHNSHEGKTFYVLPNDDTLRVEAFEYYHTTDPSFLGRYMSALNHTKKWKYPQVNGLTSIKWADNNCYLATALLTLQQIELKFNPPALQDAYYRARAGEAANFCALILAYCNKTVGELGDVRETMSYLFQHANLDSCKRVLNVVCKTCGQQQTTLKGVEAVMYMGTLSYEQFKKGVQIPCTCGKQATKYLVQQESPFVMMSAPPAQYELKHGTFTCASEYTGNYQCGHYKHITSKETLYCIDGALLTKSSEYKGPITDVFYKENSYITTIKPVTYKLDGVVCTEIDPKLDNYYKKDNSYFTEQPIDLVPNQPYPNASFDNFKFVCDNIKFADDLNQLTGYKKPASRELKVTFFPDLNGDVVAIDYKHYTPSFKKGAKLLHKPIVWHVNNATNKATYKPNTWCIRCLWSTKPVETSNSFDVLKSEDAQGMDNLACEDLKPVSEEVVENPTIQKDVLECNVKTTEVVGDIILKPANNSLKITEEVGHTDLMAAYVDNSSLTIKKPNELSRVLGLKTLATHGLAAVNSVPWDTIANYAKPFLNKVVSTTTNIVTRCLNRVCTNYMPYFFTLLLQLCTFTRSTNSRIKASMPTTIAKNTVKSVGKFCLEASFNYLKSPNFSKLINIIIWFLLLSVCLGSLIYSTAALGVLMSNLGMPSYCTGYREGYLNSTNVTIATYCTGSIPCSVCLSGLDSLDTYPSLETIQITISSFKWDLTAFGLVAEWFLAYILFTRFFYVLGLAAIMQLFFSYFAVHFISNSWLMWLIINLVQMAPISAMVRMYIFFASFYYVWKSYVHVVDGCNSSTCMMCYKRNRATRVECTTIVNGVRRSFYVYANGGKGFCKLHNWNCVNCDTFCAGSTFISDEVARDLSLQFKRPINPTDQSSYIVDSVTVKNGSIHLYFDKAGQKTYERHSLSHFVNLDNLRANNTKGSLPINVIVFDGKSKCEESSAKSASVYYSQLMCQPILLLDQALVSDVGDSAEVAVKMFDAYVNTFSSTFNVPMEKLKTLVATAEAELAKNVSLDNVLSTFISAARQGFVDSDVETKDVVECLKLSHQSDIEVTGDSCNNYMLTYNKVENMTPRDLGACIDCSARHINAQVAKSHNIALIWNVKDFMSLSEQLRKQIRSAAKKNNLPFKLTCATTRQVVNVVTTKIALKGG

SEQ ID NO: 16239 - protein, 1946 aa, Artificial Sequence
  SARS-CoV-2__MT607614.1__non-structural protein 3 (NSP3)
MAPTKVTFGDDTVIEVQGYKSVNITFELDERIDKVLNEKCSAYTVELGTEVNEFACVVADAVIKTLQPVSELLTPLGIDLDEWSMATYYLFDESGEFKLASHMYCSFYPPDEDEEEGDCEEEEFEPSTQYEYGTEDDYQGKPLEFGATSAALQPEEEQEEDWLDDDSQQTVGQQDGSEDNQTTTIQTIVEVQPQLEMELTPVVQTIEVNSFSGYLKLTDNVYIKNADIVEEAKKVKPTVVVNAANVYLKHGGGVAGALNKATNNAMQVESDDYIATNGPLKVGGSCVLSGHNLAKHCLHVVGPNVNKGEDIQLLKSAYENFNQHEVLLAPLLSAGIFGADPIHSLRVCVDTVRTNVYLAVFDKNLYDKLVSSFLEMKSEKQVEQKIAEIPKEEVKPFITESKPSVEQRKQDDKKIKACVEEVTTTLEETKFLTENLLLYIDINGNLHPDSATLVSDIDITFLKKDAPYIVGDVVQEGVLTAVVIPTKKAGGTTEMLAKALRKVPTDNYITTYPGQGLNGYTVEEAKTVLKKCKSAFYILPSIISNEKQEILGTVSWNLREMLAHAEETRKLMPVCVETKAIVSTIQRKYKGIKIQEGVVDYGARFYFYTSKTTVASLINTLNDLNETLVTMPLGYVTHGLNLEEAARYMRSLKVPATVSVSSPDAVTAYNGYLTSSSKTPEEHFIETISLAGSYKDWSYSGQSTQLGIEFLKRGDKSVYYTSNPTTFHLDGEVTTFDNLKTLLSLREVRTIKVFTTVDNINLHTQVVDMSMTYGQQFGPTYLDGADVTKIKPHNSHEGKTFYVLPNDDTLRVEAFEYYHTTDPSFLGRYMSALNHTKKWKYPQVNGLTSIKWADNNCYLATALLTLQQIELKFNPPALQDAYYRARAGEAANFCALILAYCNKTVGELGDVRETMSYLFQHANLDSCKRVLNVVCKTCGQQQTTLKGVEAVMYMGTLSYEQFKKGVQIPCTCGKQATKYLVQQESPFVMMSAPPAQYELKHGTFTCASEYTGNYQCGHYKHITSKETLYCIDGALLTKSSEYKGPITDVFYKENSYTTTIKPVTYKLDGVVCTEIDPKLDNYYKKDNSYFTEQPIDLVPNQPYPNASFDNFKFVCDNIKFADDLNQLTGYKKPASRELKVTFFPDLNGDVVAIDYKHYTPSFKKGAKLLHKPIVWHVNNATNKATYKPNTWCIRCLWSTKPVETSNSFDVLKSEDAQGMDNLACEDLKPVSEEVVENPTIQKDVLECNVKTTEVVGDIILKPANNSLKITEEVGHTDLMAAYVDNSSLTIKKPNELSRVLGLKTLATHGLAAVNSVPWDTIANYAKPFLNKVVSTTTNIVTRCLNRVCTNYMPYFFTLLLQLCTFTRSTNSRIKASMPTTIAKNTVKSVGKFCLEASFNYLKSPNFSKLINIIIWFLLLSVCLGSLIYSTAALGVLMSNLGMPSYCTGYREGYLNSTNVTIATYCTGSIPCSVCLSGLDSLDTYPSLETIQITISSFKWDLTAFGLVAEWFLAYILFTRFFYVLGLAAIMQLFFSYFAVHFISNSWLMWLIINLVQMAPISAMVRMYIFFASFYYVWKSYVHVVDGCNSSTCMMCYKRNRATRVECTTIVNGVRRSFYVYANGGKGFCKLHNWNCVNCDTFCAGSTFISDEVARDLSLQFKRPINPTDQSSYIVDSVTVKNGSIHLYFDKAGQKTYERHSLSHFVNLDNLRANNTKGSLPINVIVFDGKSKCEESSAKSASVYYSQLMCQPILLLDQALVSDVGDSAEVAVKMFDAYVNTFSSTFNVPMEKLKTLVATAEAELAKNVSLDNVLSTFISAARQGFVDSDVETKDVVECLKLSHQSDIEVTGDSCNNYMLTYNKVENMTPRDLGACIDCSARHINAQVAKSHNIALIWNVKDFMSLSEQLRKQIRSAAKKNNLPFKLTCATTRQVVNVVTTKIALKGG

SEQ ID NO: 16240 - protein, 1946 aa, Artificial Sequence
  SARS-CoV-2__MT609570.1__non-structural protein 3 (NSP3)
MAPTKVTFGDDTVIEVQGYKSVNITFELDERIDKVLNEKCSAYTVELGTEVNEFACVVADAVIKTLQPVSELLTPLGIDLDEWSMATYYLFDESGEFKLASHMYCSFYPPDEDEEEGDCEEEEFEPSTQYEYGTEDDYQGKPLEFGATSAALQPEEEQEEDWLDDDSQQTVGQQDGSEDNQTTTIQTIVEVQPQLEMELTPVVQTIEVNSFSGYLKLTDNVYIKNADIVEEAKKVKPTVVVNAANVYLKHGGGVAGALNKATNNAMQVESDDYIATNGPLKVGGSCVLSGHNLAKHCLHVVGPNVNKGEDIQLLKSAYENFNQHEVLLAPLLSAGVFGADPIHSLRVCVDTVRTNVYLAVFDKNLYDKLVSSFLEMKSEKQVEQKIAEIPKEEVKPFITESKPSVEQRKQDDKKIKACVEEVTTTLEETKFLTENLLLYIDINGNLHPDSATLVSDIDITFLKKDAPYIVGDVVQEGVLTAVVIPTKKAGGTTEMLAKALRKVPTDNYITTYPGQGLNGYTVEEAKTVLKKCKSAFYILPSIISNEKQEILGTVSWNLREMLAHAEETRKLMPVCVETKAIVSTIQRKYKGIKIQEGVVDYGARFYFYTSKTTVASLINTLNDLNETLVTMPLGYVTHGLNLEEAARYMRSLKVPATVSVSSPDAVTAYNGYLTSSSKTPEEHFIETISLAGSYKDWSYSGQSTQLGIEFLKRGDKSVYYTSNPTTFHLDGEVITFDNLKTLLSLREVRTIKVFTTVDNINLHTQVVDMSMTYGQQFGPTYLDGADVTKIKPHNSHEGKTFYVLPNDDTLRVEAFEYYHTTDPSFLGRYMSALNHTKKWKYPQVNGLTSIKWADNNCYLATALLTLQQIELKFNPPALQDAYYRARAGEAANFCALILAYCNKTVGELGDVRETMSYLFQHANLDSCKRVLNVVCKTCGQQQTTLKGVEAVMYMGTLSYEQFKKGVQIPCTCGKQATKYLVQQESPFVMMSAPPAQYELKHGTFTCASEYTGNYQCGHYKHITSKETLYCIDGALLTKSSEYKGPITDVFYKENSYTTTIKPVTYKLDGVVCTEIDPKLDNYYKKDNSYFTEQPIDLVPNQPYPNASFDNFKFVCDNIKFADDLNQLTGYKKPASRELKVTFFPDLNGDVVAIDYKHYTPSFKKGAKLLHKPIVWHVNNATNKATYKPNTWCIRCLWSTKPVETSNSFDVLKSEDAQGMDNLACEDLKPVSEEVVENPTIQKDVLECNVKTTEVVGDIILKPANNSLKITEEVGHTDLMAAYVDNSSLTIKKPNELSRVLGLKTLATHGLAAVNSVPWDTIANYAKPFLNKVVSTTTNIVTRCLNRVCTNYMPYFFTLLLQLCTFTRSTNSRIKASMPTTIAKNTVKSVGKFCLEASFNYLKSPNFSKLINIIIWFLLLSVCLGSLIYSTAALGVLMSNLGMPSYCTGYREGYLNSTNVTIATYCTGSIPCSVCLSGLDSLDTYPSLETIQITISSFKWDLTAFGLVAEWFLAYILFTRFFYVLGLAAIMQLFFSYFAVHFISNSWLMWLIINLVQMAPISAMVRMYIFFASFYYVWKSYVHVVDGCNSSTCMMCYKRNRATRVECTTIVNGVRRSFYVYANGGKGFCKLHNWNCVNCDTFCAGSTFISDEVARDLSLQFKRPINPTDQSSYIVDSVTVKNGSIHLYFDKAGQKTYERHSLSHFVNLDNLRANNTKGSLPINVIVFDGKSKCEESSAKSASVYYSQLMCQPILLLDQALVSDVGDSAEVAVKMFDAYVNTFSSTFNVPMEKLKTLVATAEAELAKNVSLDNVLSTFISAARQGFVDSDVETKDVVECLKLSHQSDIEVTGDSCNNYMLTYNKVENMTPRDLGACIDCSARHINAQVAKSHNIALIWNVKDFMSLSEQLRKQIRSAAKKNNLPFKLTCATTRQVVNVVTTKIALKGG

SEQ ID NO: 16241 - protein, 1946 aa, Artificial Sequence
  SARS-CoV-2__MT609593.1__non-structural protein 3 (NSP3)
MAPTKVTFGDDTVIEVQGYKSVNITFELDERIDKVLNEKCSAYTVELGTEVNEFACVVADAVIKTLQPVSELLTPLGIDLDEWSMATYYLFDESGEFKLASHMYCSFYPPDEDEEEGDCEEEEFEPSTQYEYGTEDDYQGKPLEFGATSAALQPEEEQEEDWLDDDSQQTVGQQDGSEDNQTTTIQTIVEVQPQLEMELTPVVQTIEVNSFSGYLKLTDNVYIKNADIVEEAKKVKPTVVVNAANVYLKHGGGVAGALNKATNNTMQVESDDYIATNGPLKVGGSCVLSGHNLAKHCLHVVGPNVNKGEDIQLLKSAYENFNQHEVLLAPLLSAGIFGADPIHSLRVCVDTVRTNVYLAVFDKNLYDKLVSSFLEMKSEKQVEQKIAEIPKEEVKPFITESKPSVEQRKQDDKKIKACVEEVTTTLEETKFLTENLLLYIDINGNLHPDSATLVSDIDITFLKKDAPYIVGDVVQEGVLTAVVIPTKKAGGTTEMLAKALRKVPTDNYITTYPGQGLNGYTVEEAKTVLKKCKSAFYILPSIISNEKQEILGTVSWNLREMLAHAEETRKLMPVCVETKAIVSTIQRKYKGIKIQEGVVDYGARFYFYTSKTTVASLINTLNDLNETLVTMPLGYVTHGLNLEEAARYMRSLKVPATVSVSSPDAVTAYNGYLTSSSKTPEEHFIETISLAGSYKDWSYSGQSTQLGIEFLKRGDKSVYYTSNPTTFHLDGEVITFDNLKTLLSLREVRTIKVFTTVDNINLHTQVVDMSMTYGQQFGPTYLDGADVTKIKPHNSHEGKTFYVLPNDDTLRVEAFEYYHTTDPSFLGRYMSALNHTKKWKYPQVNGLTSIKWADNNCYLATALLTLQQIELKFNPPALQDAYYRARAGEAANFCALILAYCNKTVGELGDVRETMSYLFQHANLDSCKRVLNVVCKTCGQQQTTLKGVEAVMYMGTLSYEQFKKGVQIPCTCGKQATKYLVQQESPFVMMSAPPAQYELKHGTFTCASEYTGNYQCGHYKHITSKETLYCIDGALLTKSSEYKGPITDVFYKENSYTTTIKPVTYKLDGVVCTEIDPKLDNYYKKDNSYFTEQPIDLVPNQPYPNASFDNFKFVCDNIKFADDLNQLTGYKKPASRELKVTFFPDLNGDVVAIDYKHYTPSFKKGAKLLHKPIVWHVNNATNKATYKPNTWCIRCLWSTKPVETSNSFDVLKSEDAQGMDNLACEDLKPVSEEVVENPTIQKDVLECNVKTTEVVGDIILKPANNSLKITEEVGHTDLMAAYVDNSSLTIKKPNELSRVLGLKTLATHGLAAVNSVPWDTIANYAKPFLNKVVSTTTNIVTRCLNRVCTNYMPYFFTLLLQLCTFTRSTNSRIKASMPTTIAKNTVKSVGKFCLEASFNYLKSPNFSKLINIIIWFLLLSVCLGSLIYSTAALGVLMSNLGMPSYCTGYREGYLNSTNVTIATYCTGSIPCSVCLSGLDSLDTYPSLETIQITISSFKWDLTAFGLVAEWFLAYILFTRFFYVLGLAAIMQLFFSYFAVHFISNSWLMWLIINLVQMAPISAMVRMYIFFASFYYVWKSYVHVVDGCNSSTCMMCYKRNRATRVECTTIVNGVRRSFYVYANGGKGFCKLHNWNCVNCDTFCAGSTFISDEVARDLSLQFKRPINPTDQSSYIVDSVTVKNGSIHLYFDKAGQKTYERHSLSHFVNLDNLRANNTKGSLPINVIVFDGKSKCEESSAKSASVYYSQLMCQPILLLDQALVSDVGDSAEVAVKMFDAYVNTFSSTFNVPMEKLKTLVATAEAELAKNVSLDNVLSTFISAARQGFVDSDVETKDVVECLKLSHQSDIEVTGDSCNNYMLTYNKVENMTPRDLGACIDCSARHINAQVAKSHNIALIWNVKDFMSLSEQLRKQIRSAAKKNNLPFKLTCATTRQVVNVVTTKIALKGG

SEQ ID NO: 16242 - protein, 1946 aa, Artificial Sequence
  SARS-CoV-2__MT609599.1__non-structural protein 3 (NSP3)
MAPTKVTFGDDTVIEVQGYKSVNITFELDERIDKVLNEKCSAYTVELGTEVNEFACVVADAVIKTLQPVSELLTPLGIDLDEWSMATYYLFDESGEFKLASHMYCSFYPPDEDEEEGDCEEEEFEPSTQYEYGTEDDYQGKPLEFGATSAALQPEEEQEEDWLDDDSQQTVGQQDGSEDNQTTTIQTIVEVQPQLEMELTPVVQTIEVNSFSGYLKLTDNVYIKNADIVEEAKKVKPTVVVNAANVYLKHGGGVAGALNKATNNAMQVESDDYIATNGPLKVGGSCVLSGHNLAKHCLHVVGPNVNKGEDIQLLKSAYENFNQHEVLLAPLLSAGIFGADPIHSLRVCVDTVRTNVYLAVFDKNLYDKLVSSFLEMKSEKQVEQKIAEIPKEEVKPFITESKPSVEQRKQDDKKIKACVEEVTTTLEETKFLTENLLLYIDINGNLHPDSATLVSDIDITFLKKDAPYIVGDVVQEGVLTAVVIPTKKAGGTTEMLAKALRKVPTDNYITTYPGQGLNGYTVEEAKTVLKKCKSAFYILPSIISNEKQEILGTVSWNLREMLAHAEETRKLMPVCVETKAIVSTIQRKYKGIKIQEGVVDYGARFYFYTSKTTVASLINTLNDLNETLVTMPLGYVTHGLNLEEAARYMRSLKVPATVSVSSPDAVTAYNGYLTSSSKTPEEHFIETISLAGSYKDWSYSGQSTQLGIEFLKRGDKSVYYTSNPTTFHLDGEVITFDNLKTLLSLREVRTIKVFTTVDNINLHTQVVDMSMTYGQQFGPTYLDGADVTKIKPHNSHEGKTFYVLPNDDTLRVEAFEYYHTTDPSFLGRYMSALNHTKKWKYPQVNGLTSIKWADNNCYLATALLTLQQIELKFNPPALQDAYYRARAGEAANFCALILAYCNKTVGELGDVRETMSYLFQHANLDSCKRVLNVVCKTCGQQQTTLKGVEAVMYMGTLSYEQFKKGVQIPCTCGKQATKYLVQQESPFVMMSAPPAQYELKHGTFTCASEYTGNYQCGHYKHITSKETLYCIDGALLTKSSEYKGPITDVFYKENSYTTTIKPVTYKLDGVVCTEIDPKLDNYYKKDNSYFTEQPIDLVPNQPYPNASFDNFKFVCDNIKFADDLNQLTGYKKPASRELKVTFFPDLNGDVVAIDYKHYTPSFKKGAKLLHKPIVWHVNNATNKATYKPNTWCIRCLWSTKPVETSNSFDVLKSEDAQGMDNLACEDLKPVSEEVVENPTIQKDVLECNVKTTEVVGDIILKPANNILKITEEVGHTDLMAAYVDNSSLTIKKPNELSRVLGLKTLATHGLAAVNSVPWDTIANYAKPFLNKVVSTTTNIVTRCLNRVCTNYMPYFFTLLLQLCTFTRSTNSRIKASMPTTIAKNTVKSVGKFCLEASFNYLKSPNFSKLINIIIWFLLLSVCLGSLIYSTAALGVLMSNLGMPSYCTGYREGYLNSTNVTIATYCTGSIPCSVCLSGLDSLDTYPSLETIQITISSFKWDLTAFGLVAEWFLAYILFTRFFYVLGLAAIMQLFFSYFAVHFISNSWLMWLIINLVQMAPISAMVRMYIFFASFYYVWKSYVHVVDGCNSSTCMMCYKRNRATRVECTTIVNGVRRSFYVYANGGKGFCKLHNWNCVNCDTFCAGSTFISDEVARDLSLQFKRPINPTDQSSYIVDSVTVKNGSIHLYFDKAGQKTYERHSLSHFVNLDNLRANNTKGSLPINVIVFDGKSKCEESSAKSASVYYSQLMCQPILLLDQALVSDVGDSAEVAVKMFDAYVNTFSSTFNVPMEKLKTLVATAEAELAKNVSLDNVLSTFISAARQGFVDSDVETKDVVECLKLSHQSDIEVTGDSCNNYMLTYNKVENMTPRDLGACIDCSARHINAQVAKSHNIALIWNVKDFMSLSEQLRKQIRSAAKKNNLPFKLTCATTRQVVNVVTTKIALKGG

SEQ ID NO: 16243 - protein, 1946 aa, Artificial Sequence
  SARS-CoV-2__MT612115.1__non-structural protein 3 (NSP3)
MAPTKVTFGDDTVIEVQGYKSVNITFELDERIDKVLNEKCSAYTVELGTEVNEFACVVADAVIKTLQPVSELLTPLGIDLDEWSMATYYLFDESGEFKLASHMYCSFYPPDEDEEEGDCEEEEFEPSTQYEYGTEDDYQGKPLEFGATSAALQPEEEQEEDWLDDDSQQTVGQQDGSEDNQTITIQTIVEVQPQLEMELTPVVQTIEVNSFSGYLKLTDNVYIKNADIVEEAKKVKPTVVVNAANVYLKHGGGVAGALNKATNNAMQVESDDYIATNGPLKVGGSCVLSGHNLAKHCLHVVGPNVNKGEDIQLLKSAYENFNQHEVLLAPLLSAGIFGADPIHSLRVCVDTVRTNVYLAVFDKNLYDKLVSSFLEMKSEKQVEQKIAEIPKEEVKPFITESKPSVEQRKQDDKKIKACVEEVTTTLEEIKFLTENLLLYIDINGNLHPDSATLVSDIDITFLKKDAPYIVGDVVQEGVLTAVVIPTKKAGGTTEMLAKALRKVPTDNYITTYPGQGLNGYTVEEAKTVLKKCKSAFYILPSIISNEKQEILGTVSWNLREMLAHAEETRKLMPVCVETKAIVSTIQRKYKGIKIQEGVVDYGARFYFYTSKTTVASLINTLNDLNETLVTMPLGYVTHGLNLEEAARYMRSLKVPATVSVSSPDAVTAYNGYLTSSSKTPEEHFIETISLAGSYKDWSYSGQSTQLGIEFLKRGDKSVYYTSNPTTFHLDGEVITFDNLKTLLSLREVRTIKVFTTVDNINLHTQVVDMSMTYGQQFGPTYLDGADVTKIKPHNSHEGKTFYVLPNDDTLRVEAFEYYHTTDPSFLGRYMSALNHTKKWKYPQVNGLTSIKWADNNCYLATALLTLQQIELKFNPPALQDAYYRARAGEAANFCALILAYCNKTVGELGDVRETMSYLFQHANLDSCKRVLNVVCKTCGQQQTTLKGVEAVMYMGTLSYEQFKKGVQIPCTCGKQATKYLVQQESPFVMMSAPPAQYELKHGTFTCASEYTGNYQCGHYKHITSKETLYCIDGALLTKSSEYKGPITDVFYKENSYTTTIKPVTYKLDGVVCTEIDPKLDNYYKKDNSYFTEQPIDLVPNQPYPNASFDNFKFVCDNIKFADDLNQLTGYKKPASRELKVTFFPDLNGDVVAIDYKHYTPSFKKGAKLLHKPIVWHVNNATNKATYKPNTWCIRCLWSTKPVETSNSFDVLKSEDAQGMDNLACEDLKPVSEEVVENPTIQKDVLECNVKTTEVVGDIILKPANNSLKITEEVGHTDLMAAYVDNSSLTIKKPNELSRVLGLKTLATHGLAAVNSVPWDTIANYAKPFLNKVVSTTTNIVTRCLNRVCTNYMPYFFTLLLQLCTFTRSTNSRIKASMPTTIAKNTVKSVGKFCLEASFNYLKSPNFSKLINIIIWFLLLSVCLGSLIYSTAALGVLMSNLGMPSYCTGYREGYLNSTNVTIATYCTGSIPCSVCLSGLDSLDTYPSLETIQITISSFKWDLTAFGLVAEWFLAYILFTRFFYVLGLAAIMQLFFSYFAVHFISNSWLMWLIINLVQMAPISAMVRMYIFFASFYYVWKSYVHVVDGCNSSTCMMCYKRNRATRVECTTIVNGVRRSFYVYANGGKGFCKLHNWNCVNCDTFCAGSTFISDEVARDLSLQFKRPINPTDQSSYIVDSVTVKNGSIHLYFDKAGQKTYERHSLSHFVNLDNLRANNTKGSLPINVIVFDGKSKCEESSAKSASVYYSQLMCQPILLLDQALVSDVGDSAEVAVKMFDAYVNTFSSTFNVPMEKLKTLVATAEAELAKNVSLDNVLSTFISAARQGFVDSDVETKDVVECLKLSHQSDIEVTGDSCNNYMLTYNKVENMTPRDLGACIDCSARHINAQVAKSHNIALIWNVKDFMSLSEQLRKQIRSAAKKNNLPFKLTCATTRQVVNVVTTKIALKGG

SEQ ID NO: 16244 - protein, 1946 aa, Artificial Sequence
  SARS-CoV-2__MT601281.1__non-structural protein 3 (NSP3)
MAPTKVTFGDDTVIEVQGYKSVNITFELDERIDKVLNEKCSAYTVELGTEVNEFACVVADAVIKTLQPVSELLTPLGIDLDEWSMATYYLFDESGEFKLASHMYCSFYPPDEDEEEGDCEEEEFEPSTQYEYGTEDDYQGKPLEFGATSAALQPEEEQEEDWLDDDSQQTVGQQDGSEDNQTTTIQTIVEVQPQLEMELTPVVQTIEVNSFSGYLKLTDNVYIKNADIVEEAKKVKPTVVVNAANVYLKHGGGVAGALNKATNNAMQVESDDYIATNGPLKVGGSCVLSGHNLAKHCLHVVGPNVNKGEDIQLLKSAYENFNQHEVLLAPLLSAGIFGADPIHSLRVCVDTVRTNVYLAVFDKNLYDKLVSSFLEMKSEKQVEQKIAEIPKEEVKPFITESKPSVEQRKQDDKKIKACVEEVTTTLEETKFLTENLLLYIDINGNLHPDSATLVSDIDITFLKKDAPYIVGDVVQEGVLTAVVIPTKKAGGTTEMLAKALRKVPTDNYITTYPGQGLNGYTVEEAKTVLKKCKSAFYILPSIISNEKQEILGTVSWNLREMLAHAEETRKLMPVCVETKAIVSTIQRKYKGIKIQEGVVDYGSRFYFYTSKTTVASLINTLNDLNETLVTMPLGYVTHGLNLEEAARYMRSLKVPATVSVSSPDAVTAYNGYLTSSSKTPEEHFIETISLAGSYKDWSYSGQSTQLGIEFLKRGDKSVYYTSNPTTFHLDGEVITFDNLKTLLSLREVRTIKVFTTVDNINLHTQVVDMSMTYGQQFGPTYLDGADVTKIKPHNSHEGKTFYVLPNDDTLRVEAFEYYHTTDPSFLGRYMSALNHTKKWKYPQVNGLTSIKWADNNCYLATALLTLQQIELKFNPPALQDAYYRARAGEAANFCALILAYCNKTVGELGDVRETMSYLFQHANLDSCKRVLNVVCKTCGQQQTTLKGVEAVMYMGTLSYEQFKKGVQIPCTCGKQATKYLVQQESPFVMMSAPPAQYELKHGTFTCASEYTGNYQCGHYKHITSKETLYCIDGALLTKSSEYKGPITDVFYKENSYTTTIKPVTYKLDGVVCTEIDPKLDNYYKKDNSYFTEQPIDLVPNQPYPNASFDNFKFVCDNIKFADDLNQLTGYKKPASRELKVTFFPDLNGDVVAIDYKHYTPSFKKGAKLLHKPIVWHVNNATNKATYKPNTWCIRCLWSTKPVETSNSFDVLKSEDAQGMDNLACEDLKPVSEEVVENPTIQKDVLECNVKTTEVVGDIILKPANNSLKITEEVGHTDLMAAYVDNSSLTIKKPNELSRVLGLKTLATHGLAAVNSVPWDTIANYAKPFLNKVVSTTTNIVTRCLNRVCTNYMPYFFTLLLQLCTFTRSTNSRIKASMPTTIAKNTVKSVGKFCLEASFNYLKSPNFSKLINIIIWFLLLSVCLGSLIYSTAALGVLMSNLGMPSYCTGYREGYLNSTNVTIATYCTGSIPCSVCLSGLDSLDTYPSLETIQITISSFKWDLTAFGLVAEWFLAYILFTRFFYVLGLAAIMQLFFSYFAVHFISNSWLMWLIINLVQMAPISAMVRMYIFFASFYYVWKSYVHVVDGCNSSTCMMCYKRNRATRVECTTIVNGVRRSFYVYANGGKGFCKLHNWNCVNCDTFCAGSTFISDEVARDLSLQFKRPINPTDQSSYIVDSVTVKNGSIHLYFDKAGQKTYERHSLSHFVNLDNLRANNTKGSLPINVIVFDGKSKCEESSAKSASVYYSQLMCQPILLLDQALVSDVGDSAEVAVKMFDAYVNTFSSTFNVPMEKLKTLVATAEAELAKNVSLDNVLSTFISAARQGFVDSDVETKDVVECLKLSHQSDIEVTGDSCNNYMLTYNKVENMTPRDLGACIDCSARHINAQVAKSHNIALIWNVKDFMSLSEQLRKQIRSAAKKNNLPFKLTCATTRQVVNVVTTKIALKGG

SEQ ID NO: 16245 - protein, 1946 aa, Artificial Sequence
  SARS-CoV-2__MT601291.1__non-structural protein 3 (NSP3)
MAPTKVTFGDDTVIEVQGYKSVNITFELDERIDKVLNEKCSAYTVELGTEVNEFACVVADAVIKTLQPVSELLTPLGIDLDEWSMATYYLFDESGEFKLASHMYCSFYPPDEDEEEGDCEEEEFEPSTQYEYGTEDDYQGKPLEFGATSAALQPEEEQEEDWLDDDSQQTVGQQDGSEDNQTTTIQTIVEVQPQLEMELTPVVQTIEVNSFSGYLKLTDNVYIKNADIVEEAKKVKPTVVVNAANVYLKHGGGVAGALNKATNNAMQVESDDYIATNGPLKVGGSCVLSGHNLAKHCLHVVGPNVNKGEDIQLLKSAYENFNQHEVLLAPLLSAGIFGADPIHSLRVCVDTVRTNVYLAVFDKNLYDKLVSSFLEMKSEKQVEQKIAEIPKEEVKPFITESKPSVEQRKQDDKKIKACVEEVTTTLEETKFLTENLLLYIDINGNLHSDSATLVSDIDITFLKKDAPYIVGDVVQEGVLTAVVIPTKKAGGTTEMLAKALRKVPTDNYITTYPGQGLNGYTVEEAKTVLKKCKSAFYILPSIISNEKQEILGTVSWNLREMLAHAEETRKLMPVCVETKAIVSTIQRKYKGIKIQEGVVDYGARFYFYTSKTTVASLINTLNDLNETLVTMPLGYVTHGLNLEEAARYMRSLKVPATVSVSSPDAVTAYNGYLTSSSKTPEEHFIETISLAGSYKDWSYSGQSTQLGIEFLKRGDKSVYYTSNPTTFHLDGEVITFDNLKTLLSLREVRTIKVFTTVDNINLHTQVVDMSMTYGQQFGPTYLDGADVTKIKPHNSHEGKTFYVLPNDDTLRVEAFEYYHTTDPSFLGRYMSALNHTKKWKYPQVNGLTSIKWADNNCYLATALLTLQQIELKFNPPALQDAYYRARAGEAANFCALILAYCNKTVGELGDVRETMSYLFQHANLDSCKRVLNVVCKTCGQQQTTLKGVEAVMYMGTLSYEQFKKGVQIPCTCGKQATKYLVQQESPFVMMSAPPAQYELKHGTFTCASEYTGNYQCGHYKHITSKETLYCIDGALLTKSSEYKGPITDVFYKENSYTTTIKPVTYKLDGVVCTEIDPKLDNYYKKDNSYFTEQPIDLVPNQPYPNASFDNFKFVCDNIKFADDLNQLTGYKKPASRELKVTFFPDLNGDVVAIDYKHYTPSFKKGAKLLHKPIVWHVNNATNKATYKPNTWCIRCLWSTKPVETSNSFDVLKSEDAQGMDNLACEDLKPVSEEVVENPTIQKDVLECNVKTTEVVGDIILKPANNSLKITEEVGHTDLMAAYVDNSSLTIKKPNELSRVLGLKTLATHGLAAVNSVPWDTIANYAKPFLNKVVSTTTNIVTRCLNRVCTNYMPYFFTLLLQLCTFTRSTNSRIKASMPTTIAKNTVKSVGKFCLEASFNYLKSPNFSKLINIIIWFLLLSVCLGSLIYSTAALGVLMSNLGMPSYCTGYREGYLNSTNVTIATYCTGSIPCSVCLSGLDSLDTYPSLETIQITISSFKWDLTAFGLVAEWFLAYILFTRFFYVLGLAAIMQLFFSYFAVHFISNSWLMWLIINLVQMAPISAMVRMYIFFASFYYVWKSYVHVVDGCNSSTCMMCYKRNRATRVECTTIVNGVRRSFYVYANGGKGFCKLHNWNCVNCDTFCAGSTFISDEVARDLSLQFKRPINPTDQSSYIVDSVTVKNGSIHLYFDKAGQKTYERHSLSHFVNLDNLRANNTKGSLPINVIVFDGKSKCEESSAKSASVYYSQLMCQPILLLDQALVSDVGDSAEVAVKMFDAYVNTFSSTFNVPMEKLKTLVATAEAELAKNVSLDNVLSTFISAARQGFVDSDVETKDVVECLKLSHQSDIEVTGDSCNNYMLTYNKVENMTPRDLGACIDCSARHINAQVAKSHNIALIWNVKDFMSLSEQLRKQIRSAAKKNNLPFKLTCATTRQVVNVVTTKIALKGG

SEQ ID NO: 16246 - protein, 1946 aa, Artificial Sequence
  SARS-CoV-2__MT601292.1__non-structural protein 3 (NSP3)
MAPTKVTFGDDTVIEVQGYKSVNITFELDERIDKVLNEKCSAYTVELGTEVNEFACVVADAVIKTLQPVSELLTPLGIDLDEWSMATYYLFDESGEFKLASHMYCSFYPPDEDEEEGDCEEEEFEPSTQYEYGTEDDYQGKPLEFGATSAALQPEEEQEEDWLDDDSQQTVGQQDGSEDNQTTTIQTIVEVQPQLEMELTPVVQTIEVNSFSGYLKLTDNVYIKNADIVEEAKKVKPTVVVNAANVYLKHGGGVAGALNKATNNAMQVESDDYIATNGPLKVGGSCVLSGHNLAKHCLHVVGPNVNKGEDIQLLKSAYENFNQHEVLLAPLLSAGIFGADPIHSLRVCVDTVRTNVYLAVFDKNLYDKLVSSFLEMKSEKQVEQKIAEIPKEEVKPFITESKPSVEQRKQDDKKIKACVEEVTTTLEETKFLTENLLLYIDINGNLHPDSATLVSDIDITFLKKDAPYIVGDVVQEGVLTAVVIPTKKAGGTTEMLAKALRKVPTDNYITTYPGQGLNGYTVEEAKTVLKKCKSAFYILPSIISNEKQEILGTVSWNLREMLAHAEETRKLMPVCVETKAIVSTIQRKYKGIKIQEGVVDYGARFYFYTSKTTVASLINTLNDLNETLVTMPLGYVTHGLNLEEAARYMRSLKVPATVSVSSPDAVTAYNGYLTSSSKTPEEHFIETISLAGSYKDWSYSGQSTQLGIEFLKRGDKSVYYTSNPTTFHLDGEVITFDNLKTLLSLREVRTIKVFTTVDNINLHTQVVDMSMTYGQQFGPTYLDGADVTKIKPHNSHEGKTFYVLPNDDTLRVEAFEYYHTTDPSFLGRYMSALNHTKKWKYPQVNGLTSIKWADNNCYLATALLTLQQIELKFNSPALQDAYYRARAGEAANFCALILAYCNKTVGELGDVRETMSYLFQHANLDSCKRVLNVVCKTCGQQQTTLKGVEAVMYMGTLSYEQFKKGVQIPCTCGKQATKYLVQQESPFVMMSAPPAQYELKHGTFTCASEYTGNYQCGHYKHITSKETLYCIDGALLTKSSEYKGPITDVFYKENSYTTTIKPVTYKLDGVVCTEIDPKLDNYYKKDNSYFTEQPIDLVPNQPYPNASFDNFKFVCDNIKFADDLNQLTGYKKPASRELKVTFFPDLNGDVVAIDYKHYTPSFKKGAKLLHKPIVWHVNNATNKATYKPNTWCIRCLWSTKPVETSNSFDVLKSEDAQGMDNLACEDLKPVSEEVVENPTIQKDVLECNVKTTEVVGDIILKPANNSLKITEEVGHTDLMAAYVDNSSLTIKKPNELSRVLGLKTLATHGLAAVNSVPWDTIANYAKPFLNKVVSTTTNIVTRCLNRVCTNYMPYFFTLLLQLCTFTRSTNSRIKASMPTTIAKNTVKSVGKFCLEASFNYLKSPNFSKLINIIIWFLLLSVCLGSLIYSTAALGVLMSNLGMPSYCTGYREGYLNSTNVTIATYCTGSIPCSVCLSGLDSLDTYPSLETIQITISSFKWDLTAFGLVAEWFLAYILFTRFFYVLGLAAIMQLFFSYFAVHFISNSWLMWLIINLVQMAPISAMVRMYIFFASFYYVWKSYVHVVDGCNSSTCMMCYKRNRATRVECTTIVNGVRRSFYVYANGGKGFCKLHNWNCVNCDTFCAGSTFISDEVARDLSLQFKRPINPTDQSSYIVDSVTVKNGSIHLYFDKAGQKTYERHSLSHFVNLDNLRANNTKGSLPINVIVFDGKSKCEESSAKSASVYYSQLMCQPILLLDQALVSDVGDSAEVAVKMFDAYVNTFSSTFNVPMEKLKTLVATAEAELAKNVSLDNVLSTFISAARQGFVDSDVETKDVVECLKLSHQSDIEVTGDSCNNYMLTYNKVENMTPRDLGACIDCSARHINAQVAKSHNIALIWNVKDFMSLSEQLRKQIRSAAKKNNLPFKLTCATTRQVVNVVTTKIALKGG

SEQ ID NO: 16247 - protein, 1946 aa, Artificial Sequence
  SARS-CoV-2__MT584985.1__non-structural protein 3 (NSP3)
MAPTKVTFGDDTVIEVQGYKSVNITFELDERIDKVLNQKCSAYTVELGTEVNEFACVVADAVIKTLQPVSELLTPLGIDLDEWSMATYYLFDESGEFKLASHMYCSFYPPDEDEEEGDCEEEEFEPSTQYEYGTEDDYQGKPLEFGATSAALQPEEEQEEDWLDDDSQQTVGQQDGSEDNQTTTIQTIVEVQPQLEMELTPVVQTIEVNSFSGYLKLTDNVYIKNADIVEEAKKVKPTVVVNAANVYLKHGGGVAGALNKATNNAMQVESDDYIATNGPLKVGGSCVLSGHNLAKHCLHVVGPNVNKGEDIQLLKSAYENFNQHEVLLAPLLSAGIFGADPIHSLRVCVDTVRTNVYLAVFDKNLYDKLVSSFLEMKSEKQVEQKIAEIPKEEVKPFITESKPSVEQRKQDDKKIKACVEEVTTTLEETKFLTENLLLYIDINGNLHPDSATLVSDIDITFLKKDAPYIVGDVVQEGVLTAVVIPTKKAGGTTEMLAKALRKVPTDNYITTYPGQGLNGYTVEEAKTVLKKCKSAFYILPSIISNEKQEILGTVSWNLREMLAHAEETRKLMPVCVETKAIVSTIQRKYKGIKIQEGVVDYGARFYFYTSKTTVASLINTLNDLNETLVTMPLGYVTHGLNLEEAARYMRSLKVPATVSVSSPDAVTAYNGYLTSSSKTPEEHFIETISLAGSYKDWSYSGQSTQLGIEFLKRGDKSVYYTSNPTTFHLDGEVITFDNLKTLLSLREVRTIKVFTTVDNINLHTQVVDMSMTYGQQFGPTYLDGADVTKIKPHNSHEGKTFYVLPNDDTLRVEAFEYYHTTDPSFLGRYMSALNHTKKWKYPQVNGLTSIKWADNNCYLATALLTLQQIELKFNPPALQDAYYRARAGEAANFCALILAYCNKTVGELGDVRETMSYLFQHANLDSCKRVLNVVCKTCGQQQTTLKGVEAVMYMGTLSYEQFKKGVQIPCTCGKQATKYLVQQESPFVMMSAPPAQYELKHGTFTCASEYTGNYQCGHYKHITSKETLYCIDGALLTKSSEYKGLITDVFYKENSYTTTIKPVTYKLDGVVCTEIDPKLDNYYKKDNSYFTEQPIDLVPNQPYPNASFDNFKFVCDNIKFADDLNQLTGYKKPASRELKVTFFPDLNGDVVAIDYKHYTPSFKKGAKLLHKPIVWHVNNATNKATYKPNTWCIRCLWSTKPVETSNSFDVLKSEDAQGMDNLACEDLKPVSEEVVENPTIQKDVLECNVKTTEVVGDIILKPANNSLKITEEVGHTDLMAAYVDNSSLTIKKPNELSRVLGLKTLATHGLAAVNSVPWDTIANYAKPFLNKVVSTTTNIVTRCLNRVCTNYMPYFFTLLLQLCTFTRSTNSRIKASMPTTIAKNTVKSVGKFCLEASFNYLKSPNFSKLINIIIWFLLLSVCLGSLIYSTAALGVLMSNLGMPSYCTGYREGYLNSTNVTIATYCTGSIPCSVCLSGLDSLDTYPSLETIQITISSFKWDLTAFGLVAEWFLAYILFTRFFYVLGLAAIMQLFFSYFAVHFISNSWLMWLIINLVQMAPISAMVRMYIFFASFYYVWKSYVHVVDGCNSSTCMMCYKRNRATRVECTTIVNGVRRSFYVYANGGKGFCKLHNWNCVNCDTFCAGSTFISDEVARDLSLQFKRPINPTDQSSYIVDSVTVKNGSIHLYFDKAGQKTYERHSLSHFVNLDNLRANNTKGSLPINVIVFDGKSKCEESSAKSASVYYSQLMCQPILLLDQALVSDVGDSAEVAVKMFDAYVNTFSSTFNVPMEKLKTLVATAEAELAKNVSLDNVLSTFISAARQGFVDSDVETKDVVECLKLSHQSDIEVTGDSCNNYMLTYNKVENMTPRDLGACIDCSARHINAQVAKSHNIALIWNVKDFMSLSEQLRKQIRSAAKKNNLPFKLTCATTRQVVNVVTTKIALKGG

SEQ ID NO: 16248 - protein, 1946 aa, Artificial Sequence
  SARS-CoV-2__MT585059.1__non-structural protein 3 (NSP3)
MAPTKVTFGDDTVIEVQGYKSVNITFELDERIDKVLNEKCSAYTVELGTEVNEFACVVADAVIKTLQPVSELLTPLGIDLDEWSMATYYLFDESGEFKLASHMYCSFYPPDEDEEEGDCEEEEFEPSTQYEYGTEDDYQGKPLEFGATSAALQPEEEQEEDWLDDDSQQTVGQQDGSEDNQTTTIQTIVEVQPQLEMELTPVVQTIEVNSFSGYLKLTDNVYIKNADIVEEAKKVKPTVVVNAANVYLKHGGGVAGALNKATNNAMQVESDDYIATNGPLKVGGSCVLSGHNLAKHCLHVVGPNVNKGEDIQLLKSAYENFNQHEVLLAPLLSAGIFGADPIHSLRVCVDTVRTNVYLAVFDKNLYDKLVSSFLEMKSEKQVEQKIAEIPKEEVKPFITESKPSVEQRKQDDKKIKACVEEVTTTLEETKFLTENLLLYIDINGNLHPDSATLVSDIDITFLKKDAPYIVGDVVQEGVLTAVVIPTKKAGGTTEMLAKALRKVPTDNYITTYPGQGLNGYTVEEAKTVLKKCKSAFYILPSIISNEKQEILGTVSWNLREMLAHAEETRKLMPVCVETKAIVSTIQHKYKGIKIQEGVVDYGARFYFYTSKTTVASLINTLNDLNETLVTMPLGYVTHGLNLEEAARYMRSLKVPATVSVSSPDAVTAYNGYLTSSSKTPEEHFIETISLAGSYKDWSYSGQSTQLGIEFLKRGDKSVYYTSNPTTFHLDGEVITFDNLKTLLSLREVRTIKVFTTVDNINLHTQVVDMSMTYGQQFGPTYLDGADVTKIKPHNSHEGKTFYVLPNDDTLRVEAFEYYHTTDPSFLGRYMSALNHTKKWKYPQVNGLTSIKWADNNCYLATALLTLQQIELKFNPPALQDAYYRARAGEAANFCALILAYCNKTVGELGDVRETMSYLFQHANLDSCKRVLNVVCKTCGQQQTTLKGVEAVMYMGTLSYEQFKKGVQIPCTCGKQATKYLVQQESPFVMMSAPPAQYELKHGTFTCASEYTGNYQCGHYKHITSKETLYCIDGALLTKSSEYKGPITDVFYKENSYTTTIKPVTYKLDGVVCTEIDPKLDNYYKKDNSYFTEQPIDLVPNQPYPNASFDNFKFVCDNIKFADDLNQLTGYKKPASRELKVTFFPDLNGDVVAIDYKHYTPSFKKGAKLLHKPIVWHVNNATNKATYKPNTWCIRCLWSTKPVETSNSFDVLKSEDAQGMDNLACEDLKPVSEEVVENPTIQKDVLECNVKTTEVVGDIILKPANNSLKITEEVGHTDLMAAYVDNSSLTIKKPNELSRVLGLKTLATHGLAAVNSVPWDTIANYAKPFLNKVVSTTTNIVTRCLNRVCTNYMPYFFTLLLQLCTFTRSTNSRIKASMPTTIAKNTVKSVGKFCLEASFNYLKSPNFSKLINIIIWFLLLSVCLGSLIYSTAALGVLMSNLGMPSYCTGYREGYLNSTNVTIATYCTGSIPCSVCLSGLDSLDTYPSLETIQITISSFKWDLTAFGLVAEWFLAYILFTRFFYVLGLAAIMQLFFSYFAVHFISNSWLMWLIINLVQMAPISAMVRMYIFFASFYYVWKSYVHVVDGCNSSTCMMCYKRNRATRVECTTIVNGVRRSFYVYANGGKGFCKLHNWNCVNCDTFCAGSTFISDEVARDLSLQFKRPINPTDQSSYIVDSVTVKNGSIHLYFDKAGQKTYERHSLSHFVNLDNLRANNTKGSLPINVIVFDGKSKCEESSAKSASVYYSQLMCQPILLLDQALVSDVGDSAEVAVKMFDAYVNTFSSTFNVPMEKLKTLVATAEAELAKNVSLDNVLSTFISAARQGFVDSDVETKDVVECLKLSHQSDIEVTGDSCNNYMLTYNKVENMTPRDLGACIDCSARHINAQVAKSHNIALIWNVKDFMSLSEQLRKQIRSAAKKNNLPFKLTCATTRQVVNVVTTKIALKGG

SEQ ID NO: 16249 - protein, 1946 aa, Artificial Sequence
  SARS-CoV-2__MT585090.1__non-structural protein 3 (NSP3)
MAPTKVTFGDDTVIEVQGYKSVNITFELDERIDKVLNEKCSAYTVELGTEVNEFACVVADAVIKTLQPVSELLTPLGIDLDEWSMATYYLFDESGEFKLASHMYCSFYPPDEDEEEGDCEEEEFEPSTQYEYGTEDDYQGKPLEFGATSAALQPEEEQEEDWLDDDSQQTVGQQDGSEDNQTTTIQTIVEVQPQLEMELTPVVQTIEVNSFSGYLKLTDNVYIKNADIVEEAKKVKPTVVVNAANVYLKHGGGVAGALNKATNNAMQVESDDYIATNGPLKVGGSCVLSGHNLAKHCLHVVGPNVNKGEDIQLLKSAYENFNQHEVLLAPLLSAGIFGADPIHSLRVCVDTVRTNVYLAVFDKNLYDKLVSSFLEMKSEKQVEQKIAEIPKEEVKPFITESKPSVEQRKQDDKKIKACVEEVTTTLEETKFLTENLLLYIDINGNLHPDSATLVSDIDITFLKKDAPYIVGDVVQEGVLTAVVIPTKKAGGTTEMLAKALRKVPTDNYITTYPGQGLNGYTVEEAKTVLKKCKSAFYILPSIISNEKQEILGTVSWNLREMLAHAEETRKLMPVCVETKAIVSTIQRKYKGIKIQEGVVDYGARFYFYTSKTTVASLINTLNDLNETLVTMPLGYVTHGLNLEEAARYMRSLKVPATVSVSSPDAVTAYNGYLTSSSKTPEEHFIETISLAGSYKDWSYSGQSTQLGIEFLKRGDKSVYYTSNPTTFHLDGEVITFDNLKTLLSLREVRTIKVFTTVDNINLHTQVVDMSMTYGQQFGPTYLDGADVTKIKPHNSHEGKTFYVLPNDDTLRVEAFEYYHTTDPSFLGRYMSALNHTKKWKYPQVNGLTSIKWADNNCYLATALLTLQQIELKFNPPALQDAYYRARAGEAANFCALILAYCNKTVGELGDVRETMSYLFQHANLDSCKRVLNVVCKTCGQQQTTLKGVEAVMYMGTLSYEQFKKGVQIPCTCGKQATKYLVQQESPFVMMSAPPAQYELKHGTFTCASEYTGNYQCGHYKHITSKETLYCIDGALLTKSSEYKGPITDVFYKENSYTTTIKPVTYKLDGVVCTEIDPKLDIYYKKDNSYFTEQPIDLVPNQPYPNASFDNFKFVCDNIKFADDLNQLTGYKKPASRELKVTFFPDLNGDVVAIDYKHYTPSFKKGAKLLHKPIVWHVNNATNKATYKPNTWCIRCLWSTKPVETSNSFDVLKSEDAQGMDNLACEDLKPVSEEVVENPTIQKDVLECNVKTTEVVGDIILKPANNSLKITEEVGHTDLMAAYVDNSSLTIKKPNELSRVLGLKTLATHGLAAVNSVPWDTIANYAKPFLNKVVSTTTNIVTRCLNRVCTNYMPYFFTLLLQLCTFTRSTNSRIKASMPTTIAKNTVKSVGKFCLEASFNYLKSPNFSKLINIIIWFLLLSVCLGSLIYSTAALGVLMSNLGMPSYCTGYREGYLNSTNVTIATYCTGSIPCSVCLSGLDSLDTYPSLETIQITISSFKWDLTAFGLVAEWFLAYILFTRFFYVLGLAAIMQLFFSYFAVHFISNSWLMWLIINLVQMAPISAMVRMYIFFASFYYVWKSYVHVVDGCNSSTCMMCYKRNRATRVECTTIVNGVRRSFYVYANGGKGFCKLHNWNCVNCDTFCAGSTFISDEVARDLSLQFKRPINPTDQSSYIVDSVTVKNGSIHLYFDKAGQKTYERHSLSHFVNLDNLRANNTKGSLPINVIVFDGKSKCEESSAKSASVYYSQLMCQPILLLDQALVSDVGDSAEVAVKMFDAYVNTFSSTFNVPMEKLKTLVATAEAELAKNVSLDNVLSTFISAARQGFVDSDVETKDVVECLKLSHQSDIEVTGDSCNNYMLTYNKVENMTPRDLGACIDCSARHINAQVAKSHNIALIWNVKDFMSLSEQLRKQIRSAAKKNNLPFKLTCATTRQVVNVVTTKIALKGG

SEQ ID NO: 16250 - protein, 1946 aa, Artificial Sequence
  SARS-CoV-2__MT479223.1__non-structural protein 3 (NSP3)
MAPTKVTFGDDTVIEVQGYKSVNITFELDERIDKVLNEKCSAYTVELGTEVNEFACVVADAVIKTLQPVSELLTPLGIDLDEWSMATYYLFDESGEFKLASHMYCSFYPPDEDEEEGDCEEEEFEPSTQYEYGTEDDYQGKPLEFGATSAALQPEEEQEEDWLDDDSQQTVGQQDGSEDNQTTTIQTIVEVQPQLEMELTPVVQTIEVNSFSGYLKLTDNVYIKNADIVEEAKKVKPTVVVNAANVYLKHGGGVAGALNKATNNAMQVESDDYIATNGPLKVGGSCVLSGHNLAKHCLHVVGPNVNKGEDIQLLKSAYENFNQHEVLLAPLLSAGIFGADPIHSLRVCVDTVRTNVYLAVFDKNLYDKLVSSFLEMKSEKQVEQKIAEIPKEEVKPFITESKPSVEQRKQDDKKIKACVEEVTTTLEETKFLTENLLLYIDINGNLHPDSATLVSDIDITFLKKDAPYIVGDVVQEGVLTAVVIPTKKAGGTTEMLAKALRKVPTDNYITTYPGQGLNGYTVEEAKTVLKKCKSAFYILPSIISNEKQEILGTVSWNLREMLAHAEETRKLMPVCVETKAIVSTIQRKYKGIKIQEGVVDYGARFYFYTSKTTVASLINTLNDLNETLVTMPLGYVTHGLNLEEAARYMRSLKVPATVSVSSPDAVTAYNGYLTSSSKTPEEHFIETISLAGSYKDWSYSGQSTQLGIEFLKRGDKSVYYTSNPTTFHLDGEVITFDNLKTLLSLREVRTIKVFTTVDNINLHTQVVDMSMTYGQQFGPTYLDGADVTKIKPHNSHEGKTFYVLPNDDTLRVEAFEYYHTTDPSFLGRYMSALNHTKKWKYPQVNGLTSIKWADNNCYLATALLTLQQIELKFNPPALQDAYYRARAGEAANFCALILAYCNKTVGELGDVRETMSYLFQHANLDSCKRVLNVVCKTCGQQQTTLKGVEAVMYMGTLSYEQFKKGVQIPCTCGKQATKYLVQQESPFVMMSAPPAQYELKHGTFTCASEYTGNYQCGHYKHITSKETLYCIDGALLTKSSEYKGPITDVFYKENSYTTTIKPVTYKLDGVVCTEIDPKLDNYYKKDNSYFTEQPIDLVPNQPYPNASFDNFKFVCDNIKFADDLNQLTGYKKPASRELKVTFFPDLNGDVVAIDYKHYTPSFKKGAKLLHKPIVWHVNNATNKATYKPNTWCIRCLWSTKPVETSNSFDVLKSEDAQGMDNLACEDLKPVSEEVVENPTIQKDVLECNVKTTEVVGDIILKPANNSLKITEEVGHTDLMAAYVDNSSLTIKKPNELSRVLGLKTLATHGLAAVNSVPWDTIANYAKPFLNKVVSTTTNIVTRCLNRVCTNYMPYFFTLLLQLCTFTRSTNSRIKASMPTTIAKNTVKSVGKFCLEASFNYLKSPNFSKLINIIIWFLLLSVCLGSLIYSTAALGVLMSNLGMPSYCTGYREGYLNSTNVTIATYCTGSIPCSVCLSGLDSLDTYPSLETIQITISSFKWDLTAFGLVAEWFLAYILFTRFFYVLGLAAIMQLFFSYFAVHFISNSWLMWLIINLVQMAPISAMVRMYIFFASFYYVWKSYVHVVDGCNSSTCMMCYKRNRAIRVECTTIVNGVRRSFYVYANGGKGFCKLHNWNCVNCDTFCAGSTFISDEVARDLSLQFKRPINPTDQSSYIVDSVTVKNGSIHLYFDKAGQKTYERHSLSHFVNLDNLRANNTKGSLPINVIVFDGKSKCEESSAKSASVYYSQLMCQPILLLDQALVSDVGDSAEVAVKMFDAYVNTFSSTFNVPMEKLKTLVATAEAELAKNVSLDNVLSTFISAARQGFVDSDVETKDVVECLKLSHQSDIEVTGDSCNNYMLTYNKVENMTPRDLGACIDCSARHINAQVAKSHNIALIWNVKDFMSLSEQLRKQIRSAAKKNNLPFKLTCATTRQVVNVVTTKIALKGG

SEQ ID NO: 16251 - protein, 1946 aa, Artificial Sequence
  SARS-CoV-2__MT582483.1__non-structural protein 3 (NSP3)
MAPTKVTFGDDTVIEVQGYKSVNITFELDERIDKVLNEKCSAYTVELGTEVNEFACVVTDAVIKTLQPVSELLTPLGIDLDEWSMATYYLFDESGEFKLASHMYCSFYPPDEDEEEGDCEEEEFEPSTQYEYGTEDDYQGKPLEFGATSAALQPEEEQEEDWLDDDSQQTVGQQDGSEDNQTTTIQTIVEVQPQLEMELTPVVQTIEVNSFSGYLKLTDNVYIKNADIVEEAKKVKPTVVVNAANVYLKHGGGVAGALNKATNNAMQVESDDYIATNGPLKVGGSCVLSGHNLAKHCLHVVGPNVNKGEDIQLLKSAYENFNQHEVLLAPLLSAGIFGADPIHSLRVCVDTVRTNVYLAVFDKNLYDKLVSSFLEMKSEKQVEQKIAEIPKEEVKPFITESKPSVEQRKQDDKKIKACVEEVTTTLEETKFLTENLLLYIDINGNLHPDSATLVSDIDITFLKKDAPYIVGDVVQEGVLTAVVIPTKKAGGTTEMLAKALRKVPTDNYITTYPGQGLNGYTVEEAKTVLKKCKSAFYILPSIISNEKQEILGTVSWNLREMLAHAEETRKLMPVCVETKAIVSTIQRKYKGIKIQEGVVDYGARFYFYTSKTTVASLINTLNDLNETLVTMPLGYVTHGLNLEEAARYMRSLKVPATVSVSSPDAVTAYNGYLTSSSKTPEEHFIETISLAGSYKDWSYSGQSTQLGIEFLKRGDKSVYYTSNPTTFHLDGEVITFDNLKTLLSLREVRTIKVFTTVDNINLHTQVVDMSMTYGQQFGPTYLDGADVTKIKPHNSHEGKTFYVLPNDDTLRVEAFEYYHTTDPSFLGRYMSALNHTKKWKYPQVNGLTSIKWADNNCYLATALLTLQQIELKFNPPALQDAYYRARAGEAANFCALILAYCNKTVGELGDVRETMSYLFQHANLDSCKRVLNVVCKTCGQQQTTLKGVEAVMYMGTLSYEQFKKGVQIPCTCGKQATKYLVQQESPFVMMSAPPAQYELKHGTFTCASEYTGNYQCGHYKHITSKETLYCIDGALLTKSSEYKGPITDVFYKENSYTTTIKPVTYKLDGVVCTEIDPKLDNYYKKDNSYFTEQPIDLVPNQPYPNASFDNFKFVCDNIKFADDLNQLTGYKKPASRELKVTFFPDLNGDVVAIDYKHYTPSFKKGAKLLHKPIVWHVNNATNKATYKPNTWCIRCLWSTKPVETSNSFDVLKSEDAQGMDNLACEDLKPVSEEVVENPTIQKDVLECNVKTTEVVGDIILKPANNSLKITEEVGHTDLMAAYVDNSSLTIKKPNELSRVLGLKTLATHGLAAVNSVPWDTIANYAKPFLNKVVSTTTNIVTRCLNRVCTNYMPYFFTLLLQLCTFTRSTNSRIKASMPTTIAKNTVKSVGKFCLEASFNYLKSPNFSKLINIIIWFLLLSVCLGSLIYSTAALGVLMSNLGMPSYCTGYREGYLNSTNVTIATYCTGSIPCSVCLSGLDSLDTYPSLETIQITISSFKWDLTAFGLVAEWFLAYILFTRFFYVLGLAAIMQLFFSYFAVHFISNSWLMWLIINLVQMAPISAMVRMYIFFASFYYVWKSYVHVVDGCNSSTCMMCYKRNRATRVECTTIVNGVRRSFYVYANGGKGFCKLHNWNCVNCDTFCAGSTFISDEVARDLSLQFKRPINPTDQSSYIVDSVTVKNGSIHLYFDKAGQKTYERHSLSHFVNLDNLRANNTKGSLPINVIVFDGKSKCEESSAKSASVYYSQLMCQPILLLDQALVSDVGDSAEVAVKMFDAYVNTFSSTFNVPMEKLKTLVATAEAELAKNVSLDNVLSTFISAARQGFVDSDVETKDVVECLKLSHQSDIEVTGDSCNNYMLTYNKVENMTPRDLGACIDCSARHINAQVAKSHNIALIWNVKDFMSLSEQLRKQIRSAAKKNNLPFKLTCATTRQVVNVVTTKIALKGG

SEQ ID NO: 16252 - protein, 1946 aa, Artificial Sequence
  SARS-CoV-2__MT582496.1__non-structural protein 3 (NSP3)
MAPTKVTFGDDTVIEVQGYKSVNITFELDERIDKVLNEKCSAYTVELGTEVNEFACVVTDAVIKTLQPVSELLTPLGIDLDEWSMATYYLFDESGEFKLASHMYCSFYPPDEDEEEGDCEEEEFEPSTQYEYGTEDDYQGKPLEFGATSAALQPEEEQEEDWLDDDSQQTVGQQDGSEDNQTTTIQTIVEVQPQLEMELTPVVQTIEVNSFSGYLKLTDNVYIKNADIVEEAKKVKPTVVVNAANVYLKHGGGVAGALNKATNNAMQVESDDYIATNGPLKVGGSCVLSGHNLAKHCLHVVGPNVNKGEDIQLLKSAYENFNQHEVLLAPLLSAGIFGADPIHSLRVCVDTVRTNVYLAVFDKNLYDKLVSSFLEMKSEKQVEQKIAEIPKEEVKPFITESKPSVEQRKQDDKKIKACVEEVTTTLEETKFLTENLLLYIDINGNLHPDSATLVSDIDITFLKKDAPYIVGDVVQEGVLTAVVIPTKKAGGTTEMLAKALRKVPTDNYITTYPGQGLNGYTVEEAKTVLKKCKSAFYILPSIISNEKQEILGTVSWNLREMLAHAEETRKLMPVCVETKAIVSTIQRKYKGIKIQEGVVDYGARFYFYTSKTTVASLINTLNDLNETLVTMPLGYVTHGLNLEEAAWYMRSLKVPATVSVSSPDAVTAYNGYLTSSSKTPEEHFIETISLAGSYKDWSYSGQSTQLGIEFLKRGDKSVYYTSNPTTFHLDGEVITFDNLKTLLSLREVRTIKVFTTVDNINLHTQVVDMSMTYGQQFGPTYLDGADVTKIKPHNSHEGKTFYVLPNDDTLRVEAFEYYHTTDPSFLGRYMSALNHTKKWKYPQVNGLTSIKWADNNCYLATALLTLQQIELKFNPPALQDAYYRARAGEAANFCALILAYCNKTVGELGDVRETMSYLFQHANLDSCKRVLNVVCKTCGQQQTTLKGVEAVMYMGTLSYEQFKKGVQIPCTCGKQATKYLVQQESPFVMMSAPPAQYELKHGTFTCASEYTGNYQCGHYKHITSKETLYCIDGALLTKSSEYKGPITDVFYKENSYTTTIKPVTYKLDGVVCTEIDPKLDNYYKKDNSYFTEQPIDLVPNQPYPNASFDNFKFVCDNIKFADDLNQLTGYKKPASRELKVTFFPDLNGDVVAIDYKHYTPSFKKGAKLLHKPIVWHVNNATNKATYKPNTWCIRCLWSTKPVETSNSFDVLKSEDAQGMDNLACEDLKPVSEEVVENPTIQKDVLECNVKTTEVVGDIILKPANNSLKITEEVGHTDLMAAYVDNSSLTIKKPNELSRVLGLKTLATHGLAAVNSVPWDTIANYAKPFLNKVVSTTTNIVTRCLNRVCTNYMPYFFTLLLQLCTFTRSTNSRIKASMPTTIAKNTVKSVGKFCLEASFNYLKSPNFSKLINIIIWFLLLSVCLGSLIYSTAALGVLMSNLGMPSYCTGYREGYLNSTNVTIATYCTGSIPCSVCLSGLDSLDTYPSLETIQITISSFKWDLTAFGLVAEWFLAYILFTRFFYVLGLAAIMQLFFSYFAVHFISNSWLMWLIINLVQMAPISAMVRMYIFFASFYYVWKSYVHVVDGCNSSTCMMCYKRNRATRVECTTIVNGVRRSFYVYANGGKGFCKLHNWNCVNCDTFCAGSTFISDEVARDLSLQFKRPINPTDQSSYIVDSVTVKNGSIHLYFDKAGQKTYERHSLSHFVNLDNLRANNTKGSLPINVIVFDGKSKCEESSAKSASVYYSQLMCQPILLLDQALVSDVGDSAEVAVKMFDAYVNTFSSTFNVPMEKLKTLVATAEAELAKNVSLDNVLSTFISAARQGFVDSDVETKDVVECLKLSHQSDIEVTGDSCNNYMLTYNKVENMTPRDLGACIDCSARHINAQVAKSHNIALIWNVKDFMSLSEQLRKQIRSAAKKNNLPFKLTCATTRQVVNVVTTKIALKGG

SEQ ID NO: 16253 - protein, 1946 aa, Artificial Sequence
  SARS-CoV-2__MT499218.1__non-structural protein 3 (NSP3)
MAPTKVTFGDDTVIEVQGYKSVNITFELDERIDKVLNEKCSAYTVELGTEVNEFACVVADAVIKTLQPVSELLTPLGIDLDEWSMATYYLFDESGEFKLASHMYCSFYPPDEDEEEGDCEEEEFEPSTQYEYGTEDDYQGKPLEFGATSAALQPEEEQEEDWLDDDSQQTVGQQDGSEDNQTTTIQTIVEVQPQLEMELTPVVQTIEVNSFSGYLKLTDNVYIKNADIVEEAKKVKPTVVVNAANVYLKHGGGVAGALNKATNNAMQVESDDYIATNGPLKVGGSCVLSGHNLAKHCLHVVGPNVNKGEDIQLLKSAYENFNQHEVLLAPLLSAGIFGADPIHSLRVCVDTVRTNVYLAVFDKNLYDKLVSSFLEMKSEKQVEQKIAEIPKEEFKPFITESKPSVEQRKQDDKKIKACVEEVTTTLEETKFLTENLLLYIDINGNLHPDSATLVSDIDITFLKKDAPYIVGDVVQEGVLTAVVIPTKKAGGTTEMLAKALRKVPTDNYITTYPGQGLNGYTVEEAKTVLKKCKSAFYILPSIISNEKQEILGTVSWNLREMLAHAEETRKLMPVCVETKAIVSTIQRKYKGIKIQEGVVDYGARFYFYTSKTTVASLINTLNDLNETLVTMPLGYVTHGLNLEEAARYMRSLKVPATVSVSSPDAVTAYNGYLTSSSKTPEEHFIETISLAGSYKDWSYSGQSTQLGIEFLKRGDKSVYYTSNPTTFHLDGEVITFDNLKTLLSLREVRTIKVFTTVDNINLHTQVVDMSMTYGQQFGPTYLDGADVTKIKPHNSHEGKTFYVLPNDDTLRVEAFEYYHTTDPSFLGRYMSALNHTKKWKYPQVNGLTSIKWADNNCYLATALLTLQQIELKFNPPALQDAYYRARAGEAANFCALILAYCNKTVGELGDVRETMSYLFQHANLDSCKRVLNVVCKTCGQQQTTLKGVEAVMYMGTLSYEQFKKGVQIPCTCGKQATKYLVQQESPFVMMSAPPAQYELKHGTFTCASEYTGNYQCGHYKHITSKETLYCIDGALLTKSSEYKGPITDVFYKENSYTTTIKPVTYKLDGVVCTEIDPKLDNYYKKDNSYFTEQPIDLVPNQPYPNASFDNFKFVCDNIKFADDLNQLTGYKKPASRELKVTFFPDLNGDVVAIDYKHYTPSFKKGAKLLHKPIVWHVNNATNKATYKPNTWCIRCLWSTKPVETSNSFDVLKSEDAQGMDNLACEDLKPVSEEVVENPTIQKDVLECNVKTTEVVGDIILKPANNSLKITEEVGHTDLMAAYVDNSSLTIKKPNELSRVLGLKTLATHGLAAVNSVPWDTIANYAKPFLNKVVSTTTNIVTRCLNRVCTNYMPYFFTLLLQLCTFTRSTNSRIKASMPTTIAKNTVKSVGKFCLEASFNYLKSPNFSKLINIIIWFLLLSVCLGSLIYSTAALGVLMSNLGMPSYCTGYREGYLNSTNVTIATYCTGSIPCSVCLSGLDSLDTYPSLETIQITISSFKWDLTAFGLVAEWFLAYILFTRFFYVLGLAAIMQLFFSYFAVHFISNSWLMWLIINLVQMAPISAMVRMYIFFASFYYVWKSYVHVVDGCNSSTCMMCYKRNRATRVECTTIVNGVRRSFYVYANGGKGFCKLHNWNCVNCDTFCAGSTFISDEVARDLSLQFKRPINPTDQSSYIVDSVTVKNGSIHLYFDKAGQKTYERHSLSHFVNLDNLRANNTKGSLPINVIVFDGKSKCEESSAKSASVYYSQLMCQPILLLDQALVSDVGDSAEVAVKMFDAYVNTFSSTFNVPMEKLKTLVATAEAELAKNVSLDNVLSTFISAARQGFVDSDVETKDVVECLKLSHQSDIEVTGDSCNNYMLTYNKVENMTPRDLGACIDCSARHINAQVAKSHNIALIWNVKDFMSLSEQLRKQIRSAAKKNNLPFKLTCATTRQVVNVVTTKIALKGG

SEQ ID NO: 16254 - protein, 1946 aa, Artificial Sequence
  SARS-CoV-2__MT576035.1__non-structural protein 3 (NSP3)
MAPTKVTFGDDTVIEVQGYKSVNITFELDERIDKVLNEKCSAYTVELGTEVNEFACVVADAVIKTLQPVSELLTPLGIDLDEWSMATYYLFDESGEFKLASHMYCSFYPPDEDEEEGDCEEEEFEPSTQYEYGTEDDYQGKPLEFGATSAALQPEEEQEEDWLDDDSQQTVGQQDGSEDNQTTTIQTIVEVQPQLEMELTPVVQTIEVNSFSGYLKLTDNVYIKNADIVEEAKKVKPTVVVNAANVYLKHGGGVAGALNKATNNAMQVESDDYIATNGPLKVGGSCVLSGHNLAKHCLHVVGPNVNKGEDIQLLKSAYENFNQHEVLLAPLLSAGIFGADPIHSLRVCVDTVRTNVYLAVFDKNLYDKLVSSFLEMKSEKQVEQKIAEIPKEEVKPFITESKPSVEQRKQDDKKIKACVEEVTTTLEETKFLTENLLLYIDINGNLHPDSATLVSDIDITFLKKDAPYIVGDVVQEGVLTAVVIPTKKAGGTTEMLAKALRKVPTDNYITTYPGQGLNGYTVEEAKTVLKKCKSAFYILPSIISNEKQEILGTVSWNLREMLAHAEETRKLMPVCVETKAIVSTIQRKYKGIKIQEGVVDYGARFYFYTSKTTVASLINTLNDLNETLVTMPLGYVTHGLNLEEAARYMRSLKVPATVSVSSPDAVTAYNGYLTSSSKTPEEHFIETISLAGSYKDWSYSGQSTQLGIEFLKRGDKSVYYTSNPTTFHLDGEVITFDNLKTLLSLREVRTIKVFTTVDNINLHTQVVDMSITYGQQFGPTYLDGADVTKIKPHNSHEGKTFYVLPNDDTLRVEAFEYYHTTDPSFLGRYMSALNHTKKWKYPQVNGLTSIKWADNNCYLATALLTLQQIELKFNPPALQDAYYRARAGEAANFCALILAYCNKTVGELGDVRETMSYLFQHANLDSCKRVLNVVCKTCGQQQTTLKGVEAVMYMGTLSYEQFKKGVQIPCTCGKQATKYLVQQESPFVMMSAPPAQYELKHGTFTCASEYTGNYQCGHYKHITSKETLYCIDGALLTKSSEYKGPITDVFYKENSYTTTIKPVTYKLDGVVCTEIDPKLDNYYKKDNSYFTEQPIDLVPNQPYPNASFDNFKFVCDNIKFADDLNQLTGYKKPASRELKVTFFPDLNGDVVAIDYKHYTPSFKKGAKLLHKPIVWHVNNATNKATYKPNTWCIRCLWSTKPVETSNSFDVLKSEDAQGMDNLACEDLKPVSEEVVENPTIQKDVLECNVKTTEVVGDIILKPANNSLKITEEVGHTDLMAAYVDNSSLTIKKPNELSRVLGLKTLATHGLAAVNSVPWDTIANYAKPFLNKVVSTTTNIVTRCLNRVCTNYMPYFFTLLLQLCTFTRSTNSRIKASMPTTIAKNTVKSVGKFCLEASFNYLKSPNFSKLINIIIWFLLLSVCLGSLIYSTAALGVLMSNLGMPSYCTGYREGYLNSTNVTIATYCTGSIPCSVCLSGLDSLDTYPSLETIQITISSFKWDLTAFGLVAEWFLAYILFTRFFYVLGLAAIMQLFFSYFAVHFISNSWLMWLIINLVQMAPISAMVRMYIFFASFYYVWKSYVHVVDGCNSSTCMMCYKRNRATRVECTTIVNGVRRSFYVYANGGKGFCKLHNWNCVNCDTFCAGSTFISDEVARDLSLQFKRPINPTDQSSYIVDSVTVKNGSIHLYFDKAGQKTYERHSLSHFVNLDNLRANNTKGSLPINVIVFDGKSKCEESSAKSASVYYSQLMCQPILLLDQALVSDVGDSAEVAVKMFDAYVNTFSSTFNVPMEKLKTLVATAEAELAKNVSLDNVLSTFISAARQGFVDSDVETKDVVECLKLSHQSDIEVTGDSCNNYMLTYNKVENMTPRDLGACIDCSARHINAQVAKSHNIALIWNVKDFMSLSEQLRKQIRSAAKKNNLPFKLTCATTRQVVNVVTTKIALKGG

SEQ ID NO: 16255 - protein, 1946 aa, Artificial Sequence
  SARS-CoV-2__MT576041.1__non-structural protein 3 (NSP3)
MAPTKVTFGDDTVIEVQGYKSVNITFELDERIDKVLNEKCSAYTVELGTEVNEFACVVADAVIKTLQPVSELLTPLGIDLDEWSMATYYLFDESGEFKLASHMYCSFYPPDEDEEEGDCEEEEFEPSTQYEYGTEDDYQGKPLEFGATSAALQPEEEQEEDWLDDDSQQTVGQQDGSEDNQTTTIQTIVEVQPQLEMELTPVVQTIEVNSFSGYLKLTDNVYIKNADIVEEAKKVKPTVVVNAANVYLKHGGGVAGALNKATNNAMQVESDDYIATNGPLKVGGSCVLSGHNLAKHCLHVVGPNVNKGEDIQLLKSAYENFNQHEVLLAPLLSAGIFGADPIHSLRVCVDTVRTNVYLAVFDKNLYDKLVSSFLEMKSEKQVEQKIAEIPKEEVKPFITESKPSVEQRKQDDKKIKACVEEVTTTLEETKFLTENLLLYIDINGNLHPDSTTLVSDIDITFLKKDAPYIVGDVVQEGVLTAVVIPTKKAGGTTEMLAKALRKVPTDNYITTYPGQGLNGYTVEEAKTVLKKCKSAFYILPSIISNEKQEILGTVSWNLREMLAHAEETRKLMPVCVETKAIVSTIQRKYKGIKIQEGVVDYGARFYFYTSKTTVASLINTLNDLNETLVTMPLGYVTHGLNLEEAARYMRSLKVPATVSVSSPDAVTAYNGYLTSSSKTPEEHFIETISLAGSYKDWSYSGQSTQLGIEFLKRGDKSVYYTSNPTTFHLDGEVITFDNLKTLLSLREVRTIKVFTTVDNINLHTQVVDMSMTYGQQFGPTYLDGADVTKIKPHNSHEGKTFYVLPNDDTLRVEAFEYYHTTDPSFLGRYMSALNHTKKWKYPQVNGLTSIKWADNNCYLATALLTLQQIELKFNPPALQDAYYRARAGEAANFCALILAYCNKTVGELGDVRETMSYLFQHANLDSCKRVLNVVCKTCGQQQTTLKGVEAVIYMGTLSYEQFKKGVQIPCTCGKQATKYLVQQESPFVMMSAPPAQYELKHGTFTCASEYTGNYQCGHYKHITSKETLYCIDGALLTKSSEYKGPITDVFYKENSYTTTIKPVTYKLDGVVCTEIDPKLDNYYKKDNSYFTEQPIDLVPNQPYPNASFDNFKFVCDNIKFADDLNQLTGYKKPASRELKVTFFPDLNGDVVAIDYKHYTPSFKKGAKLLHKPIVWHVNNATNKATYKPNTWCIRCLWSTKPVETSNSFDVLKSEDAQGMDNLACEDLKPVSEEVVENPTIQKDVLECNVKTTEVVGDIILKPANNSLKITEEVGHTDLMAAYVDNSSLTIKKPNELSRVLGLKTLATHGLAAVNSVPWDTIANYAKPFLNKVVSTTTNIVTRCLNRVCTNYMPYFFTLLLQLCTFTRSTNSRIKASMPTTIAKNTVKSVGKFCLEASFNYLKSPNFSKLINIIIWFLLLSVCLGSLIYSTAALGVLMSNLGMPSYCTGYREGYLNSTNVTIATYCTGSIPCSVCLSGLDSLDTYPSLETIQITISSFKWDLTAFGLVAEWFLAYILFTRFFYVLGLAAIMQLFFSYFAVHFISNSWLMWLIINLVQMAPISAMVRMYIFFASFYYVWKSYVHVVDGCNSSTCMMCYKRNRATRVECTTIVNGVRRSFYVYANGGKGFCKLHNWNCVNCDTFCAGSTFISDEVARDLSLQFKRPINPTDQSSYIVDSVTVKNGSIHLYFDKAGQKTYERHSLSHFVNLDNLRANNTKGSLPINVIVFDGKSKCEESSAKSASVYYSQLMCQPILLLDQALVSDVGDSAEVAVKMFDAYVNTFSSTFNVPMEKLKTLVATAEAELAKNVSLDNVLSTFISAARQGFVDSDVETKDVVECLKLSHQSDIEVTGDSCNNYMLTYNKVENMTPRDLGACIDCSARHINAQVAKSHNIALIWNVKDFMSLSEQLRKQIRSDAKKNNLPFKLTCATTRQVVNVVTTKIALKGG

SEQ ID NO: 16256 - protein, 1946 aa, Artificial Sequence
  SARS-CoV-2__MT576044.1__non-structural protein 3 (NSP3)
MAPTKVTFGDDTVIEVQGYKSVNITFELDERIDKVLNEKCSAYTVELGTEVNEFACVVADAVIKTLQPVSELLTPLGIDLDEWSMATYYLFDESGEFKLASHMYCSFYPPDEDEEEGDCEEEEFEPSTQYEYGTEDDYQGKPLEFGATSAALQPEEEQEEDWLDDDSQQTVGQQDGSEDNQTTTIQTIVEVQPQLEMELTPVVQTIEVNSFSGYLKLTDNVYIKNADIVEEAKKVKPTVVVNAANVYLKHGGGVAGALNKATNNAMQVESDDYIATNGPLKVGGSCVLSGHNLAKHCLHVVGPNVNKGEDIQLLKSAYENFNQHEVLLAPLLSAGIFGADPIHSLRVCVDTVRTNVYLAVFDKNLYDKLVSSFLEMKSEKQVEQKIAEIPKEEVKPFITESKPSVEQRKQDDKKIKACVEEVTTTLEETKFLTENLLLYIDINGNLHPDSATLVSDIDITFLKKDAPYIVGDVVQEGVLTAVVIPTKKAGGTTEMLAKALRKVPTDNYITTYPGQGLNGYTVEEAKTVLKKCKSAFYILPSIISNEKQEILGTVSWNLREMLAHAEETRKLMPVCVETKAIVSTIQRKYKGIKIQEGVVDYGARFYFYTSKTTVASLINTLNDLNETLVTMPLGYVTHGLNLEEAARYMRSLKVPATVSVSSPDAVTAYNGYLTSSSKTPEEHFIETISLAGSYKDWSYSGQSTQLGIEFLKRGDKSVYYTSNPTTFHLDGEVITFDNLKTLLSLREVRTIKVFTTVDNINLHTQVVDMSMTYGQQFGPTYLDGADVTKIKPHNSHEGKTFYVLPNDDTLRVEAFEYYHTTDPSFLGRYMSALNHTKKWKYPQVNGLTSIKWADNNCYLATALLTLQQIELKFNPPALQDAYYRARAGEAANFCALILAYCNKTVGELGDVRETMSYLFQHANLDSCKRVLNVVCKTCGQQQTTLKGVEAVMYMGTLSYEQFKKGVQIPCTCGKQATKYLVQQESPFVMMSAPPAQYELKHGTFTCASEYTGNYQCGHYKHITSKETLYCIDGALLTKSSEYKGPITDVFYKENSYTTTIKPVTYKLDGVVCTEIDPKLDNYYKKDNSYFTEQPIDLVPNQPYPNASFDNFKFVCDNIKFADDLNQLTGYKKPASRELKVTFFPDLNGDVVAIDYKHYTPSFKKGAKLLHKPIVWHVNNATNKATYKPNTWCIRCLWSTKPVETSNSFDVLKSEDAQGMDNLACEDLKPVSEEVVENPTIQKDVLECNVKTTEVVGDIILKPANNSLKITEEVGHTDLMAAYVDNSSLTIKKPNELSRVLGLKTLATHGLAAVNSVPWDTIANYAKPFLNKVVSTTTNIVTRCLNRVCTNYMPYFFTLLLQLCTFTRSTNSRIKASMPTTIAKNTVKSVGKFCLEASFNYLKSPNFSKLINIIIWFLLLSVCLGSLIYSTAALGVLMSNLGMPSYCTGYREGYLNSTNVTIATYCTGSIPCSVCLSGLDSLDTYPSLETIQITISSFKWDLTAFGVVAEWFLAYILFTRFFYVLGLAAIMQLFFSYFAVHFISNSWLMWLIINLVQMAPISAMVRMYIFFASFYYVWKSYVHVVDGCNSSTCMMCYKRNRATRVECTTIVNGVRRSFYVYANGGKGFCKLHNWNCVNCDTFCAGSTFISDEVARDLSLQFKRPINPTDQSSYIVDSVTVKNGSIHLYFDKAGQKTYERHSLSHFVNLDNLRANNTKGSLPINVIVFDGKSKCEESSAKSASVYYSQLMCQPILLLDQALVSDVGDSAEVAVKMFDAYVNTFSSTFNVPMEKLKTLVATAEAELAKNVSLDNVLSTFISAARQGFVDSDVETKDVVECLKLSHQSDIEVTGDSCNNYMLTYNKVENMTPRDLGACIDCSARHINAQVAKSHNIALIWNVKDFMSLSEQLRKQIRSAAKKNNLPFKLTCATTRQVVNVVTTKIALKGG

SEQ ID NO: 16257 - protein, 1946 aa, Artificial Sequence
  SARS-CoV-2__MT576530.1__non-structural protein 3 (NSP3)
MAPTKVTFGDDTVIEVQGYKSVNITFELDERIDKVLNEKCSAYTVELGTEVNEFACVVADAVIKTLQPVSELLTPLGIDLDEWSMATYYLFDESGEFKLASHMYCSFYPPDEDEEEGDCEEEEFEPSTQYEYGTEDDYQGKPLEFGATSAALQPEEEQEEDWLDDDSQQTVGQQDGSEDNQTTTIQTIVEVQPQLEMELTPVVQTIEVNSFSGYLKLTDNVYIKNADIVEEAKKVKPTVVVNAANVYLKHGGGVAGALNKATNNAMQVESDDYIATNGPLKVGGSCVLSGHNLAKHCLHVVGPNVNKGEDIQLLKSAYENFNQHEVLLAPLLSAGIFGADPIHSLRVCVDTVRTNVYLAVFDKNLYDKLVSSFLEMKSEKQVEQKIAEIPKEEVKPFITESKPSVEQRKQDDKKIKACVEEVTTTLEETKFLTENLLLYIDINGNLHPDSATLVSDIDITFLKKDAPYIVGDVVQEGVLTAVVIPTKKAGGTTEMLAKALRKVPTDNYITTYPGQGLNGYTVEEAKTVLKKCKSAFYILPSIISNEKQEILGTVSWNLREMLAHAEETRKLMPVCVETKAIVSTIQRKYKGIKIQEGVVDYGARFYFYTSKTTVASLINTLNDLNETLVTMPLGYVTHGLNLEEAARYMRSLKVPATVSVSSPDAVTAYNGYLTSSSKTPEEHFIETISLAGSYKDWSYSGQSTQLGIEFLKRGDKSVYYTSNPTTFHLDGEVITFDNLKTLLSLREVRTIKVFTTVDNINLHTQVVDMSMTYGQQFGPTYLDGADVTKIKPHNSHEGKTFYVLPNDDTLRVEAFEYYHTTDPSFLGRYMSALNHTKKWKYPQVNGLTSIKWADNNCYLATALLTLQQIELKFNPPALQDAYYRARAGEAANFCALILAYCNKTVGELGDVRETMSYLFQHANLDSCKRVLNVVCKTCGQQQTTLKGVEAVMYMGTLSYEQFKKGVQIPCTCGKQATKYLVQQESPFVMMSAPPAQYELKHGTFTCASEYTGNYQCGHYKHITSKETLYCIDGALLTKSSEYKGPITDVFYKENSYTTTIKPVTYKLDGVVCTEIDPKLDNYYKKDNSYFTEQPIDLVPNQPYPNASFDNFKFVCDNIKFADDLNQLTGYKKPASRELKVTFFPDLNGDVVAIDYKHYTPSFKKGAKLLHKPIVWHVNNATNKATYKPNTWCIRCLWSTKPVETSNSFDVLKSEDAQGMDNLACEDLKPVSEEVVENPTIQKDVLECNVKTTEVVGDIILKPANNSLKITEEVGHIDLMAAYVDNSSLTIKKPNELSRVLGLKTLATHGLAAVNSVPWDTIANYAKPFLNKVVSTTTNIVTRCLNRVCTNYMPYFFTLLLQLCTFTRSTNSRIKASMPTTIAKNTVKSVGKFCLEASFNYLKSPNFSKLINIIIWFLLLSVCLGSLIYSTAALGVLMSNLGMPSYCTGYREGYLNSTNVTIATYCTGSIPCSVCLSGLDSLDTYPSLETIQITISSFKWDLTAFGLVAEWFLAYILFTRFFYVLGLAAIMQLFFSYFAVHFISNSWLMWLIINLVQMAPISAMVRMYIFFASFYYVWKSYVHVVDGCNSSTCMMCYKRNRATRVECTTIVNGVRRSFYVYANGGKGFCKLHNWNCVNCDTFCAGSTFISDEVARDLSLQFKRPINPTDQSSYIVDSVTVKNGSIHLYFDKAGQKTYERHSLSHFVNLDNLRANNTKGSLPINVIVFDGKSKCEESSAKSASVYYSQLMCQPILLLDQALVSDVGDSAEVAVKMFDAYVNTFSSTFNVPMEKLKTLVATAEAELAKNVSLDNVLSTFISAARQGFVDSDVETKDVVECLKLSHQSDIEVTGDSCNNYMLTYNKVENMTPRDLGACIDCSARHINAQVAKSHNIALIWNVKDFMSLSEQLRKQIRSAAKKNNLPFKLTCATTRQVVNVVTTKIALKGG

SEQ ID NO: 16258 - protein, 1946 aa, Artificial Sequence
  SARS-CoV-2__MT576639.1__non-structural protein 3 (NSP3)
MAPTKVTFGDDTVIEVQGYKSVNITFELDERIDKVLNEKCSAYTVELGTEVNEFACVVADAVIKTLQPVSELLTPLGIDLDEWSMATYYLFDESGEFKLASHMYCSFYPPDEDEEEGDCEEEEFEPSTQYEYGTEDDYQGKPLEFGATSAALQPEEEQEEDWLDDDSQQTVGQQDGSEDNQTTTIQTIVEVQPQLEMELTPVVQTIEVNSFSGYLKLTDNVYIKNADIVEEAKKVKPTVVVNAANVYLKHGGGVAGALNKATNNAMQVESDDYIATNGPLKVGGSCVLSGHNLAKHCLHVVGPNVNKGEDIQLLKSAYENFNQHEVLLAPLLSAGIFGADPIHSLRVCVDTVRTNVYLAVFDKNLYDKLVSSFLEMKSEKQVEQKIAEIPKEEVKPFITESKPSVEQRKQDDKKIKACVEEVTITLEETKFLTENLLLYIDINGNLHPDSATLVSDIDITFLKKDAPYIVGDVVQEGVLTAVVIPTKKAGGTTEMLAKALRKVPTDNYITTYPGQGLNGYTVEEAKTVLKKCKSAFYILPSIISNEKQEILGTVSWNLREMLAHAEETRKLMPVCVETKAIVSTIQRKYKGIKIQEGVVDYGARFYFYTSKITVASLINTLNDLNETLVTMPLGYVTHGLNLEEAARYMRSLKVPATVSVSSPDAVTAYNGYLTSSSKTPEEHFIETISLAGSYKDWSYSGQSTQLGIEFLKRGDKSVYYTSNPTTFHLDGEVITFDNLKTLLSLREVRTIKVFTTVDNINLHTQVVDMSMTYGQQFGPTYLDGADVTKIKPHNSHEGKTFYVLPNDDTLRVEAFEYYHTTDPSFLGRYMSALNHTKKWKYPQVNGLTSIKWADNNCYLATALLTLQQIELKFNPPALQDAYYRARAGEAANFCALILAYCNKTVGELGDVRETMSYLFQHANLDSCKRVLNVVCKTCGQQQTTLKGVEAVMYMGTLSYEQFKKGVQIPCTCGKQATKYLVQQESPFVMMSAPPAQYELKHGTFTCASEYTGNYQCGHYKHITSKETLYCIDGALLTKSSEYKGPITDVFYKENSYTTTIKPVTYKLDGVVCTEIDPKLDNYYKKDNSYFTEQPIDLVPNQPYPNASFDNFKFVCDNIKFADDLNQLTGYKKPASRELKVTFFPDLNGDVVAIDYKHYTPSFKKGAKLLHKPIVWHVNNATNKATYKPNTWCIRCLWSTKPVETSNSFDVLKSEDAQGMDNLACEDLKPVSEEVVENPTIQKDVLECNVKTTEVVGDIILKPANNSLKITEEVGHTDLMAAYVDNSSLTIKKPNELSRVLGLKTLATHGLAAVNSVPWDTIANYAKPFLNKVVSTTTNIVTRCLNRVCTNYMPYFFTLLLQLCTFTRSTNSRIKASMPTTIAKNTVKSVGKFCLEASFNYLKSPNFSKLINIIIWFLLLSVCLGSLIYSTAALGVLMSNLGMPSYCTGYREGYLNSTNVTIATYCTGSIPCSVCLSGLDSLDTYPSLETIQITISSFKWDLTAFGLVAEWFLAYILFTRFFYVLGLAAIMQLFFSYFAVHFISNSWLMWLIINLVQMAPISAMVRMYIFFASFYYVWKSYVHVVDGCNSSTCMMCYKRNRATRVECTTIVNGVRRSFYVYANGGKGFCKLHNWNCVNCDTFCAGSTFISDEVARDLSLQFKRPINPTDQSSYIVDSVTVKNGSIHLYFDKAGQKTYERHSLSHFVNLDNLRANNTKGSLPINVIVFDGKSKCEESSAKSASVYYSQLMCQPILLLDQALVSDVGDSAEVAVKMFDAYVNTFSSTFNVPMEKLKTLVATAEAELAKNVSLDNVLSTFISAARQGFVDSDVETKDVVECLKLSHQSDIEVTGDSCNNYMLTYNKVENMTPRDLGACIDCSARHINAQVAKSHNIALIWNVKDFMSLSEQLRKQIRSAAKKNNLPFKLTCATTRQVVNVVTTKIALKGG

SEQ ID NO: 16259 - protein, 1946 aa, Artificial Sequence
  SARS-CoV-2__MT576641.1__non-structural protein 3 (NSP3)
MAPTKVTFGDDTVIEVQGYKSVNITFELDERIDKVLNEKCSAYTVELGTEVNEFACVVADAVIKTLQPVSELLTPLGIDLDEWSMATYYLFDESGEFKLASHMYCSFYPPDEDEEEGDCEEEEFEPSTQYEYGTEDDYQGKPLEFGATSAALQPEEEQEEDWLDDDSQQTVGQQDGSEDNQTTTIQTIVEVQPQLEMELTPVVQTIEVNSFSGYLKLTDNVYIKNADIVEEAKKVKPTVVVNAANVYLKHGGGVAGALNKATNNAMQVESDDYIATNGPLKVGGSCVLSGHNLAKHCLHVVGPNVNKGEDIQLLKSAYENFNQHEVLLAPLLSAGIFGADPIHSLRVCVDTVRTNVYLAVFDKNLYDKLVSSFLEMKSEKQVEQKIAEIPKEEVKPFITESKPSVEQRKQDDKKIKACVEEVTTTLEETKFLTENLLLYIDINGNLHPDSATLVSDIDITFLKKDAPYIVGDVVQEGVLTAVVIPTKKAGGTTEMLAKALRKVPTDNYITTYPGQGLNGYTVEEAKTVLKKCKSAFYILPSIISNEKQEILGTVSWNLREMLAHAEETRKLMPVCVETKAIVSTIQRKYKGIKIQEGVVDYGARFYFYTSKTTVASLINTLNDLNETLVTMPLGYVTHGLNLEEAARYMRSLKVPATVSVSSPDAVTAYNGYLTSSSKTSEEHFIETISLAGSYKDWSYSGQSTQLGIEFLKRGDKSVYYTSNPTTFHLDGEVITFDNLKTLLSLREVRTIKVFTTVDNINLHTQVVDMSMTYGQQFGPTYLDGADVTKIKPHNSHEGKTFYVLPNDDTLRVEAFEYYHTTDPSFLGRYMSALNHTKKWKYPQVNGLTSIKWADNNCYLATALLTLQQIELKFNPPALQDAYYRARAGEAANFCALILAYCNKTVGELGDVRETMSYLFQHANLDSCKRVLNVVCKTCGQQQTTLKGVEAVMYMGTLSYEQFKKGVQIPCTCGKQATKYLVQQESPFVMMSAPPAQYELKHGTFTCASEYTGNYQCGHYKHITSKETLYCIDGALLTKSSEYKGPITDVFYKENSYTTTIKPVTYKLDGVVCTEIDPKLDNYYKKDNSYFTEQPIDLVPNQPYPNASFDNFKFVCDNIKFADDLNQLTGYKKPASRELKVTFFPDLNGDVVAIDYKHYTPSFKKGAKLLHKPIVWHVNNATNKATYKPNTWCIRCLWSTKPVETSNSFDVLKSEDAQGMDNLACEDLKPVSEEVVENPTIQKDVLECNVKTTEVVGDIILKPANNSLKITEEVGHTDLMAAYVDNSSLTIKKPNELSRVLGLKTLATHGLAAVNSVPWDTIANYAKPFLNKVVSTTTNIVTRCLNRVCTNYMPYFFTLLLQLCTFTRSTNSRIKASMPTTIAKNTVKSVGKFCLEASFNYLKSPNFSKLINIIIWFLLLSVCLGSLIYSTAALGVLMSNLGMPSYCTGYREGYLNSTNVTIATYCTGSIPCSVCLSGLDSLDTYPSLETIQITISSFKWDLTAFGLVAEWFLAYILFTRFFYVLGLAAIMQLFFSYFAVHFISNSWLMWLIINLVQMAPISAMVRMYIFFASFYYVWKSYVHVVDGCNSSTCMMCYKRNRATRVECTTIVNGVRRSFYVYANGGKGFCKLHNWNCVNCDTFCAGSTFISDEVARDLSLQFKRPINPTDQSSYIVDSVTVNNGSIHLYFDKAGQKTYERHSLSHFVNLDNLRANNTKGSLPINVIVFDGKSKCEESSAKSASVYYSQLMCQPILLLDQALVSDVGDSAEVAVKMFDAYVNTFSSTFNVPMEKLKTLVATAEAELAKNVSLDNVLSTFISAARQGFVDSDVETKDVVECLKLSHQSDIEVTGDSCNNYMLTYNKVENMTPRDLGACIDCSARHINAQVAKSHNIALIWNVKDFMSLSEQLRKQIRSAAKKNNLPFKLTCATTRQVVNVVTTKIALKGG

SEQ ID NO: 16260 - protein, 1946 aa, Artificial Sequence
  SARS-CoV-2__MT576689.1__non-structural protein 3 (NSP3)
MAPTKVTFGDDTVIEVQGYRSVNITFELDERIDKVLNEKCSAYTVELGTEVNEFACVVADAVIKTLQPVSELLTPLGIDLDEWSMATYYLFDESGEFKLASHMYCSFYPPDEDEEEGDCEEEEFEPSTQYEYGTEDDYQGKPLEFGATSAALQPEEEQEEDWLDDDSQQTVGQQDGSEDNQTTTIQTIVEVQPQLEMELTPVVQTIEVNSFSGYLKLTDNVYIKNADIVEEAKKVKPTVVVNAANVYLKHGGGVAGALNKATNNAMQVESDDYIATNGPLKVGGSCVLSGHNLAKHCLHVVGPNVNKGEDIQLLKSAYENFNQHEVLLAPLLSAGIFGADPIHSLRVCVDTVRTNVYLAVFDKNLYDKLVSSFLEMKSEKQVEQKIAEIPKEEVKPFITESKPSVEQRKQDDKKIKACVEEVTTTLEETKFLTENLLLYIDINGNLHPDSATLVSDIDITFLKKDAPYIVGDVVQEGVLTAVVIPTKKAGGTTEMLAKALRKVPTDNYITTYPGQGLNGYTVEEAKTVLKKCKSAFYILPSIISNEKQEILGTVSWNLREMLAHAEETRKLMPVCVETKAIVSTIQRKYKGIKIQEGVVDYGARFYFYTSKTTVASLINTLNDLNETLVTMPLGYVTHGLNLEEAARYMRSLKVPATVSVSSPDAVTAYNGYLTSSSKTPEEHFIETISLAGSYKDWSYSGQSTQLGIEFLKRGDKSVYYTSNPTTFHLDGEVITFDNLKTLLSLREVRTIKVFTTVDNINLHTQVVDMSMTYGQQFGPTYLDGADVTKIKPHNSHEGKTFYVLPNDDTLRVEAFEYYHTTDPSFLGRYMSALNHTKKWKYPQVNGLTSIKWADNNCYLATALLTLQQIELKFNPPALQDAYYRARAGEAANFCALILAYCNKTVGELGDVRETMSYLFQHANLDSCKRVLNVVCKTCGQQQTTLKGVEAVMYMGTLSYEQFKKGVQIPCTCGKQATKYLVQQESPFVMMSAPPAQYELKHGTFTCASEYTGNYQCGHYKHITSKETLYCIDGALLTKSSEYKGPITDVFYKENSYTTTIKPVTYKLDGVVCTEIDPKLDNYYKKDNSYFTEQPIDLVPNQPYPNASFDNFKFVCDNIKFADDLNQLTGYKKPASRELKVTFFPDLNGDVVAIDYKHYTPSFKKGAKLLHKPIVWHVNNATNKATYKPNTWCIRCLWSTKPVETSNSFDVLKSEDAQGMDNLACEDLKPVSEEVVENPTIQKDVLECNVKTTEVVGDIILKPANNSLKITEEVGHTDLMAAYVDNSSLTIKKPNELSRVLGLKTLATHGLAAVNSVPWDTIANYAKPFLNKVVSTTTNIVTRCLNRVCTNYMPYFFTLLLQLCTFTRSTNSRIKASMPTTIAKNTVKSVGKFCLEASFNYLKSPNFSKLINIIIWFLLLSVCLGSLIYSTAALGVLMSNLGMPSYCTGYREGYLNSTNVTIATYCTGSIPCSVCLSGLDSLDTYPSLETIQITISSFKWDLTAFGLVAEWFLAYILFTRFFYVLGLAAIMQLFFSYFAVHFISNSWLMWLIINLVQMAPISAMVRMYIFFASFYYVWKSYVHVVDGCNSSTCMMCYKRNRATRVECTTIVNGVRRSFYVYANGGKGFCKLHNWNCVNCDTFCAGSTFISDEVARDLSLQFKRPINPTDQSSYIVDSVTVKNGSIHLYFDKAGQKTYERHSLSHFVNLDNLRANNTKGSLPINVIVFDGKSKCEESSAKSASVYYSQLMCQPILLLDQALVSDVGDSAEVAVKMFDAYVNTFSSTFNVPMEKLKTLVATAEAELAKNVSLDNVLSTFISAARQGFVDSDVETKDVVECLKLSHQSDIEVTGDSCNNYMLTYNKVENMTPRDLGACIDCSARHINAQVAKSHNIALIWNVKDFMSLSEQLRKQIRSAAKKNNLPFKLTCATTRQVVNVVTTKIALKGG

SEQ ID NO: 16261 - protein, 1946 aa, Artificial Sequence
  SARS-CoV-2__MT569474.1__non-structural protein 3 (NSP3)
MAPTKVTFGDDTVIEVQGYKSVNITFELDERIDKVLNEKCSAYTVELGTEVNEFACVVADAVIKTLQPVSELLTPLGIDLDEWSMATYYLFDESGEFKLASHMYCSFYPPDEDEEEGDCEEEEFEPSTQYEYGTEDDYQGKPLEFGATSAALQPEEEQEEDWLDDDSQQTVGQQDGSEDNQTTTIQTIVEVQPQLEMELTPVVQTIEVNSFSGYLKLTDNVYIKNADIVEEAKKVKPTVVVNAANVYLKHGGGVAGALNKATNNAMQVESDDYIATNGPLKVGGSCVLSGHNLAKHCLHVVGPNVNKGEDIQLLKSAYENFNQHEVLLAPLLSAGIFGADPIHSLRVCVDTVRTNVYLAVFDKNLYDKLVSSFLEMKSEKQVEQKIAEIPKEEVKPFITESKPSVEQRKQDDKKIKACVEEVTTTLEETKFLTENLLLYIDINGNLHPDSATLVSDIDITFLKKDAPYIVGDVVQEGVLTAVVIPTKKAGGTTEMLAKALRKVPTDNYITTYPGQGLNGYTVEEAKTVLKKCKSAFYILPSIISNEKQEILGTVSWNLREMLAHAEETRKLMPVCVETKAIVSTIQRKYKGIKIQEGVVDYGARFYFYTSKTTVASLINTLNDLNETLVTMPLGYVTHGLNLEEAARYMRSLKVPATVSVSSPDAVTAYNGYLTSSSKTPEEHFIETISLAGSYKDWSYSGQSTQLGIEFLKRGDKSVYYTSNPTTFHLDGEVITFDNLKTLLSLREVRTIKVFTTVDNINLHTQVVDMSMTYGQQFGPTYLDGADVTKIKPHNSHEGKTFYVLPNDDTLRVEAFEYYHTTDPSFLGRYMSALNHTKKWKYPQVNGLTSIKWADNNCYLATALLTLQQIELKFNPPALQDAYYRARAGEAANFCALILAYCNKTVGELGDVRETMSYLFQHANLDSCKRVLNVVCKTCGQQQTTLKGVEAVMYMGTLSYEQFKKGVQIPCTCGKQATKYLVQQESPFVMMSAPPAQYELKHGTFTCASEYTGNYQCGHYKHITSKETLYCIDGALLTKSSEYKGPITDVFYKENSYTTTIKPVTYKLDGVVCTEIDPKLDNYYKKDNSYFTEQPIDLVPNQPYPNASFDNFKFVCDNIKFADDLNQLTGYKKPASRELKVTFFPDLNGDVVAIDYKHYTPSFKKGAKLLHKPIVWHVNNATNKATYKPNTWCIRCLWSTKPVETSNSFDVLKSEDAQGMDNLACEDLKPVSEEVVENPTIQKDVLECNVKTTEVVGDIILKPANNSLKITEEVGHTDLMAAYVDNSSLTIKKPNELSRVLGLKTLATHGLAAVNSVPWDTIANYAKPFLNKVVSTTTNIVTRCLNRVCTNYMPYFFTLLLQLCTFTRSTNSRIKASMPTTIAKNTVKSVGKFCLEASFNYLKSPNFSKLINIIIWFLLLSVCLGSLIYSTAALGVLMSNLGMPSYCTGYREGYLNSTNVTIATYCTGSIPCSVCLSGLDSLDTYPSLETIQITISSFKWDLTAFGLVAEWFLAYILFTRFFYVLGLAAIMQLFFSYFAVHFISNSWLMWLIINLVQMAPISAMVRMYIFFASFYYVWKSYVHVVDGCNSSTCMMCYKRNRATRVECTTIVNGVRRSFYVYANGGKGFCKLHNWNCVNCDTFCAGSTFISDEVARDLSLQFKRPINPTDQSSYIVDSVIVKNGSIHLYFDKAGQKTYERHSLSHFVNLDNLRANNTKGSLPINVIVFDGKSKCEESSAKSASVYYSQLMCQPILLLDQALVSDVGDSAEVAVKMFDAYVNTFSSTFNVPMEKLKTLVATAEAELAKNVSLDNVLSTFISAARQGFVDSDVETKDVVECLKLSHQSDIEVTGDSCNNYMLTYNKVENMTPRDLGACIDCSARHINAQVAKSHNIALIWNVKDFMSLSEQLRKQIRSAAKKNNLPFKLTCATTRQVVNVVTTKIALKGG

SEQ ID NO: 16262 - protein, 1946 aa, Artificial Sequence
  SARS-CoV-2__MT520189.1__non-structural protein 3 (NSP3)
MAPTKVTFGDDTVIEVQGYKSVNITFELDERIDKVLNEKCSAYTVELGTEVNEFACVVADAVIKTLQPVSELLTPLGIDLDEWSMATYYLFDESGEFKLASHMYCSFYPPDEDEEEGDCEEEEFEPSTQYEYGTEDDYQGKPLEFGATSAALQLEEEQEEDWLDDDSQQTVGQQDGSEDNQTTTIQTIVEVQPQLEMELTPVVQTIEVNSFSGYLKLTDNVYIKNADIVEEAKKVKPTVVVNAANVYLKHGGGVAGALNKATNNAMQVESDDYIATNGPLKVGGSCVLSGHNLAKHCLHVVGPNVNKGEDIQLLKSAYENFNQHEVLLAPLLSAGIFGADPIHSLRVCVDTVRTNVYLAVFDKNLYDKLVSSFLEMKSEKQVEQKIAEIPKEEVKPFITESKPSVEQRKQDDKKIKACVEEVTTTLEETKFLTENLLLYIDINGNLHPDSATLVSDIDITFLKKDAPYIVGDVVQEGVLTAVVIPTKKAGGTTEMLAKALRKVPTDNYITTYPGQGLNGYTVEEAKTVLKKCKSAFYILPSIISNEKQEILGTVSWNLREMLAHAEETRKLMPVCVETKAIVSTIQRKYKGIKIQEGVVDYGARFYFYTSKTTVASLINTLNDLNETLVTMPLGYVTHGLNLEEAARYMRSLKVPATVSVSSPDAVTAYNGYLTSSSKTPEEHFIETISLAGSYKDWSYSGQSTQLGIEFLKRGDKSVYYTSNPTTFHLDGEVITFDNLKTLLSLREVRTIKVFTTVDNINLHTQVVDMSMTYGQQFGPTYLDGADVTKIKPHNSHEGKTFYVLPNDDTLRVEAFEYYHTTDPSFLGRYMSALNHTKKWKYPQVNGLTSIKWADNNCYLATALLTLQQIELKFNPPALQDAYYRARAGEAANFCALILAYCNKTVGELGDVRETMSYLFQHANLDSCKRVLNVVCKTCGQQQTTLKGVEAVMYMGTLSYEQFKKGVQIPCTCGKQATKYLVQQESPFVMMSAPPAQYELKHGTFTCASEYTGNYQCGHYKHIISKETLYCIDGALLTKSSEYKGPITDVFYKENSYTTTIKPVTYKLDGVVCTEIDPKLDNYYKKDNSYFTEQPIDLVPNQPYPNASFDNFKFVCDNIKFADDLNQLTGYKKPASRELKVTFFPDLNGDVVAIDYKHYTPSFKKGAKLLHKPIVWHVNNATNKATYKPNTWCIRCLWSTKPVETSNSFDVLKSEDAQGMDNLACEDLKPVSEEVVENPTIQKDVLECNVKTTEVVGDIILKPANNSLKITEEVGHTDLMAAYVDNSSLTIKKPNELSRVLGLKTLATHGLAAVNSVPWDTIANYAKPFLNKVVSTTTNIVTRCLNRVCTNYMPYFFTLLLQLCTFTRSTNSRIKASMPTTIAKNTVKSVGKFCLEASFNYLKSPNFSKLINIIIWFLLLSVCLGSLIYSTAALGVLMSNLGMPSYCTGYREGYLNSTNVTIATYCTGSIPCSVCLSGLDSLDTYPSLETIQITISSFKWDLTAFGLVAEWFLAYILFTRFFYVLGLAAIMQLFFSYFAVHFISNSWLMWLIINLVQMAPISAMVRMYIFFASFYYVWKSYVHVVDGCNSSTCMMCYKRNRATRVECTTIVNGVRRSFYVYANGGKGFCKLHNWNCVNCDTFCAGSTFISDEVARDLSLQFKRPINPTDQSSYIVDSVTVKNGSIHLYFDKAGQKTYERHSLSHFVNLDNLRANNTKGSLPINVIVFDGKSKCEESSAKSASVYYSQLMCQPILLLDQALVSDVGDSAEVAVKMFDAYVNTFSSTFNVPMEKLKTLVATAEAELAKNVSLDNVLSTFISAARQGFVDSDVETKDVVECLKLSHQSDIEVTGDSCNNYMLTYNKVENMTPRDLGACIDCSARHINAQVAKSHNIALIWNVKDFMSLSEQLRKQIRSAAKKNNLPFKLTCATTRQVVNVVTTKIALKGG

SEQ ID NO: 16263 - protein, 1946 aa, Artificial Sequence
  SARS-CoV-2__MT520208.1__non-structural protein 3 (NSP3)
MAPTKVTFGDDTVIEVQGYKSVNITFELDERIDKVLNEKCSAYTVELGTEVNEFACVVADAVIKTLQPVSELLTPLGIDLDEWSMATYYLFDESGEFKLASHMYCSFYPPDEDEEEGDCEEEEFEPSTQYEYGTEDDYQGKPLEFGATSAALQPEEEQEEDWLDDDSQQTVGQQDGSEDNQTTTIQTIVEVQPQLEMELTPVVQTIEVNSFSGYLKLTDNVYIKNADIVEEAKKVKPTVVVNAANVYLKHGGGVAGALNKATNNAMQVESDDYIATNGPLKVGGSCVLSGHNLAKHCLHVVGPNVNKGEDIQLLKSAYENFNQHEVLLAPLLSAGIFGADPIHSLRVCVDTVRTNVYLAVFDKNLYDKLVSSFLEMKSEKQVEQKIAEIPKDEVKPFITESKPSVEQRKQDDKKIKACVEEVTTTLEETKFLTENLLLYIDINGNLHPDSATLVSDIDITFLKKDAPYIVGDVVQEGVLTAVVIPTKKAGGTTEMLAKALRKVPTDNYITTYPGQGLNGYTVEEAKTVLKKCKSAFYILPSIISNEKQEILGTVSWNLREMLAHAEETRKLMPVCVETKAIVSTIQRKYKGIKIQEGVVDYGARFYFYTSKTTVASLINTLNDLNETLVTMPLGYVTHGLNLEEAARYMRSLKVPATVSVSSPDAVTAYNGYLTSSSKTPEEHFIETISLAGSYKDWSYSGQSTQLGIEFLKRGDKSVYYTSNPTTFHLDGEVITFDNLKTLLSLREVRTIKVFTTVDNINLHTQVVDMSMTYGQQFGPTYLDGADVTKIKPHNSHEGKTFYVLPNDDTLRVEAFEYYHTTDPSFLGRYMSALNHTKKWKYPQVNGLTSIKWADNNCYLATALLTLQQIELKFNPPALQDAYYRARAGEAANFCALILAYCNKTVGELGDVRETMSYLFQHANLDSCKRVLNVVCKTCGQQQTTLKGVEAVMYMGTLSYEQFKKGVQIPCTCGKQATKYLVQQESPFVMMSAPPAQYELKHGTFTCASEYTGNYQCGHYKHITSKETLYCIDGALLTKSSEYKGPITDVFYKENSYTTTIKPVTYKLDGVVCTEIDPKLDNYYKKDNSYFTEQPIDLVPNQPYPNASFDNFKFVCDNIKFADDLNQLTGYKKPASRELKVTFFPDLNGDVVAIDYKHYTPSFKKGAKLLHKPIVWHVNNATNKATYKPNTWCIRCLWSTKPVETSNSFDVLKSEDAQGMDNLACEDLKPVSEEVVENPTIQKDVLECNVKTTEVVGDIILKSANNSLKITEEVGHTDLMAAYVDNSSLTIKKPNELSRVLGLKTLATHGLAAVNSVPWDTIANYAKPFLNKVVSTTTNIVTRCLNRVCTNYMPYFFTLLLQLCTFTRSTNSRIKASMPTTIAKNTVKSVGKFCLEASFNYLKSPNFSKLINIIIWFLLLSVCLGSLIYSTAALGVLMSNLGMPSYCTGYREGYLNSTNVTIATYCTGSIPCSVCLSGLDSLDTYPSLETIQITISSFKWDLTAFGLVAEWFLAYILFTRFFYVLGLAAIMQLFFSYFAVHFISNSWLMWLIINLVQMAPISAMVRMYIFFASFYYVWKSYVHVVDGCNSSTCMMCYKRNRATRVECTTIVNGVRRSFYVYANGGKGFCKLHNWNCVNCDTFCAGSTFISDEVARDLSLQFKRPINPTDQSSYIVDSVTVKNGSIHLYFDKAGQKTYERHSLSHFVNLDNLRANNTKGSLPINVIVFDGKSKCEESSVKSASVYYSQLMCQPILLLDQALVSDVGDSAEVAVKMFDAYVNTFSSTFNVPMEKLKTLVATAEAELAKNVSLDNVLSTFISAARQGFVDSDVETKDVVECLKLSHQSDIEVTGDSCNNYMLTYNKVENMTPRDLGACIDCSARHINAQVAKSHNIALIWNVKDFMSLSEQLRKQIRSAAKKNNLPFKLTCATTRQVVNVVTTKIALKGG

SEQ ID NO: 16264 - protein, 1946 aa, Artificial Sequence
  SARS-CoV-2__MT520254.1__non-structural protein 3 (NSP3)
MAPTKVTFGDDTVIEVQGYKSVNITFELDERIDKVLNEKCSAYTVELGTEVNEFACVVADAVIKTLQPVSELLTPLGIDLDEWSMATYYLFDESGEFKLASHMYCSFYPPDEDEEEGDCEEEEFEPSTQYEYGTEDDYQGKPLEFGATSAALQLEEEQEEDWLDDDSQQTVGQQDGSEDNQTTTIQTIVEVQPQLEMELTPVVQTIEVNSFSGYLKLTDNVYIKNADIVEEAKKVKPTVVVNAANVYLKHGGGVAGALNKATNNAMQVESDDYIATNGPLKVGGSCVLSGHNLAKHCLHVVGPNVNKGEDIQLLKSAYENFNQHEVLLAPLLSAGIFGADPIHSLRVCVDTVRTNVYLAVFDKNLYDKLVSSFLEMKSEKQVEQKIAEIPKEEVKPFITESKPSVEQRKQDDKKIKACVEEVTTTLEETKFLTENLLLYIDINGNLHPDSATLVSDIDITFLKKDAPYIVGDVVQEGVLTAVVIPTKKAGGTTEMLAKALRKVPTDNYITTYPGQGLNGYTVEEAKTVLKKCKSAFYILPSIISNEKQEILGTVSWNLREMLAHAEETRKLMPVCVETKAIVSTIQRKYKGIKIQEGVVDYGARFYFYTSKTTVASLINTLNDLNETLVTMPLGYVTHGLNLEEAARYMRSLKVPATVSVSSPDAVTAYNGYLTSSSKTPEEHFIETISLAGSYKDWSYSGQSTQLGIEFLKRGDKSVYYTSNPTAFHLDGEVITFDNLKTLLSLREVRTIKVFTTVDNINLHTQVVDMSMTYGQQFGPTYLDGADVTKIKPHNSHEGKTFYVLPNDDTLRVEAFEYYHTTDPSFLGRYMSALNHTKKWKYPQVNGLTSIKWADNNCYLATALLTLQQIELKFNPPALQDAYYRARAGEAANFCALILAYCNKTVGELGDVRETMSYLFQHANLDSCKRVLNVVCKTCGQQQTTLKGVEAVMYMGTLSYEQFKKGVQIPCTCGKQATKYLVQQESPFVMMSAPPAQYELKHGTFTCASEYTGNYQCGHYKHITSKETLYCIDGALLTKSSEYKGPITDVFYKENSYTTTIKPVTYKLDGVVCTEIDPKLDNYYKKDNSYFTEQPIDLVPNQPYPNASFDNFKFVCDNIKFADDLNQLTGYKKPASRELKVTFFPDLNGDVVAIDYKHYTPSFKKGAKLLHKPIVWHVNNATNKATYKPNTWCIRCLWSTKPVETSNSFDVLKLEDAQGMDNLACEDLKPVSEEVVENPTIQKDVLECNVKTTEVVGDIILKPANNSLKITEEVGHTDLMAAYVDNSSLTIKKPNELSRVLGLKTLATHGLAAVNSVPWDTIANYAKPFLNKVVSTTTNIVTRCLNRVCTNYMPYFFTLLLQLCTFTRSTNSRIKASMPTTIAKNTVKSVGKFCLEASFNYLKSPNFSKLINIIIWFLLLSVCLGSLIYSTAALGVLMSNLGMPSYCTGYREGYLNSTNVTIATYCTGSIPCSVCLSGLDSLDTYPSLETIQITISSFKWDLTAFGLVAEWFLAYILFTRFFYVLGLAAIMQLFFSYFAVHFISNSWLMWLIINLVQMAPISAMVRMYIFFASFYYVWKSYVHVVDGCNSSTCMMCYKRNRATRVECTTIVNGVRRSFYVYANGGKGFCKLHNWNCVNCDTFCAGSTFISDEVARDLSLQFKRPINPTDQSSYIVDSVTVKNGSIHLYFDKAGQKTYERHSLSHFVNLDNLRANNTKGSLPINVIVFDGKSKCEESSAKSASVYYSQLMCQPILLLDQALVSDVGDSAEVAVKMFDAYVNTFSSTFNVPMEKLKTLVATAEAELAKNVSLDNVLSTFISAARQGFVDSDVETKDVVECLKLSHQSDIEVTGDSCNNYMLTYNKVENMTPRDLGACIDCSARHINAQVAKSHNIALIWNVKDFMSLSEQLRKQIRSAAKKNNLPFKLTCATTRQVVNVVTTKIALKGG

SEQ ID NO: 16265 - protein, 1946 aa, Artificial Sequence
  SARS-CoV-2__MT520255.1__non-structural protein 3 (NSP3)
MAPTKVTFGDDTVIEVQGYKSVNITFELDERIDKVLNEKCSAYTVELGTEVNEFACVVADAVIKTLQPVSELLTPLGIDLDEWSMATYYLFDESGEFKLASHMYCSFYPPDEDEEEGDCEEEEFEPSTQYEYGTEDDYQGKPLEFGATSAALQPEEEQEEDWLDDDSQQTVGQQDGSEDNQTTTIQTIVEVQPQLEMELTPVVQTIEVNSFSGYLKLTDNVYIKNADIVEEAKKVKPTVVVNAANVYLKHGGGVAGALNKATNNAMQVESDDYIATNGPLKVGGSCVLSGHNLAKHCLHVVGPNVNKGEDIQLLKSAYENFNQHEVLLAPLLSAGIFGADPIHSLRVCVDTVRTNVYLAVFDKNLYDKLVSSFLEMKSEKQVEQKIAEIPKEEVKPFITESKPSVEQRKQDDKKIKACVEEVTTTLEETKFLTENLLLYIDINGNLHPDSATLVSDIDITFLKKDAPYIVGDVVQEGVLTAVVIPTKKAGGTTEMLAKALRKVPTDNYITTYPGQGLNGYTVEEAKTVLKKCKSAFYILPSIISNEKQEILGTVSWNLREMLAHAEETRKLMPVCVETKAIVSTIQRKYKGIKIQEGVVDYGARFYFYTSKTTVASLINTLNDLNETLVTMPLGYVTHGLNLEEAARYMRSLKVPATVSVSSPDAVTAYNGYLTSSSKTPEEHFIETISLAGSYKDWSYSGQSTQLGIEFLKRGDKSVYYTSNPTTFHLDGEVITFDNLKTLLSLREVRTIKVFTTVDNINLHTQVVDMSMTYGQQFGPTYLDGADVTKIKPHNSHEGKTFYVLPNDDTLRVEAFEYYHTTDPSFLGRYMSALNHTKKWKYPQVNGLTSIKWADNNCYLATALLTLQQIELKFNPPALQDAYYRARAGEAANFCALILAYCNKTVGELGDVRETMSYLFQHANLDSCKRVLNVVCKTCGQQQTTLKGVEAVMYMGTLSYEQFKKGVQIPCTCGKQATKYLVQQESPFVMMSAPPAQYELKHGTFTCASEYTGNYQCGHYKHITSKETLYCIDGALLTKSSEYKGPITDVFYKENSYTTTIKPVTYKLDGVVCTEIDPKLDNYYKKDNSYFTEQPIDLVPNQPYPNASFDNFKFVCDNTKFADDLNQLTGYKKPASRELKVTFFPDLNGDVVAIDYKHYTPSFKKGAKLLHKPIVWHVNNATNKATYKPNTWCIRCLWSTKPVETSNSFDVLKSEDAQGMDNLACEDLKPVSEEVVENPTIQKDVLECNVKTTEVVGDIILKPANNSLKITEEVGHTDLMAAYVDNSSLTIKKPNELSRVLGLKTLATHGLAAVNSVPWDTIANYAKPFLNKVVSTTTNIVTRCLNRVCTNYMPYFFTLLLQLCTFTRSTNSRIKASMPTTIAKNTVKSVGKFCLEASFNYLKSPNFSKLINIIIWFLLLSVCLGSLIYSTAALGVLMSNLGMPSYCTGYREGYLNSTNVTIATYCTGSIPCSVCLSGLDSLDTYPSLETIQITISSFKWDLTAFGLVAEWFLAYILFTRFFYVLGLAAIMQLFFSYFAVHFISNSWLMWLIINLVQMAPISAMVRMYIFFASFYYVWKSYVHVVDGCNSSTCMMCYKRNRATRVECTTIVNGVRRSFYVYANGGKGFCKLHNWNCVNCDTFCAGSTFISDEVARDLSLQFKRPINPTDQSSYIVDSVTVKNGSIHLYFDKAGQKTYERHSLSHFVNLDNLRANNTKGSLPINVIVFDGKSKCEESSAKSASVYYSQLMCQPILLLDQALVSDVGDSAEVAVKMFDAYVNTFSSTFNVPMEKLKTLVATAEAELAKNVSLDNVLSTFISAARQGFVDSDVETKDVVECLKLSHQSDIEVTGDSCNNYMLTYNKVENMTPRDLGACIDCSARHINAQVAKSHNIALIWNVKDFMSLSEQLRKQIRSAAKKNNLPFKLTCATTRQVVNVVTTKIALKGG

SEQ ID NO: 16266 - protein, 1946 aa, Artificial Sequence
  SARS-CoV-2__MT520265.1__non-structural protein 3 (NSP3)
MAPTKVTFGDDTVIEVQGYKSVNITFELDERIDKVLNEKCSAYTVELGTEVNEFACVVADAVIKTLQPVSELLTPLGIDLDEWSMATYYLFDESGEFKLASHMYCSFYPPDEDEEEGDCEEEEFEPSTQYEYGTEDDYQGKPLEFGATSAALQPEEEQEEDWLDDDSQQTVGQQDGSEDNQTTTIQTIVEVQPQLEMELTPVVQTIEVNSFSGYLKLTDNVYIKNADIVEEAKKVKPTVVVNAANVYLKHGGGVAGALNKATNNAMQVESDDYIATNGPLKVGGSCVLSGHNLAKHCLHVVGPNVNKGEDIQLLKSAYENFNQHEVLLAPLLSAGIFGADPIHSLRVCVDTVRTNVYLAVFDKNLYDKLVSSFLEMKSEKQVEQKIAEIPKEEVKPFITESKPSVEQRKQDDKKIKACVEEVTTTLEETKFLTENLLLYIDINGNLHPDSATLVSDIDITFLKKDAPYIVGDVVQEGVLTAVVIPTKKAGGTTEMLAKALRKVPTDNYITTYPGQGLNGYTVEEAKTVLKKCKSAFYILPSIISNEKQEILGTVSWNLREMLAHAEETRKLMPVCVETKAIVSTIQRKYKGIKIQEGVVDYGARFYFYTSKTTVASLINTLNDLNETLVTMPLGYVTHGLNLEEAARYMRSLKVPATVSVSSPDAVTAYNGYLTSSSKTPEEHFIETISLAGSYKDWSYSGQSTQLGIEFLKRGDKSVYYTSNPTTFHLDGEVITFDNLKTLLSLREVRTIKVFTTVDNINLHTQVVDMSMTYGQQFGPTYLDGADVTKIKPHNSHEGKTFYVLPNDDTLRVEAFEYYHTTDPSFLGRYMSALNHTKKWKYPQVNGLTSIKWADNNCYLATALLTLQQIELKFNPPALQDAYYRARAGEAANFCALILAYCNKTVGELGDVRETMSYLFQHANLDSCKRVLNVVCKTCGQQQTTLKGVEAVMYMGTLSYEQFKKGVQIPCTCGKQATKYLVQQESPFVMMSAPPAQYELKHGTFTCASEYTGNYQCGHYKHITSKETLYCIDGALLTKSSEYKGPITDVFYKENSYTTTIKPVTYKLDGVVCTEIDPKLDNYYKKDNSYFTEQPIDLVPNQPYPNASFDNFKFVCDNIKFADDLNQLTGYKKPASRELKVTFFPDLNGDVVAIDYKHYTPSFKKGAKLLHKPIVWHVNNATNKATYKPNTWCIRCLWSTKPVETSNSFDVLKSEDAQGMDNLACEDLKPVSEEVVENPTIQKDVLECNVKTTEVVGDIILKPANNSLKITEEVGHTDLMAAYVDNSSLTIKKPNELSRVLGLKTLATHGLAAVNSVPWDTIANYAKPFLNKVVSTTTNIVTRCLNRVCTNYMPYFFTLLLQLCTFTRSTNSRIKASMPTTIAKNTVKSVGKFCLEASFNYLKSPNFSKLINIIIWFLLLSVCLGSLIYSTAALGVLMSNLGMPSYCTGYREGYLNSTNVTIATYCTGSIPCSVCLSGLDSLDTYPSLETIQITISSFKWDLTAFGLVAEWFLAYILFTRFFYVLGLAAIMQLFFSYFAVHFISNSWLMWLIINLVQMAPISAMVRMYIFFASFYYVWKSYVHVVDGCNSSTCMMCYKRNRATRVECTTIVNGVRRSFYVYANGGKGFCKLHNWNCVNCDTFCAGSTFISDEVARDLSLQFKRPINPTDQSSYIVDSVTVKNGSIHLYFDKAGQKTYERHSLSHFVNLDNLRANNTKGSLPINVIVFDGKSKCEESSAKSASVYYSQLMCQPILLLDQALVSDVGDSAEVAVKMFDAYVNTFSSTFNVPMEKFKTLVATAEAELAKNVSLDNVLSTFISAARQGFVDSDVETKDVVECLKLSHQSDIEVTGDSCNNYMLTYNKVENMTPRDLGACIDCSARHINAQVAKSHNIALIWNVKDFMSLSEQLRKQIRSAAKKNNLPFKLTCATTRQVVNVVTTKIALKGG

SEQ ID NO: 16267 - protein, 1946 aa, Artificial Sequence
  SARS-CoV-2__MT520343.1__non-structural protein 3 (NSP3)
MAPTKVTFGDDTVIEVQGYKSVNITFELDERIDKVLNEKCSAYTVELGTEVNEFACVVADAVIKTLQPVSELLTPLGIDLDEWSMATYYLFDESGEFKLASHMYCSFYPPDEDEEEGDCEEEEFEPSTQYEYGTEDDYQGKPLEFGATSAALQPEEEQEEDWLDDDSQQTVGQQDGSEDNQTTTIQTIVEVQPQLEMELTPVVQTIEVNSFSGYLKLTDNVYIKNADIVEEAKKVKPTVVVNAANVYLKHGGGVAGALNKATNNAMQVESDDYIATNGPLKVGGSCVLSGHNLAKHCLHVVGPNVNKGEDIQLLKSAYENFNQHEVLLAPLLSAGIFGADPIHSLRVCVDTVRTNVYLAVFDKNLYDKLVSSFLEMKSEKQVEQKIAEIPKEEVKPFITESKPSVEQRKQDDKKIKACVEEVTTTLEETKFLTENLLLYIDINGNLHPDSATLVSDIDITFLKKDAPYIVGDVVQEGVLTAVVIPTKKAGGTTEMLAKALRKVPTDNYITTYPGQGLNGYTVEEAKTVLKKCKSAFYILPSIISNEKQEILGTVSWNLREMLAHAEETRKLMPVCVETKAIVSTIQRKYKGIKIQEGVVDYGARFYFYTSKTTVASLINTLNDLNETLVTMPLGYVTHGLNLEEAARYMRSLKVPATVSVSSPDAVTAYNGYLTSSSKTPEEHFIETISLAGSYKDWSYSGQSTQLGIEFLKRGDKSVYYTSNPTTFHLDGEVITFDNLKTLLSLREVRTIKVFTTVDNINLHTQVVDMSMTYGQQFGPTYLDGADVTKIKPHNSHEGKTFYVLPNDDTLRVEAFEYYHTTDPSFLGRYMSALNHTKKWKYPQVNGLTSIKWADNNCYLATALLTLQQIELKFNPPALQDAYYRARAGEAANFCALILAYCNKTVGELGDVRETMSYLFQHANLDSCKRVLNVVCKTCGQQQTTLKGVEAVMYMGTLSYEQFKKGVQIPCTCGKQATKYLVQQESPFVMMSAPPAQYELKHGTFTCASEYTGNYQCGHYKHITSKETLYCIDGALLTKSSEYKGPITDVFYKENSYTTTIKPVTYKLDGVVCTEIDPKLDNYYKKDNSYFTEQPIDLVPNQPYPNASFDNFKFVCDNIKFADDLNQLTGYKKPASRELKVTFFPDLNGDVVAIDYKHYTPSFKKGAKLLHKPIVWHVNNATNKATYKPNTWCIRCLWSTKPVETSNSFDVLKSEDAQGMDNLACEDLKPVSEEVVENPTIQKDVLECNVKTTEVVGDIILKPANNSLKITEEVGHTDLMAAYVDNSSLTIKKPNELSRVLGLKTLATHGLAAVNSVPWDTIANYAKPFLNKVVSTTTNIVTRCLNRVCTNYMPYFFTLLLQLCTFTRSTNSRIKASMPTTIAKNTVKSVGKFCLEASFNYLKSPNFSKLINIIIWFLLLSVCLGSLIYSTAALGVLMSNLGMPSYCTGYREGYLNSTNVTIATYCTGSIPCGVCLSGLDSLDTYPSLETIQITISSFKWDLTAFGLVAEWFLAYILFTRFFYVLGLAAIMQLFFSYFAVHFISNSWLMWLIINLVQMAPISAMVRMYIFFASFYYVWKSYVHVVDGCNSSTCMMCYKRNRATRVECTTIVNGVRRSFYVYANGGKGFCKLHNWNCVNCDTFCAGSTFISDEVARDLSLQFKRPINPTDQSSYIVDSVTVKNGSIHLYFDKAGQKTYERHSLSHFVNLDNLRANNTKGSLPINVIVFDGKSKCEESSAKSASVYYSQLMCQPILLLDQALVSDVGDSAEVAVKMFDAYVNTFSSTFNVPMEKLKTLVATAEAELAKNVSLDNVLSTFISAARQGFVDSDVETKDVVECLKLSHQSDIEVTGDSCNNYMLTYNKVENMTPRDLGACIDCSARHINAQVAKSHNIALIWNVKDFMSLSEQLRKQIRSAAKKNNLPFKLTCATTRQVVNVVTTKIALKGG

SEQ ID NO: 16268 - protein, 1946 aa, Artificial Sequence
  SARS-CoV-2__MT520344.1__non-structural protein 3 (NSP3)
MAPTKVTFGDDTVIEVQGYKSVNITFELDERIDKVLNEKCSAYTVELGTEVNEFACVVADAVIKTLQPVSELLTPLGIDLDEWSMATYYLFDESGEFKLASHMYCSFYPPDEDEEEGDCEEEEFEPSTQYEYGTEDDYQGKPLEFGATSAALQPEEEQEEDWLDDDSQQTVGQQDGSEDNQTTTIQTIVEVQPQLEMELTPVVQTIEVNSFSGYLKLTDNVYIKNADIVEEAKKVKPTVVVNAANVYLKHGGGVAGALNKATNNAMQVESDDYIATNGPLKVGGSCVLSGHNLAKHCLHVVGPNVNKGEDIQLLKSAYENFNQHEVLLAPLLSAGIFGADPIHSLRVCVDTVRTNVYLAVFDKNLYDKLVSSFLEMKSEKQVEQKIAEIPKEEVKPFITESKPSVEQRKQDDKKIKACVEEVTTTLEETKFLTENLLLYIDINGNLHPDSATLVSDIDITFLKKDAPYIVGDVVQEGVLTAVVIPTKKAGGTTEMLAKALRKVPTDNYITTYPGQGLNGYTVEEAKTVLKKCKSAFYILPSIISNEKQEILGTVSWNLREMLAHAEETRKLMPVCVETKAIVSTIQRKYKGIKIQEGVVDYGARFYFYTSKTTVASLINTLNDLNETLVTMPLGYVTHGLNLEEAARYMRSLKVPATVSVSSPDAVTAYNGYLTSSSKTPEEHFIETISLAGSYKDWSYSGQSTQLGIEFLKRGDKSVYYTSNPTTFHLDGEVITFDNLKTLLSLREVRTIKVFTTVDNINLHTQVVDMSMTYGQQFGPTYLDGADVTKIKPHNSHEGKTFYVLPNDDTLRVEAFEYYHTTDPSFLGRYMSALNHTKKWKYPQVNGLTSIKWADNNCYLATALLTLQQIELKFNPPALQDAYYRARAGEAANFCALILAYCNKTVGELGDVRETMSYLFQHANLDSCKRVLNVVCKTCGQQQTTLKGVEAVMYMGTLSYEQFKKGVQIPCTCGKQATKYLVQQESPFVMMSAPPAQYELKHGTFTCASEYTGNYQCGHYKHITSKETLYCIDGALLTKSSEYKGPITDVFYKENSYTTTIKPVTYKLDGVVCTEIDPKLDNYYKKDNSYFTEQPIDLVPNQPYPNASFDNFKFVCDNIKFADDLNQLTGYKKPASRELKVTFFPDLNGDVVAIDYKHYTPSFKKGAKLLHKPIVWHVNNATNKATYKPNTWCIRCLWSTKPVETSNSFDVLKSEDAQGMDNLACEDLKPVSEEVVENPTIQKDVLECNVKTTEVVGDIILKPANNSLKITEEVGHTDLMAAYVDNSSLTIKKPNELSRVLGLKTLATHGLAAVNSVPWDTIANYAKPFLNKVVSTTTNIVTRCLNRVCTNYMPYFFTLLLQLCTFTRGTNSRIKASMPTTIAKNTVKSVGKFCLEASFNYLKSPNFSKLINIIIWFLLLSVCLGSLIYSTAALGVLMSNLGMPSYCTGYREGYLNSTNVTIATYCTGSIPCSVCLSGLDSLDTYPSLETIQITISSFKWDLTAFGLVAEWFLAYILFTRFFYVLGLAAIMQLFFSYFAVHFISNSWLMWLIINLVQMAPISAMVRMYIFFASFYYVWKSYVHVVDGCNSSTCMMCYKRNRATRVECTTIVNGVRRSFYVYANGGKGFCKLHNWNCVNCDTFCAGSTFISDEVARDLSLQFKRPINPTDQSSYIVDSVTVKNGSIHLYFDKAGQKTYERHSLSHFVNLDNLRANNTKGSLPINVIVFDGKSKCEESSAKSASVYYSQLMCQPILLLDQALVSDVGDSAEVAVKMFDAYVNTFSSTFNVPMEKLKTLVATAEAELAKNVSLDNVLSTFISAARQGFVDSDVETKDVVECLKLSHQSDIEVTGDSCNNYMLTYNKVENMTPRDLGACIDCSARHINAQVAKSHNIALIWNVKDFMSLSEQLRKQIRSAAKKNNLPFKLTCATTRQVVNVVTTKIALKGG

SEQ ID NO: 16269 - protein, 1946 aa, Artificial Sequence
  SARS-CoV-2__MT520353.1__non-structural protein 3 (NSP3)
MAPTKVTFGDDTVIEVQGYKSVNITFELDERIDKVLNEKCSAYTVELGTEVNEFACVVADAVIKTLQPVSELLTPLGIDLDEWSMATYYLFDESGEFKLASHMYCSFYPPDEDEEEGDCEEEEFEPSTQYEYGTEDDYQGKPLEFGATSAALQPEEEQEEDWLDDDSQQTVGQQDGSEDNQTTTIQTIVEVQPQLEMELTPVVQTIEVNSFSGYLKLTDNVYIKNADIVEEAKKVKPTVVVNAANVYLKHGGGVAGALNKATNNAMQVESDDYIATNGPLKVGGSCVLSGHNLAKHCLHVVGPNVNKGEDIQLLKSAYENFNQHEVLLAPLLSAGIFGADPIHSLRVCVDTVRTNVYLAVFDKNLYDKLVSSFLEMKSEKQVEQKIAEIPKEEVKPFITESKPSVEQRKQDDKKIKACVEEVTTTLEETKFLTENLLLYIDINGNLHPDSATLVSDIDITFLKKDAPYIVGDVVQEGVLTAVVIPTKKAGGTTEMLAKALRKVPTDNYITTYPGQGLNGYTVEEAKTVLKKCKSAFYILPSIISNEKQEILGTVSWNLREMLAHAEETRKLMPVCVETKAIVSTIQRKYKGIKIQEGVVDYGARFYFYTSKTTVASLINTLNDLNETLVTMPLGYVTHGLNLEEAARYMRSLKVPATVSVSSPDAVTAYNGYLTSSSKTPEEHFIETISLAGSYKDWSYSGQSTQLGIEFLKRGDKSVYYTSNPTTFHLDGEVITFDNLKTLLSLREVRTIKVFTTVDNINLHTQVVDMSMTYGQQFGPTYLDGADVTKIKPHNSHEGKTFYVLPNDDTLRVEAFEYYHTTDPSFLGRYMSALNHTKKWKYPQVNGLTSIKWADNNCYLATALLTLQQIELKFNPPALQDAYYRARAGEAANFCALILAYCNKTVGELGDVRETMSYLFQHANLDSCKRVLNVVCKTCGQQQTTLKGVEAVMYMGTLSYEQFKKGVQIPCTCGKQATKYLVQQESPFVMMSAPPAQYELKHGTFTCASEYTGNYQCGHYKHITSKETLYCIDGALLTKSSEYKGPITDVFYKENSYTTTIKPVTYKLDGVVCTEIDPKLDNYYKKDNSYFTEQPIDLVPNQPYPNASFDNFKFVCDNIKFADDLNQLTGYKKPASRELKVTFFPDLNGDVVAIDYKHYTPSFKKGAKLLHKPIVWHVNNATNKATYKPNTWCIRCLWSTKPVETSNSFDVLKSEDAQGMDNLACEDLKPVSEEVVENPTIQKDVLECNVKTTEVVGDIILKPANNSLKITEEVGHTDLMAAYVDNSSLTIKKPNELSRVLGLKTLATHGLAAVNSVPWGTIANYAKPFLNKVVSTTTNIVTRCLNRVCTNYMPYFFTLLLQLCTFTRSTNSRIKASMPTTIAKNTVKSVGKFCLEASFNYLKSPNFSKLINIIIWFLLLSVCLGSLIYSTAALGVLMSNLGMPSYCTGYREGYLNSTNVTIATYCTGSIPCSVCLSGLDSLDTYPSLETIQITISSFKWDLTAFGLVAEWFLAYILFTRFFYVLGLAAIMQLFFSYFAVHFISNSWLMWLIINLVQMAPISAMVRMYIFFASFYYVWKSYVHVVDGCNSSTCMMCYKRNRATRVECTTIVNGVRRSFYVYANGGKGFCKLHNWNCVNCDTFCAGSTFISDEVARDLSLQFKRPINPTDQSSYIVDSVTVKNGSIHLYFDKAGQKTYERHSLSHFVNLDNLRANNTKGSLPINVIVFDGKSKCEESSAKSASVYYSQLMCQPILLLDQALVSDVGDSAEVAVKMFDAYVNTFSSTFNVPMEKLKTLVATAEAELAKNVSLDNVLSTFISAARQGFVDSDVETKDVVECLKLSHQSDIEVTGDSCNNYMLTYNKVENMTPRDLGACIDCSARHINAQVAKSHNIALIWNVKDFMSLSEQLRKQIRSAAKKNNLPFKLTCATTRQVVNVVTTKIALKGG

SEQ ID NO: 16270 - protein, 1946 aa, Artificial Sequence
  SARS-CoV-2__MT520369.1__non-structural protein 3 (NSP3)
MAPTKVTFGDDTVIEVQGYKSVNITFELDERIDKVLNEKCSAYTVELGTEVNEFACVVADAVIKTLQPVSELLTPLGIDLDEWSMATYYLFDESGEFKLASHMYCSFYPPDEDEEEGDCEEEEFEPSTQYEYGTEDDYQGKPLEFGATSAALQPEEEQEEDWLDDDSQQTVGQQDGSEDNQTTTIQTIVEVQPQLEMELTPVVQTIEVNSFSGYLKLTDNVYIKNADIVEEAKKVKPTVVVNAANVYLKHGGGVAGALNKATNNAMQVESDDYIATNGPLKVGGSCVLSGHNLAKHCLHVVGPNVNKGEDIQLLKSAYENFNQHEVLLAPLLSAGIFGADPIHSLRVCVDTVRTNVYLAVFDKNLYDKLVSSFLEMKSEKQVEQKIAEIPKDEVKPFITESKPSVEQRKQDDKKIKACVEEVTTTLEETKFLTENLLLYIDINGNLHPDSATLVSDIDITFLKKDAPYIVGDVVQEGVLTAVVIPTKKAGGTTEMLAKALRKVPTDNYITTYPGQGLNGYTVEEAKTVLKKCKSAFYILPSIISNEKQEILGTVSWNLREMLAHAEETRKLMPVCVETKAIVSTIQRKYKGIKIQEGVVDYGARFYFYTSKTTVASLINTLNDLNETLVTMPLGYVTHGLNLEEAARYMRSLKVPATVSVSSPDAVTAYNGYLTSSSKTPEEHFIETISLAGSYKDWSYSGQSTQLGIEFLKRGDKSVYYTSNPTTFHLDGEVITFDNLKTLLSLREVRTIKVFTTVDNINLHTQVVDMSMTYGQQFGPTYLDGADVTKIKPHNSHEGKTFYVLPNDDTLRVEAFEYYHTTDPSFLGRYMSALNHTKKWKYPQVNGLTSIKWADNNCYLATALLTLQQIELKFNPPALQDAYYRARAGEAANFCALILAYCNKTVGELGDVRETMSYLFQHANLDSCKRVLNVVCKTCGQQQTTLKGVEAVMYMGTLSYEQFKKGVQIPCTCGKQATKYLVQQESPFVMMSAPPAQYELKHGTFTCASEYTGNYQCGHYKHITSKETLYCIDGALLTKSSEYKGPITDVFYKENSYTTTIKPVTYKLDGVVCTEIDPKLDNYYKKDNSYFTEQPIDLVPNQPYPNASFDNFKFVCDNIKFADDLNQLTGYKKPASRELKVTFFPDLNGDVVAIDYKHYTPSFKKGAKLLHKPIVWHVNNATNKATYKPNTWCIRCLWSTKPVETSNSFDVLKSEDAQGMDNLACEDLKPVSEEVVENPTIQKDVLECNVKTTEVVGDIILKPANNSLKITEEVGHTDLMAAYVDNSSLTIKKPNELSRVLGLKTLATHGLAAVNSVPWDTIANYAKPFLNKVVSTTTNIVTRCLNRVCTNYMPYFFTLLLQLCTFTRSTNSRIKASMPTTIAKNTVKSVGKFCLEASFNYLKSPNFSKLINIIIWFLLLSVCLGSLIYSTAALGVLMSNLGMPSYCTGYREGYLNSTNVTIATYCTGSIPCSVCLSGLDSLDTYPSLETIQITISSFKWDLTAFGLVAEWFLAYILFTRFFYVLGLAAIMQLFFSYFAVHFISNSWLMWLIINLVQMAPISAMVRMYIFFASFYYVWKSYVHVVDGCNSSTCMMCYKRNRATRVECTTIVNGVRRSFYVYANGGKGFCKLHNWNCVNCDTFCAGSTFISDEVARDLSLQFKRPINPTDQSSYIVDSVTVKNGSIHLYFDKAGQKTYERHSLSHFVNLDNLRANNTKGSLPINVIVFDGKSKCEESSVKSASVYYSQLMCQPILLLDQALVSDVGDSAEVAVKMFDAYVNTFSSTFNVPMEKLKTLVATAEAELAKNVSLDNVLSTFISAARQGFVDSDVETKDVVECLKLSHQSDIEVTGDSCNNYMLTYNKVENMTPRDLGACIDCSARHINAQVAKSHNIALIWNVKDFMSLSEQLRKQIRSAAKKNNLPFKLTCATTRQVVNVVTTKIALKGG

SEQ ID NO: 16271 - protein, 1946 aa, Artificial Sequence
  SARS-CoV-2__MT520390.1__non-structural protein 3 (NSP3)
MAPTKVTFGDDTVIEVQGYKSVNITFELDERIDKVLNEKCSAYTVELGTEVNEFACVVADAVIKTLQPVSELLTPLGIDLDEWSMATYYLFDESGEFKLASHMYCSFYPPDEDEEEGDCEEEEFEPSTQYEYGTEDDYQGKPLEFGATSAALQPEEEQEEDWLDDDSQQTVGQQDGSEDNQTTTIQTIVEVQPQLEMELTPVVQTIEVNSFSGYLKLTDNVYIKNADIVEEAKKVKPTVVVNAANVYLKHGGGVAGALNKATNNAMQVESDDYIATNGPLKVGGSCVLSGHNLAKHCLHVVGPNVNKGEDIQLLKSAYENFNQHEVLLAPLLSAGIFGADPIHSLRVCVDTVRTNVYLAVFDKNLYDKLVSSFLEMKSEKQVEQKIAEIPKEEVKPFITESKPSVEQRKQDDKKIKACVEEVTTTLEETKFLTENLLLYIDINGNLHPDSATLVSDIDITFLKKDAPYIVGDVVQEGVLTAVVIPTKKAGGTTEMLAKALRKVPTDNYITTYPGQGLNGYTVEEAKTVLKKCKSAFYILPSIISNEKQEILGTVSWNLREMLAHAEETRKLMPVCVETKAIVSTIQRKYKGIKIQEGVVDYGARFYFYTSKTTVASLINTLNDLNETLVTMPLGYVTHGLNLEEAARYMRSLKVPATVSVSSPDAVTAYNGYLTSSSKTPEEHFIETISLAGSYKDWSYSGQSTQLGIEFLKRGDKSVYYTSNPTTFHLDGEVITFDNLKTLLSLREVRTIKVFTTVDNINLHTQVVDMSMTYGQQFGPTYLDGADVTKIKPHNSHEGKTFYVLPNDDTLRVEAFEYYHTTDPSFLGRYMSALNHTKKWKYPQVNGLTSIKWADNNCYLAIALLTLQQIELKFNPPALQDAYYRARAGEAANFCALILAYCNKTVGELGDVRETMSYLFQHANLDSCKRVLNVVCKTCGQQQTTLKGVEAVMYMGTLSYEQFKKGVQIPCTCGKQATKYLVQQESPFVMMSAPPAQYELKHGTFTCASEYTGNYQCGHYKHITSKETLYCIDGALLTKSSEYKGPITDVFYKENSYTTTIKPVTYKLDGVVCTEIDPKLDNYYKKDNSYFTEQPIDLVPNQPYPNASFDNFKFVCDNIKFADDLNQLTGYKKPASRELKVTFFPDLNGDVVAIDYKHYTPSFKKGAKLLHKPIVWHVNNATNKATYKPNTWCIRCLWSTKPVETSNSFDVLKSEDAQGMDNLVCEDLKPVSEEVVENPTIQKDVLECNVKTTEVVGDIILKPANNSLKITEEVGHTDLMAAYVDNSSLTIKKPNELSRVLGLKTLATHGLAAVNSVPWDTIANYAKPFLNKVVSTTTNIVTRCLNRVCTNYMPYFFTLLLQLCTFTRSTNSRIKASMPTTIAKNTVKSVGKFCLEASFNYLKSPNFSKLINIIIWFLLLSVCLGSLIYSTAALGVLMSNLGMPSYCTGYREGYLNSTNVTIATYCTGSIPCSVCLSGLDSLDTYPSLETIQITISSFKWDLTAFGLVAEWFLAYILFTRFFYVLGLAAIMQLFFSYFAVHFISNSWLMWLIINLVQMAPISAMVRMYIFFASFYYVWKSYVHVVDGCNSSTCMMCYKRNRATRVECTTIVNGVRRSFYVYANGGKGFCKLHNWNCVNCDTFCAGSTFISDEVARDLSLQFKRPINPTDQSSYIVDSVTVKNGSIHLYFDKAGQKTYERHSLSHFVNLDNLRANNTKGSLPINVIVFDGKSKCEESSAKSASVYYSQLMCQPILLLDQALVSDVGDSAEVAVKMFDAYVNTFSSTFNVPMEKLKTLVATAEAELAKNVSLDNVLSTFISAARQGFVDSDVETKDVVECLKLSHQSDIEVTGDSCNNYMLTYNKVENMTPRDLGACIDCSARHINAQVAKSHNIALIWNVKDFMSLSEQLRKQIRSAAKKNNLPFKLTCATTRQVVNVVTTKIALKGG

SEQ ID NO: 16272 - protein, 1946 aa, Artificial Sequence
  SARS-CoV-2__MT520466.1__non-structural protein 3 (NSP3)
MAPTKVTFGDDTVIEVQGYKSVNITFELDERIDKVLNEKCSAYTVELGTEVNEFACVVADAVIKTLQPVSELLTPLGIDLDEWSMATYYLFDESGEFKLASHMYCSFYPPDEDEEEGDCEEEEFEPSTQYEYGTEDDYQGKPLEFGATSAALQPEEEQEEDWLDDDSQQTVGQQDGSEDNQTTTIQTIVEVQPQLEMELTPVVQTIEVNSFSGYLKLTDNVYIKNADIVEEAKKVKPTVVVNAANVYLKHGGGVAGALNKATNNAMQVESDDYIATNGPLKVGGSCVLSGHNLAKHCLHVVGPNVNKGEDIQLLKSAYENFNQHEVLLAPLLSAGIFGADPIHSLRVCVDTVRTNVYLAVFDKNLYDKLVSSFLEMKSEKQVEQKIAEIPKEEVKPFITESKPSVEQRKQDDKKIKACVEEVTTTLEETKFLTENLLLYIDINGNLHPDSATLVSDIDITFLKKDAPYIVGDVVQEGVLTAVVIPTKKAGGTTEMLAKALRKVPTDNYITTYPGQGLNGYTVEEAKTVLKKCKSAFYILPSIISNEKQEILGTVSWNLREMLAHAEETRKLMPVCVETKAIVSTIQRKYKGIKIQEGVVDYGARFYFYTSKTTVASLINTLNDLNETLVTMPLGYVTHGLNLEEAARYMRSLKVPATVSVSSPDAVTAYNGYLTSSSKTPEEHFIETISLAGSYKDWSYSGQSTQLGIEFLKRGDKSVYYTSNPTTFHLDGEVITFDNLKTLLSLREVRTIKVFTTVDNINLHTQVVDMSMTYGQQFGPTYLDGADVTKIKPHNSHEGKTFYVLPNDDTLRVEAFEYYHTTDPSFLGRYMSALNHTKKWKYPQVNGLTSIKWADNNCYLATALLTLQQIELKFNPPALQDAYYRARAGEAANFCALILAYCNKTVGELGDVRETMSYLFQHANLDSCKRVLNVVCKTCGQQQTTLKGVEAVMYMGTLSYEQFKKGVQIPCTCGKQATKYLVQQESPFVMMSAPPAQYELKHGTFTCASEYTGNYQCGHYKHITSKETLYCIDGALLTKSSEYKGPITDVFYKENSYTTTIKPVTYKLDGVVCTEIDPKLDNYYKKDNSYFTEQPIDLVPNQPYPNASFDNFKFVCDNIKFADDLNQLTGYKKPASRELKVTFFPDLNGDVVAIDYKHYTPSFKKGAKLLHKPIVWHVNNATNKATYKPNTWCIRCLWSTKPVETSNSFDVLKSEDAQGMDNLACEDLKPVSEEVVENPTIQKDVLECNVKTTEVVGDIILKPANNSLKITEEVGHTDLMAAYVDNSSLTIKKPNELSRVLGLKTLATHGLAAVNSVPWDTIANYAKPFLNKVVSTTTNIVTRCLNRVCINYMPYFFTLLLQLCTFTRSTNSRIKASMPTTIAKNTVKSVGKFCLEASFNYLKSPNFSKLINIIIWFLLLSVCLGSLIYSTAALGVLMSNLGMPSYCTGYREGYLNSTNVTIATYCTGSIPCSVCLSGLDSLDTYPSLETIQITISSFKWDLTAFGLVAEWFLAYILFTRFFYVLGLAAIMQLFFSYFAVHFISNSWLMWLIINLVQMAPISAMVRMYIFFASFYYVWKSYVHVVDGCNSSTCMMCYKRNRATRVECTTIVNGVRRSFYVYANGGKGFCKLHNWNCVNCDTFCAGSTFISDEVARDLSLQFKRPINPTDQSSYIVDSVTVKNGSIHLYFDKAGQKTYERHSLSHFVNLDNLRANNTKGSLPINVIVFDGKSKCEESSAKSASVYYSQLMCQPILLLDQALVSDVGDSAEVAVKMFDAYVNTFSSTFNVPMEKLKTLVATAEAELAKNVSLDNVLSTFISAARQGFVDSDVETKDVVECLKLSHQSDIEVTGDSCNNYMLTYNKVENMTPRDLGACIDCSARHINAQVAKSHNIALIWNVKDFMSLSEQLRKQIRSAAKKNNLPFKLTCATTRQVVNVVTTKIALKGG

SEQ ID NO: 16273 - protein, 1946 aa, Artificial Sequence
  SARS-CoV-2__MT520472.1__non-structural protein 3 (NSP3)
MAPTKVTFGDDTVIEVQGYKSVNITFELDERIDKVLNEKCSAYTVELGTEVNEFACVVADAVIKTLQPVSELLTPLGIDLDEWSMATYYLFDESGEFKLASHMYCSFYPPDEDEEEGDCEEEEFEPSTQYEYGTEDDYQGKPLEFGATSAALQPEEEQEEDWLDDDSQQTVGQQDGSEDNQTTTIQTIVEVQPQLEMELTPVVQTIEVNSFSGYLKLTDNVYIKNADIVEEAKKVKPTVVVNAANVYLKHGGGVAGALNKATNNAMQVESDDYIATNGPLKVGGSCVLSGHNLAKHCLHVVGPNVNKGEDIQLLKSAYENFNQHEVLLAPLLSAGIFGADPIHSLRVCVDTVRTNVYLAVFDKNLYDKLVSSFLEMKSEKQVEQKIAEIPKEEVKPFITESKPSVEQRKQDDKKIKACVEEVTTTLEETKFLTENLLLYIDINGNLHPDSATLVSDIDITFLKKDAPYIVGDVVQEGVLTAVVIPTKKAGGTTEMLAKALRKVPTDNYITTYPGQGLNGYTVEEAKTVLKKCKSAFYILPSIISNEKQEILGTVSWNLREMLAHAEETRKLMPVCVETKAIVSTIQRKYKGIKIQEGVVDYGARFYFYTSKTTVASLINTLNDLNETLVTMPLGYVTHGLNLEEAARYMRSLKVPATVSVSSPDAVTAYNGYLTSSSKTPEEHFIETISLAGSYKDWSYSGQSTQLGIEFLKRGDKSVYYTSNPTTFHLDGEVITFDNLKTLLSLREVRTIKVFTTVDNINLHTQVVDMSMTYGQQFGPTYLDGADVTKIKPHNSHEGKTFYVLPNDDTLRVEAFEYYHTTDPSFLGRYMSALNHTKKWKYPQVNGLTSIKWADNNCYLATALLTLQQIELKFNPPALQDAYYRARAGEAANFCALILAYCNKTVGELGDVRETISYLFQHANLDSCKRVLNVVCKTCGQQQTTLKGVEAVMYMGTLSYEQFKKGVQIPCTCGKQATKYLVQQESPFVMMSAPPAQYELKHGTFTCASEYTGNYQCGHYKHITSKETLYCIDGALLTKSSEYKGPITDVFYKENSYTTTIKPVTYKLDGVVCTEIDPKLDNYYKKDNSYFTEQPIDLVPNQPYPNASFDNFKFVCDNIKFADDLNQLTGYKKPASRELKVTFFPDLNGDVVAIDYKHYTPSFKKGAKLLHKPIVWHVNNATNKATYKPNTWCIRCLWSTKPVETSNSFDVLKSEDAQGMDNLACEDLKPVSEEVVENPTIQKDVLECNVKTTEVVGDIILKPANNSLKITEEVGHTDLMAAYVDNSSLTIKKPNELSRVLGLKTLATHGLAAVNSVPWDTIANYAKPFLNKVVSTTTNIVTRCLNRVCTNYMPYFFTLLLQLCTFTRSTNSRIKASMPTTIAKNTVKSVGKFCLEASFNYLKSPNFSKLINIIIWFLLLSVCLGSLIYSTAALGVLMSNLGMPSYCTGYREGYLNSTNVTIATYCTGSIPCSVCLSGLDSLDTYPSLETIQITISSFKWDLTAFGLVAEWFLAYILFTRFFYVLGLAAIMQLFFSYFAVHFISNSWLMWLIINLVQMAPISAMVRMYIFFASFYYVWKSYVHVVDGCNSSTCMMCYKRNRATRVECTTIVNGVRRSFYVYANGGKGFCKLHNWNCVNCDTFCAGSTFISDEVARDLSLQFKRPINPTDQSSYIVDSVTVKNGSIHLYFDKAGQKTYERHSLSHFVNLDNLRANNTKGSLPINVIVFDGKSKCEESSAKSASVYYSQLMCQPILLLDQALVSDVGDSAEVAVKMFDAYVNTFSSTFNVPMEKLKTLVATAEAELAKNVSLDNVLSTFISAARQGFVDSDVETKDVVECLKLSHQSDIEVTGDSCNNYMLTYNKVENMTPRDLGACIDCSARHINAQVAKSHNIALIWNVKDFMSLSEQLRKQIRSAAKKNNLPFKLTCATTRQVVNVVTTKIALKGG

SEQ ID NO: 16274 - protein, 1946 aa, Artificial Sequence
  SARS-CoV-2__MT520486.1__non-structural protein 3 (NSP3)
MAPTKVTFGDDTVIEVQGYKSVNITFELDERIDKVLNEKCSAYTVELGTEVNEFACVVADAVIKTLQPVSELLTPLGIDLDEWSMATYYLFDESGEFKLASHMYCSFYPPDEDEEEGDCEEEEFEPSTQYEYGTEDDYQGKPLEFGATSAALQPEEEQEEDWLDDDSQQTVGQQDGSEDNQTTTIQTIVEVQPQLEMELTPVVQTIEVNSFSGYLKLTDNVYIKNADIVEEAKKVKPTVVVNAANVYLKHGGGVAGALNKATNNAMQVESDDYIATNGPLKVGGSCVLSGHNLAKHCLHVVGPNVNKGEDIQLLKSAYENFNQHEVLLAPLLSAGIFGADPIHSLRVCVDTVRTNVYLAVFDKNLYDKLVSSFLEMKSEKQVEQKIAKPFITESKPSVEQRKQDDKKIKACVEEVTTTLEETKFLTENLLLYIDINGNLHPDSATLVSDIDITFLKKDAPYIVGDVVQEGVLTAVVIPTKKAGGTTEMLAKALRKVPTDNYITTYPGQGLNGYTVEEAKTVLKKCKSAFYILPSIISNEKQEILGTVSWNLREMLAHAEETRKLMPVCVETKAIVSTIQRKYKGIKIQEGVVDYGARFYFYTSKTTVASLINTLNDLNETLVTMPLGYVTHGLNLEEAARYMRSLKVPATVSVSSPDAVTAYNGYLTSSSKTPEEHFIETISLAGSYKDWSYSGQSTQLGIEFLKRGDKSVYYTSNPTTFHLDGEVITFDNLKTLLSLREVRTIKVFTTVDNINLHTQVVDMSMTYGQQFGPTYLDGADVTKIKPHNSHEGKTFYVLPNDDTLRVEAFEYYHTTDPSFLGRYMSALNHTKKWKYPQVNGLTSIKWADNNCYLATALLTLQQIELKFNPPALQDAYYRARAGEAANFCALILAYCNKTVGELGDVRETMSYLFQHANLDSCKRVLNVVCKTCGQQQTTLKGVEAVMYMGTLSYEQFKKGVQIPCTCGKQATKYLVQQESPFVMMSAPPAQYELKHGTFTCASEYTGNYQCGHYKHITSKETLYCIDGALLTKSSEYKGPITDVFYKENSYTTTIKPVTYKLDGVVCTEIDPKLDNYYKKDNSYFTEQPIDLVPNQPYPNASFDNFKFVCDNIKFADDLNQLTGYKKPASRELKVTFFPDLNGDVVAIDYKHYTPSFKKGAKLLHKPIVWHVNNATNKATYKPNTWCIRCLWSTKPVETSNSFDVLKSEDAQGMDNLACEDLKPVSEEVVENPTIQKDVLECNVKTTEVVGDIILKPANNSLKITEEVGHTDLMAAYVDNSSLTIKKPNELSRVLGLKTLATHGLAAVNSVPWDTIANYAKPFLNKVVSTTTNIVTRCLNRVCTNYMPYFFTLLLQLCTFTRSTNSRIKASMPTTIAKNTVKSVGKFCLEASFNYLKSPNFSKLINIIIWFLLLSVCLGSLIYSTAALGVLMSNLGMPSYCTGYREGYLNSTNVTIATYCTGSIPCSVCLSGLDSLDTYPSLETIQITISSFKWDLTAFGLVAEWFLAYILFTRFFYVLGLAAIMQLFFSYFAVHFISNSWLMWLIINLVQMAPISAMVRMYIFFASFYYVWKSYVHVVDGCNSSTCMMCYKRNRATRVECTTIVNGVRRSFYVYANGGKGFCKLHNWNCVNCDTFCAGSTFISDEVARDLSLQFKRPINPTDQSSYIVDSVTVKNGSIHLYFDKAGQKTYERHSLSHFVNLDNLRANNTKGSLPINVIVFDGKSKCEESSAKSASVYYSQLMCQPILLLDQALVSDVGDSAEVAVKMFDAYVNTFSSTFNVPMEKLKTLVATAEAELAKNVSLDNVLSTFISAARQGFVDSDVETKDVVECLKLSHQSDIEVTGDSCNNYMLTYNKVENMTPRDLGACIDCSARHINAQVAKSHNIALIWNVKDFMSLSEQLRKQIRSAAKKNNLPFKLTCATTRQVVNVVTTKIALKGGKIVNNWL

SEQ ID NO: 16275 - protein, 1946 aa, Artificial Sequence
  SARS-CoV-2__MT520534.1__non-structural protein 3 (NSP3)
MAPTKVTFGDDTVIEVQGYKSVNITFELDERIDKVLNEKCSAYTVELGTEVNEFACVVADAVIKTLQPVSELLTPLGIDLDEWSMATYYLFDESGEFKLASHMYCSFYPPDEDEEEGDCEEEEFEPSTQYEYGTEDDYQGKPLEFGATSAALQPEEEQEEDWLDDDSQQTVGQQDGSEDNQTTTIQTIVEVQPQLEMELTPVVQTIEVNSFSGYLKLTDNVYIKNADIVEEAKKVKPTVVVNAANVYLKHGGGVAGALNKATNNAMQVESDDYIATNGPLKVGGSCVLSGHNLAKHCLHVVGPNVNKGEDIQLLKSAYENFNQHEVLLAPLLSAGIFGADPIHSLRVCVDTVRTNVYLAVFDKNLYDKLVSSFLEMKSEKQVEQKIAEIPKEEVKPFITESKPSVEQRKQDDKKIKACVEEVTTTLEETKFLTENLLLYIDINGNLHPDSATLVSDIDITFLKKDAPYIVGDVVQEGVLTAVVIPTKKAGGTTEMLAKALRKVPTDNYITTYPGQGLNGYTVEEAKTVLKKCKSAFYILPSIISNEKQEILGTVSWNLREMLAHAEETRKLMPVCVETKAIVSTIQRKYKGIKIQEGVVDYGARFYFYTSKTTVASLINTLNDLNETLVTMPLGYVTHGLNLEEAARYMRSLKVPATVSVSSPDAVTAYNGYLTSSSKTPEEHFIETISLAGSYKDWSYSGQSTQLGIEFLKRGDKSVYYTSNPTTFHLDGEVITFDNLKTLLSLREVRTIKVFTTVDNINLHTQVVDMSMTYGQQFGPTYLDGADVTKIKPHNSHEGKTFYVLPNDDTLRVEAFEYYHTTDPSFLGRYMSALNHTKKWKYPQVNGLTSIKWADNNCYLATALLTLQQIELKFNPPALQDAYYRARAGEAANFCALILAYCNKTVGELGDVRETMSYLFQHANLDSCKRVLNVVCKTCGQQQTTLKGVEAVMYMGTLSYEQFKKGVQIPCTCGKQATKYLVQQESPFVMMSAPPAQYELKHGTFTCASEYTGNYQCGHYKHITSKETLYCIDGALLTKSSEYKGPITDVFYKENSYTTTIKPVTYKLDGVVCTEIDPKLDNYYKKDNSYFTEQPIDLVPNQPYPNASFDNFKFVCDNIKFADDLNQLTGYKKPASRELKVTFFPDLNGDVVAIDYKHYTPSFKKGAKLLHKPIVWHVNNATNKATYKPNTWCIRCLWSTKPVETSNSFDVLKSEDAQGMDNLACEDLKPVSEEVVENPTIQKDVLECNVKTTEVVGDIILKPANNSLKITEEVGHTDLMAAYVDNSSLTIKKPNELSRVLGLKTLATHGLAAVNSVPWDTIANYAKPFLNKVVSTTTNIVTRCLNRVCTNYMPYFFTLLLQLCTFTRSTNSRIKASMPTTIAKNTVKSVGKFCLEASFNYLKSPNFSKLINIIIWFLLLSVCLGSLIYSTAALGVLMSNLGMPSYCTGYREGYLNSTNVTIATYCTGSIPCSVCLSGLDSLDTYPSLETIQITISSFKWDLTAFGLVAEWFLAYILFTRFFYVLGLAAIMQLFFSYFAVHFISNSWLMWLIINLVQMAPISAMVRMYIFFASFYYVWKSYVHVVDGCNSSTCMMCYKRNRATRVECTTIVNGVRRSFYVYANGGKGFCKLHNWNCVNCDTFCAGSTFISDEVARDLSLQFKRPINPTDQSSYIVDSVTVKNGSIHLYFDKAGQKTYERHSLSHFVNLDNLRANNTKGSLPINVIVFDGKSKCEESSAKSASVYYSQLMCQPILLLDQALVSDVGDSAEVAVKMFDAYVNTFSSTFNVPMEKLKTLVATAEAELAKNVSLDNVLSTFISAARQGFVDSDVETKDVVECFKLSHQSDIEVTGDSCNNYMLTYNKVENMTPRDLGACIDCSARHINAQVAKSHNIALIWNVKDFMSLSEQLRKQIRSAAKKNNLPFKLTCATTRQVVNVVTTKIALKGG

SEQ ID NO: 16276 - protein, 1946 aa, Artificial Sequence
  SARS-CoV-2__MT520543.1__non-structural protein 3 (NSP3)
MAPTKVTFGDDTVIEVQGYKSVNITFELDERIDKVLNEKCSAYTVELGTEVNEFACVVADAVIKTLQPVSELLTPLGIDLDEWSMATYYLFDESGEFKLASHMYCSFYPPDEDEEEGDCEEEEFEPSTQYEYGTEDDYQGKPLEFGATSAALQPEEEQEEDWLDDDSQQTVGQQDGSEDNQTTTIQTIVEVQPQLEMELTPVVQTIEVNSFSGYLKLTDNVYIKNADIVEEAKKVKPTVVVNAANVYLKHGGGVAGALNKATNNAMQVESDDYIATNGPLKVGGSCVLSGHNLAKHCLHVVGPNVNKGEDIQLLKSAYENFNQHEVLLAPLLSAGIFGADPIHSLRVCVDTVRTNVYLAVFDKNLYDKLVSSFLEMKSEKQVEQKIAEIPKEEVKPFITESKPSVEQRKQDDKKIKACVEEVTTTLEETKFLTENLLLYIDINGNLHPDSATLVSDIDITFLKKDAPYIVGDVVQEGVLNAVVIPTKKAGGTTEMLAKALRKVPTDNYITTYPGQGLNGYTVEEAKTVLKKCKSAFYILPSIISNEKQEILGTVSWNLREMLAHAEETRKLMPVCVETKAIVSTIQRKYKGIKIQEGVVDYGARFYFYTSKTTVASLINTLNDLNETLVTMPLGYVTHGLNLEEAARYMRSLKVPATVSVSSPDAVTAYNGYLTSSSKTPEEHFIETISLAGSYKDWSYSGQSTQLGIEFLKRGDKSVYYTSNPTTFHLDGEVITFDNLKTLLSLREVRTIKVFTTVDNINLHTQVVDMSMTYGQQFGPTYLDGADVTKIKPHNSHEGKTFYVLPNDDTLRVEAFEYYHTTDPSFLGRYMSALNHTKKWKYPQVNGLTSIKWADNNCYLATALLTLQQIELKFNPPALQDAYYRARAGEAANFCALILAYCNKTVGELGDVRETMSYLFQHANLDSCKRVLNVVCKTCGQQQTTLKGVEAVMYMGTLSYEQFKKGVQIPCTCGKQATKYLVQQESPFVMMSAPPAQYELKHGTFTCASEYTGNYQCGHYKHITSKETLYCIDGALLTKSSEYKGPITDVFYKENSYTTTIKPVTYKLDGVVCTEIDPKLDNYYKKDNSYFTEQPIDLVPNQPYPNASFDNFKFVCDNIKFADDLNQLTGYKKPASRELKVTFFPDLNGDVVAIDYKHYTPSFKKGAKLLHKPIVWHVNNATNKATYKPNTWCIRCLWSTKPVETSNSFDVLKSEDAQGMDNLACEDLKPVSEEVVENPTIQKDVLECNVKTTEVVGDIILKPANNSLKITEEVGHTDLMAAYVDNSSLTIKKPNELSRVLGLKTLATHGLAAVNSVPWDTIANYAKPFLNKVVSTTTNIVTRCLNRVCTNYMPYFFTLLLQLCTFTRSTNSRIKASMPTTIAKNTVKSVGKFCLEASFNYLKSPNFSKLINIIIWFLLLSVCLGSLIYSTAALGVLMSNLGMPSYCTGYREGYLNSTNVTIATYCTGSIPCSVCLSGLDSLDTYPSLETIQITISSFKWDLTAFGLVAEWFLAYILFTRFFYVLGLAAIMQLFFSYFAVHFISNSWLMWLIINLVQMAPISAMVRMYIFFASFYYVWKSYVHVVDGCNSSTCMMCYKRNRATRVECTTIVNGVRRSFYVYANGGKGFCKLHNWNCVNCDTFCAGSTFISDEVARDLSLQFKRPINPTDQSSYIVDSVTVKNGSIHLYFDKAGQKTYERHSLSHFVNLDNLRANNTKGSLPINVIVFDGKSKCEESSAKSASVYYSQLMCQPILLLDQALVSDVGDSAEVAVKMFDAYVNTFSSTFNVPMEKLKTLVATAEAELAKNVSLDNVLSTFISAARQGFVDSDVETKDVVECLKLSHQSDIEVTGDSCNNYMLTYNKVENMTPRDLGACIDCSARHINAQVAKSHNIALIWNVKDFMSLSEQLRKQIRSAAKKNNLPFKLTCATTRQVVNVVTTKIALKGG

SEQ ID NO: 16277 - protein, 1946 aa, Artificial Sequence
  SARS-CoV-2__MT560667.1__non-structural protein 3 (NSP3)
MAPTKVTFGDDTVIEVQGYKSVNITFELDERIDKVLNEKCSAYTVELGTEVNEFACVVADAVIKTLQPVSELLTPLGIDLDEWSMATYYLFDESGEFKLASHMYCSFYPPDEDEEEGDCEEEEFEPSTQYEYGTEDDYQGKPLEFGATSAALQPEEEQEEDWLDDDSQQTVGQQDGSEDNQTTTIQTIVEVQPQLEMELTPVVQTIEVNSFSGYLKLTDNVYIKNADIVEEAKKVKLTVVVNAANVYLKHGGGVAGALNKATNNAMQVESDDYIATNGPLKVGGSCVLSGHNLAKHCLHVVGPNVNKGEDIQLLKSAYENFNQHEVLLAPLLSAGIFGADPIHSLRVCVDTVRTNVYLAVFDKNLYDKLVSSFLEMKSEKQVEQKIAEIPKEEVKPFITESKPSVEQRKQDDKKIKACVEEVTTTLEETKFLTENLLLYIDINGNLHPDSATLVSDIDITFLKKDAPYIVGDVVQEGVLTAVVIPTKKAGGTTEMLAKALRKVPTDNYITTYPGQGLNGYTVEEAKTVLKKCKSAFYILPSIISNEKQEILGTVSWNLREMLAHAEETRKLMPVCVETKAIVSTIQRKYKGIKIQEGVVDYGARFYFYTSKTTVASLINTLNDLNETLVTMPLGYVTHGLNLEEAARYMRSLKVPATVSVSSPDAVTAYNGYLTSSSKTPEEHFIETISLAGSYKDWSYSGQSTQLGIEFLKRGDKSVYYTSNPTTFHLDGEVITFDNLKTLLSLREVRTIKVFTTVDNINLHTQVVDMSMTYGQQFGPTYLDGADVTKIKPHNSHEGKTFYVLPNDDTLRVEAFEYYHTTDPSFLGRYMSALNHTKKWKYPQVNGLTSIKWADNNCYLATALLTLQQIELKFNPPALQDAYYRARAGEAANFCALILAYCNKTVGELGDVRETMSYLFQHANLDSCKRVLNVVCKTCGQQQTTLKGVEAVMYMGTLSYEQFKKGVQIPCTCGKQATKYLVQQESPFVMMSAPPAQYELKHGTFTCASEYTGNYQCGHYKHITSKETLYCIDGALLTKSSEYKGPITDVFYKENSYTTTIKPVTYKLDGVVCTEIDPKLDNYYKKDNSYFTEQPIDLVPNQPYPNASFDNFKFVCDNIKFADDLNQLTGYKKPASRELKVTFFPDLNGDVVAIDYKHYTPSFKKGAKLLHKPIVWHVNNATNKATYKPNTWCIRCLWSTKPVETSNSFDVLKSEDAQGMDNLACEDLKPVSEEVVENPTIQKDVLECNVKTTEVVGDIILKPANNSLKITEEVGHTDLMAAYVDNSSLTIKKPNELSRVLGLKTLATHGLAAVNSVPWDTIANYAKPFLNKVVSTTTNIVTRCLNRVCTNYMPYFFTLLLQLCTFTRSTNSRIKASMPTTIAKNTVKSVGKFCLEASFNYLKSPNFSKLINIIIWFLLLSVCLGSLIYSTAALGVLMSNLGMPSYCTGYREGYLNSTNVTIATYCTGSIPCSVCLSGLDSLDTYPSLETIQITISSFKWDLTAFGLVAEWFLAYILFTRFFYVLGLAAIMQLFFSYFAVHFISNSWLMWLIINLVQMAPISAMVRMYIFFASFYYVWKSYVHVVDGCNSSTCMMCYKRNRATRVECTTIVNGVRRSFYVYANGGKGFCKLHNWNCVNCDTFCAGSTFISDEVARDLSLQFKRPINPTDQSSYIVDSVTVKNGSIHLYFDKAGQKTYERHSLSHFVNLDNLRANNTKGSLPINVIVFDGKSKCEESSAKSASVYYSQLMCQPILLLDQALVSDVGDSAEVAVKMFDAYVNTFSSTFNVPMEKLKTLVATAEAELAKNVSLDNVLSTFISAARQGFVDSDVETKDVVECLKLSHQSDIEVTGDSCNNYMLTYNKVENMTPRDLGACIDCSARHINAQVAKSHNIALIWNVKDFMSLSEQLRKQIRSAAKKNNLPFKLTCATTRQVVNVVTTKIALKGG

SEQ ID NO: 16278 - protein, 1946 aa, Artificial Sequence
  SARS-CoV-2__MT560679.1__non-structural protein 3 (NSP3)
MAPTKVTFGDDTVIEVQGYKSVNITFELDERIDKVLNEKCSAYTVELGTEVNEFACVVADAVIKTLQPVSELLTPLGIDLDEWSMATYYLFDESGEFKLASHMYCSFYPPDEDEEEGDCEEEEFEPSTQYEYGTEDDYQGKPLEFGATSAALQPEEEQEEDWLDDDSQQTVGQQDGSEDNQTTTIQTIVEVQPQLEMELTPVVQTIEVNSFSGYLKLTDNVYIKNADIVEEAKKVKPTVVVNAANVYLKHGGGVAGALNKATNNAMQVESDDYIATNGPLKVGGSCVLSGHNLAKHCLHVVGPNVNKGEDIQLLKSAYENFNQHEVLLAPLLSAGIFGADPIHSLRVCVDTVRTNVYLAVFDKNLYDKLVSSFLEMKSEKQVEQKIAEIPKEEVKPFITESKPSVEQRKQDDKKIKACVEEVTTTLEETKFLTENLLLYIDINGNLHPDSATLVSDIDITFLKKDAPYIVGDVVQEGVLTVVVIPTKKAGGTTEMLAKALRKVPTDNYITTYPGQGLNGYTVEEAKTVLKKCKSAFYILPSIISNEKQEILGTVSWNLREMLAHAEETRKLMPVCVETKAIVSTIQRKYKGIKIQEGVVDYGARFYFYTSKTTVASLINTLNDLNETLVTMPLGYVTHGLNLEEAARYMRSLKVPATVSVSSPDAVTAYNGYLTSSSKTPEEHFIETISLAGSYKDWSYSGQSTQLGIEFLKRGDKSVYYTSNPTTFHLDGEVITFDNLKTLLSLREVRTIKVFTTVDNINLHTQVVDMSMTYGQQFGPTYLDGADVTKIKPHNSHEGKTFYVLPNDDTLRVEAFEYYHTTDPSFLGRYMSALNHTKKWKYPQVNGLTSIKWADNNCYLATALLTLQQIELKFNPPALQDAYYRARAGEAANFCALILAYCNKTVGELGDVRETMSYLFQHANLDSCKRVLNVVCKTCGQQQTTLKGVEAVMYMGTLSYEQFKKGVQIPCTCGKQATKYLVQQESPFVMMSAPPAQYELKHGTFTCASEYTGNYQCGHYKHITSKETLYCIDGALLIKSSEYKGPITDVFYKENSYTTTIKPVTYKLDGVVCTEIDPKLDNYYKKDNSYFTEQPIDLVPNQPYPNASFDNFKFVCDNIKFADDLNQLTGYKKPASRELKVTFFPDLNGDVVAIDYKHYTPSFKKGAKLLHKPIVWHVNNATNKATYKPNTWCIRCLWSTKPVETSNSFDVLKSEDAQGMDNLACEDLKPVSEEVVENPTIQKDVLECNVKTTEVVGDIILKPANNSLKITEEVGHTDLMAAYVDNSSLTIKKPNELSRVLGLKTLATHGLAAVNSVPWDTIANYAKPFLNKVVSTTTNIVTRCLNRVCTNYMPYFFTLLLQLCTFTRSTNSRIKASMPTTIAKNTVKSVGKFCLEASFNYLKSPNFSKLINIIIWFLLLSVCLGSLIYSTAALGVLMSNLGMPSYCTGYREGYLNSTNVTIATYCTGSIPCSVCLSGLDSLDTYPSLETIQITISSFKWDLTAFGLVAEWFLAYILFTRFFYVLGLAAIMQLFFSYFAVHFISNSWLMWLIINLVQMAPISAMVRMYIFFASFYYVWKSYVHVVDGCNSSTCMMCYKRNRATRVECTTIVNGVRRSFYVYANGGKGFCKLHNWNCVNCDTFCAGSTFISDEVARDLSLQFKRPINPTDQSSYIVDSVTVKNGSIHLYFDKAGQKTYERHSLSHFVNLDNLRANNTKGSLPINVIVFDGKSKCEESSAKSASVYYSQLMCQPILLLDQALVSDVGDSAEVAVKMFDAYVNTFSSTFNVPMEKLKTLVATAEAELAKNVSLDNVLSTFISAARQGFVDSDVETKDVVECLKLSHQSDIEVTGDSCNNYMLTYNKVENMTPRDLGACIDCSARHINAQVAKSHNIALIWNVKDFMSLSEQLRKQIRSAAKKNNLPFKLTCATTRQVVNVVTTKIALKGG

SEQ ID NO: 16279 - protein, 1946 aa, Artificial Sequence
  SARS-CoV-2__MT558672.1__non-structural protein 3 (NSP3)
MAPTKVTFGDDTVIEVQGYKSVNITFELDERIDKVLNEKCSAYTVELGTEVNEFACVVADAVIKTLQPVSELLTPLGIDLDEWSMATYYLFDESGEFKLASHMYCSFYPPDEDEEEGDCEEEEFEPSTQYEYGTEDDYQGKPLEFGATSAALQPEEEQEEDWLDDDSQQTVGQQDGSEDNQTTTIQTIVEVQPQLEMELTPVVQTIEVNSFSGYLKLTDNVYIKNADIVEEAKKVKPTVVVNAANVYLKHGGGVAGALNKATNNAMQVESDDYIATNGPLKVGGSCVLSGHNLAKHCLHVVGPNVNKGEDIQLLKSAYENFNQHEVLLAPLLSAGIFGADPIHSLRVCVDTVRTNVYLAVFDKNLYDKLVSSFLEMKSEKQVEQKIAEIPKEEVKPFITESKPSVEQRKQDDKKIKACVEEVTTTLEETKFLTENLLLYIDINGNLHPDSATLVSDIDITFLKKDAPYIVGDVVQEGVLTAVVIPTKKAGGTTEMLAKALRKVPTDNYITTYPGQGLNGYTVEEAKTVLKKCKSAFYILPSIISNEKQEILGTVSWNLREMLAHAEETRKLMPVCVETKAIVSTIQRKYKGIKIQEGVVDYGARFYFYTSKTTVASLINTLNDLNETLVTMPLGYVTHGLNLEEAARYMRSLKVPATVSVSSPDAVTAYNGYLTSSSKTPEEHFIETISLAGSYKDWSYSGQSTQLGIEFLKRGDKSVYYTSNPTTFHLDGEVITFDNLKTLLSLREVRTIKVFTTVDNINLHTQVVDMSMTYGQQFGPTYLDGADVTKIKPHNSHEGKTFYVLPNDDTLRVEAFEYYHTTDPSFLGRYMSALNHTKKWKYPQVNGLTSIKWADNNCYLATALLTLQQIELKFNPPALQDAYYRARAGEAANFCALILAYCNKTVGELGDVRETMSYLFQHANLDSCKRVLNVVCKTCGQQQTTLKGVEAVMYMGTLSYEQFKKGVQIPCTCGKQATKYLVQQESPFVMMSAPPAQYELKHGTFTCASEYTGNYQCGHYKHITSKETLYCIDGALLTKSSEYKGPITDVFYKENSYTTTIKPVTYKLDGVVCTEIDPKLDNYYKKDNSYFTEQPIDLVPNQPYPNASFDNFKFVCDNIKFADDLNQLTGYKKPASRELKVTFFPDLNGDVVAIDYKHYTPSFKKGAKLLHKPIVWHVNNATNKATYKPNTWCIRCLWSTKPVETSNSFDVLKSEDAQGMDNLACEDLKPVSEEVVENPTIQKDVLECNVKTTEVVGDIILKPANNSLKITEEVGHTDLMAAYVDNSSLTIKKPNELSRVLGLKTLATHGLAAVNSVPWDTIANYAKPFLNKVVSTTTNIVTRCLNRVCTNYMPYFFTLLLQLCTFTRSTNSRIKASMPTTIAKNTVKSVGKFCLEASFNYLKSPNFSKLINIIIWFLLLSVCLGSLIYSTAALGVLMSNLGMPSYCTGYREGYLNSTNVTIATYCTGSIPCSVCLSGLDSLDTYPSLETIQITISSFKWDLTAFGLVAEWFLAYILFTRFFYVLGLAAIMQLFFSYFAVHFISNSWLMWLIINLVQMAPISAMVRMYIFFASFYYVWKSYVHVVDGCNSSTCMMCYKRNRATRVECTTIVNGVRRSFYVYANGGKGFCKLHNWNCVNCDTFCAGSTFISDEVARDLSLQFKRPINPTDQSSYIVDSVTVKNGSIHLYFDKAGQKTYERHSLSHFVNLDNLRANNTKGSLPINVIVFDGKSKCEESSAKSASVYYSQLMCQPILLLDQALVSDVGDSAEVAVKMFDAYVNTFSSTFNVPMEKLKTLVATAEAELAKNVSLDNVLSTFISAARQGFVDSDVETKDVVECLKLSYQSDIEVTGDSCNNYMLTYNKVENMTPRDLGACIDCSARHINAQVAKSHNIALIWNVKDFMSLSEQLRKQIRSAAKKNNLPFKLTCATTRQVVNVVTTKIALKGG

SEQ ID NO: 16280 - protein, 1946 aa, Artificial Sequence
  SARS-CoV-2__MT558681.1__non-structural protein 3 (NSP3)
MAPTKVTFGDDTVIEVQGYKSVNITFELDERIDKVLNEKCSAYTVELGTEVNEFACVVADAVIKTLQPVSELLTPLGIDLDEWSMATYYLFDESGEFKLASHMYCSFYPPDEDEEEGDCEEEEFEPSTQYEYGTEDDYQGKPLEFGATSAALQPEEEQEEDWLDDDSQQTVGQQDGSEDNQTTTIQTIVEVQPQLEMELTPVVQTIEVNSFSGYLKLTDNVYIKNADIVEEAKKVKPTVVVNAANVYLKHGGGVAGALNKATNNAMQVESDDYIATNGPLKVGGSCVLSGHNLAKHCLHVVGPNVNKGEDIQLLKSAYENFNQHEVLLAPLLSAGIFGADPIHSLRVCVDTVRTNVYLAVFDKNLYDKLVSSFLEMKSEKQVEQKIAEIPKEEVKPFITESKPSVEQRKQDDKKIKACVEEVTTTLEETKFLTENLLLYIDINGNLHPDSATLVSDIDITFLKKDAPYIVGDVVQEGVLTAVVIPTKKAGGTTEMLAKALRKVPTDNYITTYPGQGLNGYTVEEAKTVLKKCKSAFYILPSIISNEKQEILGTVSWNLREMLAHAEETRKLMPVCVETKAIVSTIQRKYKGIKIQEGVVDYGARFYFYTSKTTVASLINTLNDLNETLVTMPLGYVTHGLNLEEAARYMRSLKVPATVSVSSPDAVTAYNGYLTSSSKTPEEHFIETISLAGSYKDWSYSGQSTQLGIEFLKRGDKSVYYTSNPTTFHLDGEVITFDNLKTLLSLREVRTIKVFTTVDNINLHTQVVDMSMTYGQQFGPTYLDGADVTKIKPHNSHEGKTFYVLPNDDTLRVEAFEYYHTTDPSFLGRYMSALNHTKKWKYPQVNGLTSIKWADNNCYLATALLTLQQIELKFNPPALQDAYYRARAGEAANFCALILAYCNKTVGELGDVRETMSYLFQHANLDSCKRVLNVVCKTCGQQQTTLKGVEAVMYMGTLSYEQFKKGVQIPCTCGKQATKYLVQQESPFVMMSAPPAQYELKHGTFTCASEYTGNYQCGHYKHITSKETLYCIDGALLTKSSEYKGPITDVFYKENSYTTTIKPVTYKLDGVVCTEIDPKLDNYYKKDNSYFTEQPIDLVPNQPYPNASFDNFKFVCDNIKFADDLNQLTGYKKPASRELKVTFFPDLNGDVVAIDYKHYTPSFKKGAKLLHKPIVWHVNNATNKATYKPNTWCIRCLWSTKPVETSNSFDVLKSEDAQGMDNLACEDLKPVSEEVVENPTIQKDVLECNVKTTEVVGDIILKPANNSLKITEEVGHTDLMAAYVDNSSLTIKKPNELSRVLGLKTLATYGLAAVNSVPWDTIANYAKPFLNKVVSTTTNIVTRCLNRVCTNYMPYFFTLLLQLCTFTRSTNSRIKASMPTTIAKNTVKSVGKFCLEASFNYLKSPNFSKLINIIIWFLLLSVCLGSLIYSTAALGVLMSNLGMPSYCTGYREGYLNSTNVTIATYCTGSIPCSVCLSGLDSLDTYPSLETIQITISSFKWDLTAFGLVAEWFLAYILFTRFFYVLGLAAIMQLFFSYFAVHFISNSWLMWLIINLVQMAPISAMVRMYIFFASFYYVWKSYVHVVDGCNSSTCMMCYKRNRATRVECTTIVNGVRRSFYVYANGGKGFCKLHNWNCVNCDTFCAGSTFISDEVARDLSLQFKRPINPTDQSSYIVDSVTVKNGSIHLYFDKAGQKTYERHSLSHFVNLDNLRANNTKGSLPINVIVFDGKSKCEESSAKSASVYYSQLMCQPILLLDQALVSDVGDSAEVAVKMFDAYVNTFSSTFNVPMEKLKTLVATAEAELAKNVSLDNVLSTFISAARQGFVDSDVETKDVVECLKLSHQSDIEVTGDSCNNYMLTYNKVENMTPRDLGACIDCSARHINAQVAKSHNIALIWNVKDFMSLSEQLRKQIRSAAKKNNLPFKLTCATTRQVVNVVTTKIALKGG

SEQ ID NO: 16281 - protein, 1946 aa, Artificial Sequence
  SARS-CoV-2__MT539166.1__non-structural protein 3 (NSP3)
MAPTKVTFGDDTVIEVQGYKSVNITFELDERIDKVLNEKCSAYTVELGTEVNEFACVVADAVIKTLQPVSELLTPLGIDLDEWSMATYYLFDESGEFKLASHMYCSFYPPDEDEEEGDCEEEEFEPSTQYEYGTEDDYQGKPLEFGATSAALQPEEEQEEDWLDDDSQQTVGQQDGSEDNQTTTIQTIVEVQPQLEMELTPVVQTIEVNSFSGYLKLTGNVYIKNADIVEEAKKVKPTVVVNAANVYLKHGGGVAGALNKATNNAMQVESDDYIATNGPLKVGGSCVLSGHNLAKHCLHVVGPNVNKGEDIQLLKSAYENFNQHEVLLAPLLSAGIFGADPIHSLRVCVDTVRTNVYLAVFDKNLYDKLVSSFLEMKSEKQVEQKIAEIPKEEVKPFITESKPSVEQRKQDDKKIKACVEEVTTTLEETKFLTENLLLYIDINGNLHPDSATLVSDIDITFLKKDAPYIVGDVVQEGVLTAVVIPTKKAGGTTEMLAKALRKVPTDNYITTYPGQGLNGYTVEEAKTVLKKCKSAFYILPSIISNEKQEILGTVSWNLREMLAHAEETRKLMPVCVETKAIVSTIQRKYKGIKIQEGVVDYGARFYFYTSKTTVASLINTLNDLNETLVTMPLGYVTHGLNLEEAARYMRSLKVPATVSVSSPDAVTAYNGYLTSSSKTPEEHFIETISLAGSYKDWSYSGQSTQLGIEFLKRGDKSVYYTSNPTTFHLDGEVITFDNLKTLLSLREVRTIKVFTTVDNINLHTQVVDMSMTYGQQFGPTYLDGADVTKIKPHNSHEGKTFYVLPNDDTLRVEAFEYYHTTDPSFLGRYMSALNHTKKWKYPQVNGLTSIKWADNNCYLATALLTLQQIELKFNPPALQDAYYRARAGEAANFCALILAYCNKTVGELGDVRETMSYLFQHANLDSCKRVLNVVCKTCGQQQTTLKGVEAVMYMGTLSYEQFKKGVQIPCTCGKQATKYLVQQESPFVMMSAPPAQYELKHGTFTCASEYTGNYQCGHYKHITSKETLYCIDGALLTKSSEYKGPITDVFYKENSYTTTIKPVTYKLDGVVCTEIDPKLDNYYKKDNSYFTEQPIDLVPNQPYPNASFDNFKFVCDNIKFADDLNQLTGYKKPASRELKVTFFPDLNGDVVAIDYKHYTPSFKKGAKLLHKPIVWHVNNATNKATYKPNTWCIRCLWSTKPVETSNSFDVLKSEDAQGMDNLACEDLKPVSEEVVENPTIQKDVLECNVKTTEVVGDIILKPANNSLKITEEVGHTDLMAAYVDNSSLTIKKPNELSRVLGLKTLATHGLAAVNSVPWDTIANYAKPFLNKVVSTTTNIVTRCLNRVCTNYMPYFFTLLLQLCTFTRSTNSRIKASMPTTIAKNTVKSVGKFCLEASFNYLKSPNFSKLINIIIWFLLLSVCLGSLIYSTAALGVLMSNLGMPSYCTGYREGYLNSTNVTIATYCTGSIPCSVCLSGLDSLDTYPSLETIQITISSFKWDLTAFGLVAEWFLAYILFTRFFYVLGLAAIMQLFFSYFAVHFISNSWLMWLIINLVQMAPISAMVRMYIFFASFYYVWKSYVHVVDGCNSSTCMMCYKRNRATRVECTTIVNGVRRSFYVYANGGKGFCKLHNWNCVNCDTFCAGSTFISDEVARDLSLQFKRPINPTDQSSYIVDSVTVKNGSIHLYFDKAGQKTYERHSLSHFVNLDNLRANNTKGSLPINVIVFDGKSKCEESSAKSASVYYSQLMCQPILLLDQALVSDVGDSAEVAVKMFDAYVNTFSSTFNVPMEKLKTLVATAEAELAKNVSLDNVLSTFISAARQGFVDSDVETKDVVECLKLSHQSDIEVTGDSCNNYMLTYNKVENMTPRDLGACIDCSARHINAQVAKSHNIALIWNVKDFMSLSEQLRKQIRSAAKKNNLPFKLTCATTRQVVNVVTTKIALKGG

SEQ ID NO: 16282 - protein, 1946 aa, Artificial Sequence
  SARS-CoV-2__MT407653.1__non-structural protein 3 (NSP3)
MAPTKVTFGDDTVIEVQGYKSVNITFELDERIDKVLNEKCSAYTVELGTEVNEFACVVADAVIKTLQPVSELLTPLGIDLDEWSMATYYLFDESGEFKLASHMYCSFYPPDEDEEEGDCEEEEFEPSTQYEYGTEDDYQGKPLEFGATSAALQPEEEQEEDWLDDDSQQTVGQQDGSEDNQTTTIQTIVEVQPQLEMELTPVVQTIEVNSFSGYLKLTDNVHIKNADIVEEAKKVKPTVVVNAANVYLKHGGGVAGALNKATNNAMQVESDDYIATNGPLKVGGSCVLSGHNLAKHCLHVVGPNVNKGEDIQLLKSAYENFNQHEVLLAPLLSAGIFGADPIHSLRVCVDTVRTNVYLAVFDKNLYDKLVSSFLEMKSEKQVEQKIAEIPKEEVKPFITESKPSVEQRKQDDKKIKACVEEVTTTLEETKFLTENLLLYIDINGNLHPDSATLVSDIDITFLKKDAPYIVGDVVQEGVLTAVVIPTKKAGGTTEMLAKALRKVPTDNYITTYPGQGLNGYTVEEAKTVLKKCKSAFYILPSIISNEKQEILGTVSWNLREMLAHAEETRKLMPVCVETKAIVSTIQRKYKGIKIQEGVVDYGARFYFYTSKTTVASLINTLNDLNETLVTMPLGYVTHGLNLEEAARYMRSLKVPATVSVSSPDAVTAYNGYLTSSSKTPEEHFIETISLAGSYKDWSYSGQSTQLGIEFLKRGDKSVYYTSNPTTFHLDGEVITFDNLKTLLSLREVRTIKVFTTVDNINLHTQVVDMSMTYGQQFGPTYLDGADVTKIKPHNSHEGKTFYVLPNDDTLRVEAFEYYHTTDPSFLGRYMSALNHTKKWKYPQVNGLTSIKWADNNCYLATALLTLQQIELKFNPPALQDAYYRARAGEAANFCALILAYCNKTVGELGDVRETMSYLFQHANLDSCKRVLNVVCKTCGQQQTTLKGVEAVMYMGTLSYEQFKKGVQIPCTCGKQATKYLVQQESPFVMMSAPPAQYELKHGTFTCASEYTGNYQCGHYKHITSKETLYCIDGALLTKSSEYKGPITDVFYKENSYTTTIKPVTYKLDGVVCTEIDPKLDNYYKKDNSYFTEQPIDLVPNQPYPNASFDNFKFVCDNIKFADDLNQLTGYKKPASRELKVTFFPDLNGDVVAIDYKHYTPSFKKGAKLLHKPIVWHVNNATNKATYKPNTWCIRCLWSTKPVETSNSFDVLKSEDAQGMDNLACEDLKPVSEEVVENPTIQKDVLECNVKTTEVVGDIILKPANNSLKITEEVGHTDLMAAYVDNSSLTIKKPNELSRVLGLKTLATHGLAAVNSVPWDTIANYAKPFLNKVVSTTTNIVTRCLNRVCTNYMPYFFTLLLQLCTFTRSTNSRIKASMPTTIAKNTVKSVGKFCLEASFNYLKSPNFSKLINIIIWFLLLSVCLGSLIYSTAALGVLMSNLGMPSYCTGYREGYLNSTNVTIATYCTGSIPCSVCLSGLDSLDTYPSLETIQITISSFKWDLTAFGLVAEWFLAYILFTRFFYVLGLAAIMQLFFSYFAVHFISNSWLMWLIINLVQMAPISAMVRMYIFFASFYYVWKSYVHVVDGCNSSTCMMCYKRNRATRVECTTIVNGVRRSFYVYANGGKGFCKLHNWNCVNCDTFCAGSTFISDEVARDLSLQFKRPINPTDQSSYIVDSVTVKNGSIHLYFDKAGQKTYERHSLSHFVNLDNLRANNTKGSLPINVIVFDGKSKCEESSAKSASVYYSQLMCQPILLLDQALVSDVGDSAEVAVKMFDAYVNTFSSTFNVPMEKLKTLVATAEAELAKNVSLDNVLSTFISAARQGFVDSDVETKDVVECLKLSHQSDIEVTGDSCNNYMLTYNKVENMTPRDLGACIDCSARHINAQVAKSHNIALIWNVKDFMSLSEQLRKQIRSAAKKNNLPFKLTCATTRQVVNVVTTKIALKGG

SEQ ID NO: 16283 - protein, 1946 aa, Artificial Sequence
  SARS-CoV-2__MT534313.1__non-structural protein 3 (NSP3)
MAPTKVTFGDDTVIEVQGYKSVNITFELDERIDKVLNEKCSAYTVELGTEVNEFACVVADAVIKTLQPVSELLTPLGIDLDEWSMATYYLFDESGEFKLASHMYCSFYPPDEDEEEGDCEEEEFEPSTQYEYGTEDDYQGRPLEFGATSAALQPEEEQEEDWLDDDSQQTVGQQDGSEDNQTTTIQTIVEVQPQLEMELTPVVQTIEVNSFSGYLKLTDNVYIKNADIVEEAKKVKPTVVVNAANVYLKHGGGVAGALNKATNNAMQVESDDYIATNGPLKVGGSCVLSGHNLAKHCLHVVGPNVNKGEDIQLLKSAYENFNQHEVLLAPLLSAGIFGADPIHSLRVCVDTVRTNVYLAVFDKNLYDKLVSSFLEMKSEKQVEQKIAEIPKEEVKPFITESKPSVEQRKQDDKKIKACVEEVTTTLEETKFLTENLLLYIDINGNLHPDSATLVSDIDITFLKKDAPYIVGDVVQEGVLTAVVIPTKKAGGTTEMLAKALRKVPTDNYITTYPGQGLNGYTVEEAKTVLKKCKSAFYILPSIISNEKQEILGTVSWNLREMLAHAEETRKLMPVCVETKAIVSTIQRKYKGIKIQEGVVDYGARFYFYTSKTTVASLINTLNDLNETLVTMPLGYVTHGLNLEEAARYMRSLKVPATVSVSSPDAVTAYNGYLTSSSKTPEEHFIETISLAGSYKDWSYSGQSTQLGIEFLKRGDKSVYYTSNPTTFHLDGEVITFDNLKTLLSLREVRTIKVFTTVDNINLHTQVVDMSMTYGQQFGPTYLDGADVTKIKPHNSHEGKTFYVLPNDDTLRVEAFEYYHTTDPSFLGRYMSALNHTKKWKYPQVNGLTSIKWADNNCYLATALLTLQQIELKFNPPALQDAYYRARAGEAANFCALILAYCNKTVGELGDVRETMSYLFQHANLDSCKRVLNVVCKTCGQQQTTLKGVEAVMYMGTLSYEQFKKGVQIPCTCGKQATKYLVQQESPFVMMSAPPAQYELKHGTFTCASEYTGNYQCGHYKHITSKETLYCIDGALLTKSSEYKGPITDVFYKENSYTTTIKPVTYKLDGVVCTEIDPKLDNYYKKDNSYFTEQPIDLVPNQPYPNASFDNFKFVCDNIKFADDLNQLTGYKKPASRELKVTFFPDLNGDVVAIDYKHYTPSFKKGAKLLHKPIVWHVNNATNKATYKPNTWCIRCLWSTKPVETSNSFDVLKSEDAQGMDNLACEDLKPVSEEVVENPTIQKDVLECNVKTTEVVGDIILKPANNSLKITEEVGHTDLMAAYVDNSSLTIKKPNELSRVLGLKTLATHGLAAVNSVPWDTIANYAKPFLNKVVSTTTNIVTRCLNRVCTNYMPYFFTLLLQLCTFTRSTNSRIKASMPTTIAKNTVKSVGKFCLEASFNYLKSPNFSKLINIIIWFLLLSVCLGSLIYSTAALGVLMSNLGMPSYCTGYREGYLNSTNVTIATYCTGSIPCSVCLSGLDSLDTYPSLETIQITISSFKWDLTAFGLVAEWFLAYILFTRFFYVLGLAAIMQLFFSYFAVHFISNSWLMWLIINLVQMAPISAMVRMYIFFASFYYVWKSYVHVVDGCNSSTCMMCYKRNRATRVECTTIVNGVRRSFYVYANGGKGFCKLHNWNCVNCDTFCAGSTFISDEVARDLSLQFKRPINPTDQSSYIVDSVTVKNGSIHLYFDKAGQKTYERHSLSHFVNLDNLRANNTKGSLPINVIVFDGKSKCEESSAKSASVYYSQLMCQPILLLDQALVSDVGDSAEVAVKMFDAYVNTFSSTFNVPMEKLKTLVATAEAELAKNVSLDNVLSTFISAARQGFVDSDVETKDVVECLKLSHQSDIEVTGDSCNNYMLTYNKVENMTPRDLGACIDCSARHINAQVAKSHNIALIWNVKDFMSLSEQLRKQIRSAAKKNNLPFKLTCATTRQVVNVVTTKIALKGG

SEQ ID NO: 16284 - protein, 1946 aa, Artificial Sequence
  SARS-CoV-2__MT536961.1__non-structural protein 3 (NSP3)
MAPTKVTFGDDTVIEVQGYKSVNITFELDERIDKVLNEKCSAYTVELGTEVNEFACVVADAVIKTLQPVSELLTPLGIDLDEWSMATYYLFDESGEFKLASHMYCSFYPPDEDEEEGDCEEEEFEPSTQYEYGTEDDYQGKPLEFGATSAALQPEEEQEEDWLDDDSQQTVGQQDGSEDNQTTTIQTIVEVQPQLEMELTPVVQTIEVNSFSGYLKLTDNVYIKNADIVEEAKKVKPTVVVNAANVYLKHGGGVAGALNKATNNAMQVESDDYIATNGPLKVGGSCVLSGHNLAKHCLHVVGPNVNKGEDIQLLKSAYENFNQHEVLLAPLLSAGIFGADPIHSLRVCVDTVRTNVYLAVFDKNLYDKLVSSFLEMKSEKQVEQKIAEIPKEEVKPFITESKPSVEQRKQDDKKIKACVEEVTTTLEETKFLTENLLLYIDINGNLHPDSATLVSDIDITFLKKDAPYIVGDVVQEGVLTAVVIPTKKAGGTTEMLAKALRKVPTDNYITTYPGQGLNGYTVEEAKTVLKKCKSAFYILPSIISNEKQEILGTVSWNLREMLAHAEETRKLMPVCVETKAIVSTIQRKYKGIKIQEGVVDYGARFYFYTSKTTVASLINTLNDLNETLVTMPLGYVTHGLNLEEAARYMRSLKVPATVSVSSPDAVTAYNGYLTSSSKTPEEHFIETISLAGSYKDWSYSGQSTQLGIEFLKRGDKSVYYTSNPTTFHLDGEVITFDNLKTLLSLREVRTIKVFTTVDNINLHTQVVDMSMTYGQQFGPTYLDGADVTKIKPHNSHEGKTFYVLPNDDTLRVEAFEYYHTTDPSFLGRYMSALNHTKKWKYPQVNGLTSIKWADNNCYLATALLTLQQIELKFNPPALQDAYYRARAGEAANFCALILAYCNKTVGELGDVRETMSYLFQHANLDSCKRVLNVVCKTCGQQQTTLKGVEAVMYMGTLSYEQFKKGVQIPCTCGKQATKYLVQQESPFVMMSAPPAQYELKHGTFTCASEYTGNYQCGHYKHITSKETLYCIDGALLTKSSEYKGPITDVFYKENSYTTTIKPVTYKLDGVVCTEIDPKLDNYYKKDNSYFTEQPIDLVPNQPYPNASFDNFKFVCDNIKFADDLNQLTGYKKPASRELKVTFFPDLNGDVVAIDYKHYTPSFKKGAKLLHKPIVWHVNNATNKATYKPNTWCIRCLWSTKPVETSNSFDVLKSEDAQGMDNLACEDLKPVSEEVVENPTIQKDVLECNVKTTEVVGDIILKPANNRLKITEEVGHTDLMAAYVDNSSLTIKKPNELSRVLGLKTLATHGLAAVNSVPWDTIANYAKPFLNKVVSTTTNIVTRCLNRVCTNYMPYFFTLLLQLCTFTRSTNSRIKASMPTTIAKNTVKSVGKFCLEASFNYLKSPNFSKLINIIIWFLLLSVCLGSLIYSTAALGVLMSNLGMPSYCTGYREGYLNSTNVTIATYCTGSIPCSVCLSGLDSLDTYPSLETIQITISSFKWDLTAFGLVAEWFLAYILFTRFFYVLGLAAIMQLFFSYFAVHFISNSWLMWLIINLVQMAPISAMVRMYIFFASFYYVWKSYVHVVDGCNSSTCMMCYKRNRATRVECTTIVNGVRRSFYVYANGGKGFCKLHNWNCVNCDTFCAGSTFISDEVARDLSLQFKRPINPTDQSSYIVDSVTVKNGSIHLYFDKAGQKTYERHSLSHFVNLDNLRANNTKGSLPINVIVFDGKSKCEESSAKSASVYYSQLMCQPILLLDQALVSDVGDSAEVAVKMFDAYVNTFSSTFNVPMEKLKTLVATAEAELAKNVSLDNVLSTFISAARQGFVDSDVETKDVVECLKLSHQSDIEVTGDSCNNYMLTYNKVENMTPRDLGACIDCSARHINAQVAKSHNIALIWNVKDFMSLSEQLRKQIRSAAKKNNLPFKLTCATTRQVVNVVTTKIALKGG

SEQ ID NO: 16285 - protein, 1946 aa, Artificial Sequence
  SARS-CoV-2__MT536977.1__non-structural protein 3 (NSP3)
MAPTKVTFGDDTVIEVQGYKSVNITFELDERIDKVLNEKCSAYTVELGTEVNEFACVVADAVIKTLQPVSELLTPLGIDLDEWSMATYYLFDESGEFKLASHMYCSFYPPDEDEEEGDCEEEEFEPSTQYEYGTEDDYQGKPLEFGATSAALQPEEEQEEDWLDDDSQQTVGQQDGSEDNQTTTIQTIVEVQPQLEMELTPVVQTIEVNSFSGYLKLTDNVYIKNADIVEEAKKVKPTVVVNAANVYLKHGGGVAGALNKATNNAMQVESDDYIATNGPLKVGGSCVLSGHNLAKHCLHVVGPNVNKGEDIQLLKSAYENFNQHEVLLAPLLSAGIFGADPIHSLRVCVDTVRTNVYLAVFDKNLYDKLVSSFLEMKSEKQVEQKIAEIPKEEVKPFITESKPSVEQRKQDDKKIKACVEEVTTTLEETKFLTENLLLYIDINGNLHPDSATLVSDIDITFLKKDAPYIVGDVVQEGVLTAVVIPTKKAGGTTEMLAKALRKVPTDNYITTYPGQGLNGYTVEEAKTVLKKCKSAFYILPSIISNEKQEILGTVSWNLREMLAHAEETRKLMPVCVETKAIVSTIQRKYKGIKIQEGVVDYGARFYFYTSKTTVASLINTLNDLNETLVTMPLGYVTHGLNLEEAARYMRSLKVPATVSVSSPDAVTAYNGYLTSSSKTPEEHFIETISLAGSYKDWSYSGQSTQLGIEFLKRGDKSVYYTSNPTTFHLDGEVITFDNLKTLLSLREVRTIKVFTTVDNINLHTQVVDMSMTYGQQFGPTYLDGADVTKIKPHNSHEGKTFYVLPNDDTLRVEAFEYYHTTDPSFLGRYMSALNHTKKWKYPQVNGLTSIKWADNNCYLATALLTLQQIELKFNPPALQDAYYRARAGEAANFCALILAYCNKTVGELGDVRETMSYLFQHANLDSCKRVLNVVCKTCGQQQTTLKGVEAVMYMGTLSYEQFKKGVQIPCTCGKQATKYLVQQESPFVMMSAPPAQYELKHGTFTCASEYTGNYQCGHYKHITSKETLYCIDGALLTKSSEYKGPITDVFYKENSYTTTIKPVTYKLDGVVCTEIDPKLDNYYKKDNSYFTEQPIDLVPNQPYPNASFDNFKFVCDNIKFADDLNQLTGYKKPASRELKVTFFPDLNGDVVAIDYKHYTPSFKKGAKLLHKPIVWHVNNATNKATYKPNTWCIRCLWSTKPVETSNSFDVLKSEDAQGMDNLACEDLKPVSEEVLENPTIQKDVLECNVKTTEVVGDIILKPANNSLKITEEVGHTDLMAAYVDNSSLTIKKPNELSRVLGLKTLATHGLAAVNSVPWDTIANYAKPFLNKVVSTTTNIVTRCLNRVCTNYMPYFFTLLLQLCTFTRSTNSRIKASMPTTIAKNTVKSVGKFCLEASFNYLKSPNFSKLINIIIWFLLLSVCLGSLIYSTAALGVLMSNLGMPSYCTGYREGYLNSTNVTIATYCTGSIPCSVCLSGLDSLDTYPSLETIQITISSFKWDLTAFGLVAEWFLAYILFTRFFYVLGLAAIMQLFFSYFAVHFISNSWLMWLIINLVQMAPISAMVRMYIFFASFYYVWKSYVHVVDGCNSSTCMMCYKRNRATRVECTTIVNGVRRSFYVYANGGKGFCKLHNWNCVNCDTFCAGSTFISDEVARDLSLQFKRPINPTDQSSYIVDSVTVKNGSIHLYFDKAGQKTYERHSLSHFVNLDNLRANNTKGSLPINVIVFDGKSKCEESSAKSASVYYSQLMCQPILLLDQALVSDVGDSAEVAVKMFDAYVNTFSSTFNVPMEKLKTLVATAEAELAKNVSLDNVLSTFISAARQGFVDSDVETKDVVECLKLSHQSDIEVTGDSCNNYMLTYNKVENMTPRDLGACIDCSARHINAQVAKSHNIALIWNVKDFMSLSEQLRKQIRSAAKKNNLPFKLTCATTRQVVNVVTTKIALKGG

SEQ ID NO: 16286 - protein, 1946 aa, Artificial Sequence
  SARS-CoV-2__MT532437.1__non-structural protein 3 (NSP3)
MAPTKVTFGDDTVIEVQGYKSVNITFELDERIDKVLNEKCSAYTVELGTEVNEFACVVADAVIKTLQPVSELLTPLGIDLDEWSMATYYLFDESGEFKLASHMYCSFYPPDEDEEEGDCEEEEFEPSTQYEYGTEDDYQGKPLEFGATSAALQPEEEQEEDWLDDDSQQTVGQQDGSEDNQTTTIQTIVEVQPQLEMELTPVVQTIEVNSFSGYLKLTDNVYIKNADIVEEAKKVKPTVVVNAANVYLKHGGGVAGALNKATNNAMQVESDDYIATNGPLKVGGSCVLSGHNLAKHCLHVVGPNVNKGEDIQLLKSAYENFNQHEVLLAPLLSAGIFGADPIHSLRVCVDTVRTNVYLAVFDKNLYDKLVSSFLEMKSEKQVEQKIAEIPKEEVKPFITESKPSVEQRKQDDKKIKACVEEVTTTLEETKFLTENLLLYIDINGNLHPDSATLVSDIDITFLKKDAPYIVGDVVQEGVLTAVVIPTKKAGGTTEMLAKALRKVPTDNYITTYPGQGLNGYTVEEAKTVLKKCKSAFYILPSIISNEKQEILGTVSWNLREMLAHAEETRKLMPVCVETKAIVSTIQRKYKGIKIQEGVVDYGARFYFYTSKTTVASLINTLNDLNETLVTMPLGYVTHGLNLEEAARYMRSLKVPATVSVSSPDAVTAYNGYLTSSSKTPEEHFIETISLAGSYKDWSYSGQSTQLGIEFLKRGDKSVYYTSNPTTFHLDGEVITFDNLKTLLSLREVRTIKVFTTVDNINLHTQVVDMSMTYGQQFGPTYLDGADVTKIKPHNSHEGKTFYVLPNDDTLRVEAFEYYHTTDPSFLGRYMSALNHTKKWKYPQVNGLTSIKWADNNCYLATALLTLQQIELKFNPPALQDAYYRARAGEAANFCALILAYCNKTVGELGDVRETMSYLFQHANLDSCKRVLNVVCKTCGQQQTTLKGVEAVMYMGTLSYEQFKKGVQIPCTCGKQATKYLVQQESPFVMMSAPPAQYELKHGTFTCASEYTGNYQCGHYKHITSKETLYCIDGALLTKSSEYKGPITDVFYKENSYTTTIKPVTYKLDGVVCTEIDPKLDNYYKKDNSYFTEQPIDLVPNQPYPNASFDNFKFVCDNIKFADDLNQLTGYKKPASRELKVTFFPDLNGDVVAIDYKHYTPSFKKRAKLLHKPIVWHVNNATNKATYKPNTWCIRCLWSTKPVETSNSFDVLKSEDAQGMDNLACEDLKPVSEEVVENPTIQKDVLECNVKTTEVVGDIILKPANNSLKITEEVGHTDLMAAYVDNSSLTIKKPNELSRVLGLKTLATHGLAAVNSVPWDTIANYAKPFLNKVVSTTTNIVTRCLNRVCTNYMPYFFTLLLQLCTFTRSTNSRIKASMPTTIAKNTVKSVGKFCLEASFNYLKSPNFSKLINIIIWFLLLSVCLGSLIYSTAALGVLMSNLGMPSYCTGYREGYLNSTNVTIATYCTGSIPCSVCLSGLDSLDTYPSLETIQITISSFKWDLTAFGLVAEWFLAYILFTRFFYVLGLAAIMQLFFSYFAVHFISNSWLMWLIINLVQMAPISAMVRMYIFFASFYYVWKSYVHVVDGCNSSTCMMCYKRNRATRVECTTIVNGVRRSFYVYANGGKGFCKLHNWNCVNCDTFCAGSTFISDEVARDLSLQFKRPINPTDQSSYIVDSVTVKNGSIHLYFDKAGQKTYERHSLSHFVNLDNLRANNTKGSLPINVIVFDGKSKCEESSAKSASVYYSQLMCQPILLLDQALVSDVGDSAEVAVKMFDAYVNTFSSTFNVPMEKLKTLVATAEAELAKNVSLDNVLSTFISAARQGFVDSDVETKDVVECLKLSHQSDIEVTGDSCNNYMLTYNKVENMTPRDLGACIDCSARHINAQVAKSHNIALIWNVKDFMSLSEQLRKQIRSAAKKNNLPFKLTCATTRQVVNVVTTKIALKGG

SEQ ID NO: 16287 - protein, 1946 aa, Artificial Sequence
  SARS-CoV-2__MT517420.1__non-structural protein 3 (NSP3)
MAPTKVTFGDDTVIEVQGYKSVNITFELDERIDKVLNEKCSAYTVELGTEVNEFACVVADAVIKTLQPVSELLTPLGIDLDEWSMATYYLFDESGEFKLASHMYCSFYPPDEDEEEGDCEEEEFEPSTQYEYGTEDDYQGKPLEFGATSAALQHEEEQEEDWLDDDSQQTVGQQDGSEDNQTTTIQTIVEVQPQLEMELTPVVQTIEVNSFSGYLKLTDNVYIKNADIVEEAKKVKPTVVVNAANVYLKHGGGVAGALNKATNNAMQVESDDYIATNGPLKVGGSCVLSGHNLAKHCLHVVGPNVNKGEDIQLLKSAYENFNQHEVLLAPLLSAGIFGADPIHSLRVCVDTVRTNVYLAVFDKNLYDKLVSSFLEMKSEKQVEQKIAEIPKEEVKPFITESKPSVEQRKQDDKKIKACVEEVTTTLEETKFLTENLLLYIDINGNLHPDSATLVSDIDITFLKKDAPYIVGDVVQEGVLTAVVIPTKKAGGTTEMLAKALRKVPTDNYITTYPGQGLNGYTVEEAKTVLKKCKSAFYILPSIISNEKQEILGTVSWNLREMLAHAEETRKLMPVCVETKAIVSTIQRKYKGIKIQEGVVDYGARFYFYTSKTTVASLINTLNDLNETLVTMPLGYVTHGLNLEEAARYMRSLKVPATVSVSSPDAVTAYNGYLTSSSKTPEEHFIETISLAGSYKDWSYSGQSTQLGIEFLKRGDKSVYYTSNPTTFHLDGEVITFDNLKTLLSLREVRTIKVFTTVDNINLHTQVVDMSMTYGQQFGPTYLDGADVTKIKPHNSHEGKTFYVLPNDDTLRVEAFEYYHTTDPSFLGRYMSALNHTKKWKYPQVNGLTSIKWADNNCYLATALLTLQQIELKFNPPALQDAYYRARAGEAANFCALILAYCNKTVGELGDVRETMSYLFQHANLDSCKRVLNVVCKTCGQQQTTLKGVEAVMYMGTLSYEQFKKGVQIPCTCGKQATKYLVQQESPFVMMSAPPAQYELKHGTFTCASEYTGNYQCGHYKHITSKETLYCIDGALLTKSSEYKGPITDVFYKENSYTTTIKPVTYKLDGVVCTEIDPKLDNYYKKDNSYFTEQPIDLVPNQPYPNASFDNFKFVCDNIKFADDLNQLTGYKKPASRELKVTFFPDLNGDVVAIDYKHYTPSFKKGAKLLHKPIVWHVNNATNKATYKPNTWCIRCLWSTKPVETSNSFDVLKSEDAQGMDNLACEDLKPVSEEVVENPTIQKDVLECNVKTTEVVGDIILKPANNSLKITEEVGHTDLMAAYVDNSSLTIKKPNELSRVLGLKTLATHGLAAVNSVPWDTIANYAKPFLNKVVSTTTNIVTRCLNRVCTNYMPYFFTLLLQLCTFTRSTNSRIKAFMPTTIAKNTVKSVGKFCLEASFNYLKSPNFSKLINIIIWFLLLSVCLGSLIYSTAALGVLMSNLGMPSYCTGYREGYLNSTNVTIATYCTGSIPCSVCLSGLDSLDTYPSLETIQITISSFKWDLTAFGLVAEWFLAYILFTRFFYVLGLAAIMQLFFSYFAVHFISNSWLMWLIINLVQMAPISAMVRMYIFFASFYYVWKSYVHVVDGCNSSTCMMCYKRNRATRVECTTIVNGVRRSFYVYANGGKGFCKLHNWNCVNCDTFCAGSTFISDEVARDLSLQFKRPINPTDQSSYIVDSVTVKNGSIHLYFDKAGQKTYERHSLSHFVNLDNLRANNTKGSLPINVIVFDGKSKCEESSAKSASVYYSQLMCQPILLLDQALVSDVGDSAEVAVKMFDAYVNTFSSTFNVPMEKLKTLVATAEAELAKNVSLDNVLSTFISAARQGFVDSDVETKDVVECLKLSHQSDIEVTGDSCNNYMLTYNKVENMTPRDLGACIDCSARHINAQVAKSHNIALIWNVKDFMSLSEQLRKQIRSAAKKNNLPFKLTCATTRQVVNVVTTKIALKGG

SEQ ID NO: 16288 - protein, 1946 aa, Artificial Sequence
  SARS-CoV-2__MT517423.1__non-structural protein 3 (NSP3)
MAPTKVTFGDDTVIEVQGYKSVNITFELDERIDKVLNEKCSAYTVELGTEVNEFACVVADAVIKTLQPVSELLTPLGIDLDEWSMATYYLFDESGEFKLASHMYCSFYPPDEDEEEGDCEEEEFEPSTQYEYGTEDDYQGKPLEFGATSAALQPEEEQEEDWLDDDSQQTVGQQDGSEDNQTTTIQTIVEVQPQLEMELTPVVQTIEVNSFSGYLKLTDNVYIKNADIVEEAKKVKPTVVVNAANVYLKHGGGVAGALNKATNNAMQVESDDYIATNGPLKVGGSCVLSGHNLAKHCLHVVGPNVNKGEDIQLLKSAYENFNQHEVLLAPLLSAGIFGADPIHSLRVCVDTVRTNVYLAVFDKNLYDKLVSSFLEMKSEKQVEQKIAEIPKEEVKPFITESKPSVEQRKQDDNKIKACVEEVTTTLEETKFLTENLLLYIDINGNLHPDSATLVSDIDITFLKKDAPYIVGDVVQEGVLTAVVIPTKKAGGTTEMLAKALRKVPTDNYITTYPGQGLNGYTVEEAKTVLKKCKSAFYILPSIISNEKQEILGTVSWNLREMLAHAEETRKLMPVCVETKAIVSTIQRKYKGIKIQEGVVDYGARFYFYTSKTTVASLINTLNDLNETLVTMPLGYVTHGLNLEEAARYMRSLKVPATVSVSSPDAVTAYNGYLTSSSKTPEEHFIETISLAGSYKDWSYSGQSTQLGIEFLKRGDKSVYYTSNPTTFHLDGEVITFDNLKTFLSLREVRTIKVFTTVDNINLHTQVVDMSMTYGQQFGPTYLDGADVTKIKPHNSHEGKTFYVLPNDDTLRVEAFEYYHTTDPSFLGRYMSALNHTKKWKYPQVNGLTSIKWADNNCYLATALLTLQQIELKFNPPALQDAYYRARAGEAANFCALILAYCNKTVGELGDVRETMSYLFQHANLDSCKRVLNVVCKTCGQQQTTLKGVEAVMYMGTLSYEQFKKGVQIPCTCGKQATKYLVQQESPFVMMSAPPAQYELKHGTFTCASEYTGNYQCGHYKHITSKETLYCIDGALLTKSSEYKGPITDVFYKENSYTTTIKPVTYKLDGVVCTEIDPKLDNYYKKDNSYFTEQPIDLVPNQPYPNASFDNFKFVCDNIKFADDLNQLTGYKKPASRELKVTFFPDLNGDVVAIDYKHYTPSFKKGAKLLHKPIVWHVNNATNKATYKPNTWCIRCLWSTKPVETSNSFDVLKSEDAQGMDNLACEDLKPVSEEVVENPTIQKDVLECNVKTTEVVGDIILKPANNSLKITEEVGHTDLMAAYVDNSSLTIKKPNELSRVLGLKTLATHGLAAVNSVPWDTIANYAKPFLNKVVSTTTNIVTRCLNRVCTNYMPYFFTLLLQLCTFTRSTNSRIKASMPTTIAKNTVKSVGKFCLEASFNYLKSPNFSKLINIIIWFLLLSVCLGSLIYSTAALGVLMSNLGMPSYCTGYREGYLNSTNVTIATYCTGSIPCSVCLSGLDSLDTYPSLETIQITISSFKWDLTAFGLVAEWFLAYILFTRFFYVLGLAAIMQLFFSYFAVHFISNSWLMWLIINLVQMAPISAMVRMYIFFASFYYVWKSYVHVVDGCNSSTCMMCYKRNRATRVECTTIVNGVRRSFYVYANGGKGFCKLHNWNCVNCDTFCAGSTFISDEVARDLSLQFKRPINPTDQSSYIVDSVTVKNGSIHLYFDKAGQKTYERHSLSHFVNLDNLRANNTKGSLPINVIVFDGKSKCEESSAKSASVYYSQLMCQPILLLDQALVSDVGDSAEVAVKMFDAYVNTFSSTFNVPMEKLKTLVATAEAELAKNVSLDNVLSTFISAARQGFVDSDVETKDVVECLKLSHQSDIEVTGDSCNNYMLTYNKVENMTPRDLGACIDCSARHINAQVAKSHNIALIWNVKDFMSLSEQLRKQIRSAAKKNNLPFKLTCATTRQVVNVVTTKIALKGG

SEQ ID NO: 16289 - protein, 1946 aa, Artificial Sequence
  SARS-CoV-2__MT517424.1__non-structural protein 3 (NSP3)
MAPTKVTFGDDTVIEVQGYKSVNITFELDERIDKVLNEKCSAYTVELGTEVNEFACVVADAVIKTLQPVSELLTPLGIDLDEWSMATYYLFDESGEFKLASHMYCSFYPPDEDEEEGDCEEEEFEPSTQYEYGTEDDYQGKPLEFGATSAALQHEEEQEEDWLDDDSQQTVGQQDGSEDNQTTTIQTIVEVQPQLEMELTPVVQTIEVNSFSGYLKLTDNVYIKNADIVEEAKKVKPTVVVNAANVYLKHGGGVAGALNKATNNAMQVESDDYIATNGPLKVGGSCVLSGHNLAKHCLHVVGPNVNKGEDIQLLKSAYENFNQHEVLLAPLLSAGIFGADPIHSLRVCVDTVRTNVYLAVFDKNLYDKLVSSFLEMKSEKQVEQKIAEIPKEEVKPFITESKPSVEQRKQDDKKIKACVEEVTTTLEETKFLTENLLLYIDINGNLHPDSATLVSDIDITFLKKDAPYIVGDVVQEGVLTAVVIPTKKAGGTTEMLAKALRKVPTDNYITTYPGQGLNGYTVEEAKTVLKKCKSAFYILPSIISNEKQEILGTVSWNLREMLAHAEETRKLMPVCVETKAIVSTIQRKYKGIKIQEGVVDYGARFYFYTSKTTVASLINTLNDLNETLVTMPLGYVTHGLNLEEAARYMRSLKVPATVSVSSPDAVTAYNGYLTSSSKTPEEHFIETISLAGSYKDWSYSGQSTQLGIEFLKRGDKSVYYTSNPTTFHLDGEVITFDNLKTLLSLREVRTIKVFTTVDNINLHTQVVDMSMTYGQQFGPTYLDGADVTKIKPHNSHEGKTFYVLPNDDTLRVEAFEYYHTTDPSFLGRYMSALNHTKKWKYPQVNGLTSIKWADNNCYLATALLTLQQIELKFNPPALQDAYYRARAGEAANFCALILAYCNKTVGELGDVRETMSYLFQHANLDSCKRVLNVVCKTCGQQQTTLKGVEAVMYMGTLSYEQFKKGVQIPCTCGKQATKYLVQQESPFVMMSAPPAQYELKHGTFTCASEYTGNYQCGHYKHITSKETLYCIDGALLTKSSEYKGPITDVFYKENSYTTTIKPVTYKLDGVVCTEIDPKLDNYYKKDNSYFTEQPIDLVPNQPYPNASFDNFKFVCDNIKFADDLNQLTGYKKPASRELKVTFFPDLNGDVVAIDYKHYTPSFKKGAKLLHKPIVWHVNNATNKATYKPNTWCIRCLWSTKPVETSNSFDVLKSEDAQGMDNLACEDLKPVSEEVVENPTIQKDVLECNVKTTEVVGDIILKPANNSLKITEEVGHTDLMAAYVDNSSLTIKKPNELSRVLGLKTLATHGLAAVNSVPWDTIANYAKPFLNKVVSTTTNIVTRCLNRVCTNYMPYFFTLLLQLCTFTRSTNSRIKASMPTTIAKNTVKSVGKFCLEASFNYLKSPNFSKLINIIIWFLLLSVCLGSLIYSTAALGVLMSNLGMPSYCTGYREGYLNSTNVTIATYCTGSIPCSVCLSGLDSLDTYPSLETIQITISSFKWDLTAFGLVAEWFLAYILFTRFFYVLGLAAIMQLFFSYFAVHFISNSWLMWLIINLVQMAPISAMVRMYIFFASFYYVWKSYVHVVDGCNSSTCMMCYKRNRATRVECTTIVNGVRRSFYVYANGGKGFCKLHNWNCVNCDTFCAGSTFISDEVARDLSLQFKRPINPTDQSSYIVDSVTVKNGSIHLYFDKAGQKTYERHSLSHFVNLDNLRANNTKGSLPINVIVFDGKSKCEESSAKSASVYYSQLMCQPILLLDQALVSDVGDSAEVAVKMFDAYVNTFSSTFNVPMEKLKTLVATAEAELAKNVSLDNVLSTFISAARQGFVDSDVETKDVVECLKLSHQSDIEVTGDSCNNYMLTYNKVENMTPRDLGACIDCSARHINAQVAKSHNIALIWNVKDFMSLSEQLRKQIRSAAKKNNLPFKLTCATTRQVVNVVTTKIALKGG

SEQ ID NO: 16290 - protein, 1946 aa, Artificial Sequence
  SARS-CoV-2__MT517425.1__non-structural protein 3 (NSP3)
MAPTKVTFGDDTVIEVQGYKSVNITFELDERIDKVLNEKCSAYTVELGTEVNEFACVVADAVIKTLQPVSELLTPLGIDLDEWSMATYYLFDESGEFKLASHMYCSFYPPDEDEEEGDCEEEEFEPSTQYEYGTEDDYQGKPLEFGATSAALQPEEEQEEDWLDDDSQQTVGQQDGSEDNQTTTIQTIVEVQPQLEMELTPVVQTIEVNSFSGYLKLTDNVYIKNADIVEEAKKVKPTVVVNAANVYLKHGGGVAGALNKATNNAMQVESDDYIATNGPLKVGGSCVLSGHNLAKHCLHVVGPNVNKGEDIQLLKSAYENFNQHEVLLAPLLSAGIFGADPIHSLRVCVDTVRTNVYLAVFDKNLYDKLVSSFLEMKSEKQVEQKIAEIPKEEVKPFITESKPSVEQRKQDDKKIKACVEEVTTTLEETKFLTENLLLYIDINGNLHPDSATLVSDIDITFLKKDAPYIVGDVVQEGVLTAVVIPTKKAGGTTEMLAKALRKVPTDNYITTYPGQGLNGYTVEEAKTVLKKCKSAFYILPSIISNEKQEILGTVSWNLREMLAHAEETRKLMPVCVETKAIVSTIQRKYKGIKIQEGVVDYGARFYFYTSKTTVASLINTLNDLNETLVTMPLGYVTHGLNLEEAARYMRSLKVPATVSVSSPDAVTAYNGYLTSSSKTPEEHFIETISLAGSYKDWSYSGQSTQLGIEFLKRGDKSVYYTSNPTTFHLDGEVITFDNLKTLLSLREVRTIKVFTTVDNINLHTQVVDMSMTYGQQFGPTYLDGADVTKIKPHNSHEGKTFYVLPNDDTLRVEAFEYYHTTDPSFLGRYMSALNHTKKWKYPQVNGLTSIKWADNNCYLATALLTLQQIELKFNPPALQDAYYRARAGEAANFCALILAYCNKTVGELGDVRETMSYLFQHANLDSCKRVLNVVCKTCGQQQTTLKGVEAVMYMGTLSYEQFKKGVQIPCTCGKQATKYLVQQESPFVMMSAPPAQYELKHGTFTCASEYTGNYQCGHYKHITSKETLYCIDGALLTKSSEYKGPITDVFYKENSYTTTIKPVTYKLDGVVCTEIDPKLDNYYKKDNSYFTEQPIDLVPNQPYPNASFDNFKFVCDNIKFADDLNQLTGYKKPASRELKVTFFPDLNGDVVAIDYKHYTPSFKKGAKLLHKPIVWHVNNATNKATYKPNTWCIRCLWSTKPVETSNSFDVLKSEDAQGMDNLACEDLKPVSEEVVENPTIQKDVLECNVKTTEVVGDIILKPANNSLKITEEVGHTDLMVAYVDNSSLTIKKPNELSRVLGLKTLATHGLAAVNSVPWDTIANYAKPFLNKVVSTTTNIVTRCLNRVCTNYMPYFFTLLLQLCTFTRSTNSRIKASMPTTIAKNTVKSVGKFCLEASFNYLKSPNFSKLINIIIWFLLLSVCLGSLIYSTAALGVLMSNLGMPSYCTGYREGYLNSTNVTIATYCTGSIPCSVCLSGLDSLDTYPSLETIQITISSFKWDLTAFGLVAEWFLAYILFTRFFYVLGLAAIMQLFFSYFAVHFISNSWLMWLIINLVQMAPISAMVRMYIFFASFYYVWKSYVHVVDGCNSSTCMMCYKRNRATRVECTTIVNGVRRSFYVYANGGKGFCKLHNWNCVNCDTFCAGSTFISDEVARDLSLQFKRPINPTDQSSYIVDSVTVKNGSIHLYFDKAGQKTYERHSLSHFVNLDNLRANNTKGSLPINVIVFDGKSKCEESSAKSASVYYSQLMCQPILLLDQALVSDVGDSAEVAVKMFDAYVNTFSSTFNVPMEKLKTLVATAEAELAKNVSLDNVLSTFISAARQGFVDSDVETKDVVECLKLSHQSDIEVTGDSCNNYMLTYNKVENMTPRDLGACIDCSARHINAQVAKSHNIALIWNVKDFMSLSEQLRKQIRSAAKKNNLPFKLTCATTRQVVNVVTTKIALKGG

SEQ ID NO: 16291 - protein, 1946 aa, Artificial Sequence
  SARS-CoV-2__MT517427.1__non-structural protein 3 (NSP3)
MAPTKVTFGDDTVIEVQGYKSVNITFELDERIDKVLNEKCSAYTVELGTEVNEFACVVADAVIKTLQPVSELLTPLGIDLDEWSMATYYLFDESGEFKLASHMYCSFYPPDEDEEEGDCEEEEFEPSTQYEYGTEDDYQGKPLEFGATSAALQPEEEQEEDWLDDDSQQTVGQQDGSEDNQTTTIQTIVEVQPQLEMELTPVVQTIEVNSFSGYLKLTDNVYIKNADIVEEAKKVKPTVVVNAANVYLKHGGGVAGALNKATNNAMQVESDDYIATNGPLKVGGSCVLSGHNLAKHCLHVVGPNVNKGEDIQLLKSAYENFNQHEVLLAPLLSAGIFGADPIHSLRVFVDTVRTNVYLAVFDKNLYDKLVSSFLEMKSEKQVEQKIAEIPKEEVKPFITESKPSVEQRKQDDKKIKACVEEVTTTLEETKFLTENLLLYIDINGNLHPDSATLVSDIDITFLKKDAPYIVGDVVQEGVLTAVVIPTKKAGGTTEMLAKALRKVPTDNYITTYPGQGLNGYTVEEAKTVLKKCKSAFYILPSIISNEKQEILGTVSWNLREMLAHAEETRKLMPVCVETKAIVSTIQRKYKGIKIQEGVVDYGARFYFYTSKTTVASLINTLNDLNETLVTMPLGYVTHGLNLEEAARYMRSLKVPATVSVSSPDAVTAYNGYLTSSSKTPEEHFIETISLAGSYKDWSYSGQSTQLGIEFLKRGDKSVYYTSNPTTFHLDGEVITFDNLKTLLSLREVRTIKVFTTVDNINLHTQVVDMSMTYGQQFGPTYLDGADVTKIKPHNSHEGKTFYVLPNDDTLRVEAFEYYHTTDPSFLGRYMSALNHTKKWKYPQVNGLTSIKWADNNCYLATALLTLQQIELKFNPPALQDAYYRARAGEAANFCALILAYCNKTVGELGDVRETMSYLFQHANLDSCKRVLNVVCKTCGQQQTTLKGVEAVMYMGTLSYEQFKKGVQIPCTCGKQATKYLVQQESPFVMMSAPPAQYELKHGTFTCASEYTGNYQCGHYKHITSKETLYCIDGALLTKSSEYKGPITDVFYKENSYTTTIKPVTYKLDGVVCTEIDPKLDNYYKKDNSYFTEQPIDLVPNQPYPNASFDNFKFVCDNIKFADDLNQLTGYKKPASRELKVTFFPDLNGDVVAIDYKHYTPSFKKGAKLLHKPIVWHVNNATNKATYKPNTWCIRCLWSTKPVETSNSFDVLKSEDAQGMDNLACEDLKPVSEEVVENPTIQKDVLECNVKTTEVVGDIILKPANNSLKITEEVGHTDLMAAYVDNSSLTIKKPNELSRVLGLKTLATHGLAAVNSVPWDTIANYAKPFLNKVVSTTTNIVTRCLNRVCTNYMPYFFTLLLQLCTFTRSTNSRIKASMPTTIAKNTVKSVGKFCLEASFNYLKSPNFSKLINIIIWFLLLSVCLGSLIYSTAALGVLMSNLGMPSYCTGYREGYLNSTNVTIATYCTGSIPCSVCLSGLDSLDTYPSLETIQITISSFKWDLTAFGLVAEWFLAYILFTRFFYVLGLAAIMQLFFSYFAVHFISNSWLMWLIINLVQMAPISAMVRMYIFFASFYYVWKSYVHVVDGCNSSTCMMCYKRNRATRVECTTIVNGVRRSFYVYANGGKGFCKLHNWNCVNCDTFCAGSTFISDEVARDLSLQFKRPINPTDQSSYIVDSVTVKNGSIHLYFDKAGQKTYERHSLSHFVNLDNLRANNTKGSLPINVIVFDGKSKCEESSAKSASVYYSQLMCQPILLLDQALVSDVGDSAEVAVKMFDAYVNTFSSTFNVPMEKLKTLVATAEAELAKNVSLDNVLSTFISAARQGFVDSDVETKDVVECLKLSHQSDIEVTGDSCNNYMLTYNKVENMTPRDLGACIDCSARHINAQVAKSHNIALIWNVKDFMSLSEQLRKQIRSAAKKNNLPFKLTCATTRQVVNVVTTKIALKGG

SEQ ID NO: 16292 - protein, 1946 aa, Artificial Sequence
  SARS-CoV-2__MT511066.1__non-structural protein 3 (NSP3)
MAPTKVTFGDDTVIEVQGYKSVNITFELDERIDKVLNEKCSAYTVELGTEVNEFACVVADAVIKTLQPVSELLTPLGIDLDEWSMATYYLFDESGEFKLASHMYCSFYPPDEDEEEGDCEEEEFEPSTQYEYGTEDDYQGKPLEFGATSAALQPEEEQEEDWLDDDSQQTVGQQDGSEDNQTTTIQTIVEVQPQLEMELTPVVQTIEVNSFSGYLKLTDNVYIKNADIVEEAKKVKPTVVVNAANVYLKHGGGVAGALNKATNNAMQVESDDYIATNGPLKVGGSCVLSGHNLAKHCLHVVGPNVNKGEDIQLLKSAYENFNQHEVLLAPLLSAGIFGADPIHSLRVCVDTVRTNVYLAVFDKNLYDKLVSSFLEMKSEKQVEQKIAEIPKEEVKPFITESKPSVEQRKQDDKKIKACVEEVTTTLEETKFLTENLLLYIDINGNLHPDSATLVSDIDITFLKKDAPYIVGDVVQEGVLTAVVIPTKKAGGTTEMLAKALRKVPTDNYITTYPGQGLNGYTVEEAKTVLKKCKSAFYILPSIISNEKQEILGTVSWNLREMLAHAEETRKLMPVCVETKAIVSTIQRKYKGIKIQEGVVDYGARFYFYTSKTTVASLINTLNDLNETLVTMPLGYVTHGLNLEEAARYMRSLKVPATVSVSSPDAVTAYNGYLTSSSKTPEEHFIETISLAGSYKDWSYSGQSTQLGIEFLKRGDKSVYYTSNPTTFHLDGEVITFDNLKTLLSLREVRTIKVFTTVDNINLHTQVVDMSMTYGQQFGPTYLDGADVTKIKPHNSHEGKTFYVLPNDDTLRVEAFEYYHTTDPSFLGRYMSALNHTKKWKYPQVNGLTSIKWADNNCYLATALLTLQQIELKFNPPALQDAYYRARAGEAANFCALILAYCNKTVGELGDVRETMSYLFQHANLDSCKRVLNVVCKTCGQQQTTLKGVEAVMYMGTLSYEQFKKGVQIPCTCGKQATKYLVQQESPFVMMSAPPAQYELKHGTFTCASEYTGNYQCGHYKHITSKETLYCIDGALLTKSSEYKGPITDVFYKENSYTTTIKPVTYKLDGVVCTEIDPKLDNYYKKDNSYFTEQPIDLVPNQPYPNASFDNFKFVCDNIKFADDLNQLTGYKKPASRELKVTFFPDLNGDVVAIDYKHYTPSFKKGAKLLHKPIVWHVNNATNKATYKPNTWCIRCLWSTKPVETSNSFDVLKSEDAQGMDNLACEDLKPVSEEVVENPTIQKDVLECNVKTTEVVGDIILKPANNSLKITEEVGHTDLMAAYVDNSSLTIKKPNELSRVLGLKTLATHGLAAVNSVPWDTIANYAKPFLNKVVSTTTNIVTRCLNRVCTNYMPYFFTLLLQLCTFTRSTNSRIKASMPTTIAKNTVKSVGKFCLEASFNYLKSPNFSKLINIIIWFLLLSVCLGSLIYSTAALGVLMSNLGMPSYCTGYREGYLNSTNVTIATYCTGSIPCSVCLSGLDSLDTYPSLETIQITISSFKWDLTAFGLVAEWFLAYILFTRFFYVLGLAAIMQLFFSYFAVHFISNSWLMWLIINLVQMAPISAMVRMYIFFASFYYVWKSYVHVVDGCNSSTCMMCYKRNRATRVECTTIVNGVRRSFYVYANGGKGFCKLHNWNCVNCDTFCAGSTFISDEVARDLSLQFKRPINPTDQSSYIVDSVTVKNGSIHLYFDKAGQKTYERHSLSHFVNLDNLRANNTKGSLPINVIVFDGKSKCEESSAKSASVYYSQLMCQPILLLDQALVSDVGDSAEVAVKMFDAYVNTFSSTFDVPMEKLKTLVATAEAELAKNVSLDNVLSTFISAARQGFVDSDVETKDVVECLKLSHQSDIEVTGDSCNNYMLTYNKVENMTPRDLGACIDCSARHINAQVAKSHNIALIWNVKDFMSLSEQLRKQIRSAAKKNNLPFKLTCATTRQVVNVVTTKIALKGG

SEQ ID NO: 16293 - protein, 1946 aa, Artificial Sequence
  SARS-CoV-2__MT511068.1__non-structural protein 3 (NSP3)
MAPTKVTFGDDTVIEVQGYKSVNITFELDERIDKVLNEKCSAYTVELGTEVNEFACVVADAVIKTLQPVSELLTPLGIDLDEWSMATYYLFDESGEFKLASHMYCSFYPPDEDEEEGDCEEEEFEPSTQYEYGTEDDYQGKPLEFGATSAALQPEEEQEEDWLDDDSQQTVGQQDGSEDNQTTTIQTIVEVQPQLEMELTPVVQTIEVNSFSGYLKLTDNVYIKNADIVEEAKKVKPTVVVNAANVYLKHGGGVAGALNKATNNAMQVESDDYIATNGPLKVGGSCVLSGHNLAKHCLHVVGPNVNKGEDIQLLKSAYENFNQHEVLLAPLLSAGIFGADPIHSLRVCVDTVRTNVYLAVFDKNLYDKLVSSFLEMKSEKQVEQKIAEIPKEEVKPFITESKPSVEQRKQDDKKIKACVEEVTTTLEETKFLTENLLLYIDINGNLHPDSATLVSDIDITFLKKDAPYIVGDVVQEGVLTAVVIPTKKAGGTTEMLAKALRKVPTDNYITTYPGQGLNGYTVEEAKTVLKKCKSAFYILPSIISNEKQEILGTVSWNLREMLAHAEETRKLMPVCVETKAIVSTIQRKYKGIKIQEGVVDYGARFYFYTSKTTVASLINTLNDLNETLVTMPLGYVTHGLNLEEAARYMRSLKVPATVSVSSPDAVTAYNGYLTSSSKTPEEHFIETISLAGSYKDWSYSGQSTQLGIEFLKRGDKSVYYTSNPTTFHLDGEVITFDNLKTLLSLREVRTIKVFTTVDNINLHTQVVDMSMTYGQQFGPTYLDGADVTKIKPHNSHEGKTFYVLPNDDTLRVEAFEYYHTTDPSFLGRYMSALNHTKKWKYPQVNGLTSIKWADNNCYLATALLTLQQIELKFNPPALQDAYYRARAGEAANFCALILAYCNKTVGELGDVRETMSYLFQHANLDSCKRVLNVVCKTCGQQQTTLKGVEAVMYMGTLSYEQFKKGVQIPCTCGKQATKYLVQQESPFVMMSAPPAQYELKHGTFTCASEYTGNYQCGHYKHITSKETLYCIDGALLTKSSEYKGPITDVFYKENSYTTTIKPVTYKLDGVVCTEIDPKLDNYYKKDNSYFTEQPIDLVPNQPYPNASFDNFKFVCDNIKFADDLNQLTGYKKPASRELKVTFFPDLNGDVVAIDYKHYTPSFKKGAKLLHKPIVWHVNNATNKATYKPNTWCIRCLWSTKPVETSNSFDVLKSEDAQGMDNLACEDLKPVSEEVVENPTIQKDVLECNVKTTEVVGDIILKPANNSLKITEEVGHTDLMAAYVDNSSLTIKKPNELSRVLGLKTLATHGLAAVNSVPWDTIANYAKPFLNKVVSTTTNIVTRCLNRVCTNYMPYFFTLLLQLCTFTRSTNSRIKASMPTTIAKNTVKSVGKFCLEASFNYLKSPNFSKLINIIIWFLLLSVCLGSLIYSTAALGVLMSNLGMPSYCTGYREGYLNSTNVTIATYCTGSIPCSVCLSGLDSLDTYPSLETIQITISSFKWDLTAFGLVAEWFLAYILFTRFFYVLGLAAIMQLFFSYFAVHFISNSWLMWLIINLVQMAPISAMVRMYIFFASFYYVWKSYVHVVDGCNSSTCMMCYKRNRATRVECTTIVNGVRRSFYVYANGGKGFCKLHNWNCVNCDTFCAGSTFISDEVARDLSLQFKRPINPTDQSSYIVDSVTVKNGSIHLYFDKAGQKTYERHSLSHFVNLDNLRANNTKGSLPINVIVFDGKSKCEESSAKSASVYYSQLMCQPILLLDQALVSDVGDSAEVVVKMFDAYVNTFSSTFDVPMEKLKTLVATAEAELAKNVSLDNVLSTFISAARQGFVDSDVETKDVVECLKLSHQSDIEVTGDSCNNYMLTYNKVENMTPRDLGACIDCSARHINAQVAKSHNIALIWNVKDFMSLSEQLRKQIRSAAKKNNLPFKLTCATTRQVVNVVTTKIALKGG

SEQ ID NO: 16294 - protein, 1946 aa, Artificial Sequence
  SARS-CoV-2__MT511069.1__non-structural protein 3 (NSP3)
MAPTKVTFGDDTVIEVQGYKSVNITFELDERIDKVLNEKCSAYTVELGTEVNEFACVVADAVIKTLQPVSELLTPLGIDLDEWSMATYYLFDESGEFKLASHMYCSFYPPDEDEEEGDCEEEEFEPSTQYEYGTEDDYQGKPLEFGATSAALQPEEEQEEDWLDDDSQQTVGQQDGSEDNQTTTIQTIVEVQPQLEMELTPVVQTIEVNSFSGYLKLTDNVYIKNADIVEEAKKVKPTVVVNAANVYLKHGGGVAGALNKATNNAMQVESDDYIATNGPLKVGGSCVLSGHNLAKHCLHVVGPNVNKGEDIQLLKSAYENFNQHEVLLAPLLSAGIFGADPIHSLRVCVDTVRTNVYLAVFDKNLYDKLVSSFLEMKSEKQVEQKIAEIPKEEVKPFITESKPSVEQRKQDDKKIKACVEEVTTTLEETKFLTENLLLYIDINGNLHPDSATLVSDIDITFLKKDAPYIVGDVVQEGVLTAVVIPTKNAGGTTEMLAKALRKVPTDNYITTYPGQGLNGYTVEEAKTVLKKCKSAFYILPSIISNEKQEILGTVSWNLREMLAHAEETRKLMPVCVETKAIVSTIQRKYKGIKIQEGVVDYGARFYFYTSKTTVASLINTLNDLNETLVTMPLGYVTHGLNLEEAARYMRSLKVPATVSVSSPDAVTAYNGYLTSSSKTPEEHFIETISLAGSYKDWSYSGQSTQLGIEFLKRGDKSVYYTSNPTTFHLDGEVITFDNLKTLLSLREVRTIKVFTTVDNINLHTQVVDMSMTYGQQFGPTYLDGADVTKIKPHNSHEGKTFYVLPNDDTLRVEAFEYYHTTDPSFLGRYMSALNHTKKWKYPQVNGLTSIKWADNNCYLATALLTLQQIELKFNPPALQDAYYRARAGEAANFCALILAYCNKTVGELGDVRETMSYLFQHANLDSCKRVLNVVCKTCGQQQTTLKGVEAVMYMGTLSYEQFKKGVQIPCTCGKQATKYLVQQESPFVMMSAPPAQYELKHGTFTCASEYTGNYQCGHYKHITSKETLYCIDGALLTKSSEYKGPITDVFYKENSYTTTIKPVTYKLDGVVCTEIDPKLDNYYKKDNSYFTEQPIDLVPNQPYPNASFDNFKFVCDNIKFADDLNQLTGYKKPASRELKVTFFPDLNGDVVAIDYKHYTPSFKKGAKLLHKPIVWHVNNATNKATYKPNTWCIRCLWSTKPVETSNSFDVLKSEDAQGMDNLACEDLKPVSEEVVENPTIQKDVLECNVKTTEVVGDIILKPANNSLKITEEVGHTDLMAAYVDNSSLTIKKPNELSRVLGLKTLATHGLAAVNSVPWDTIANYAKPFLNKVVSTTTNIVTRCLNRVCTNYMPYFFTLLLQLCTFTRSTNSRIKASMPTTIAKNTVKSVGKFCLEASFNYLKSPNFSKLINIIIWFLLLSVCLGSLIYSTAALGVLMSNLGMPSYCTGYREGYLNSTNVTIATYCTGSIPCSVCLSGLDSLDTYPSLETIQITISSFKWDLTAFGLVAEWFLAYILFTRFFYVLGLAAIMQLFFSYFAVHFISNSWLMWLIINLVQMAPISAMVRMYIFFASFYYVWKSYVHVVDGCNSSTCMMCYKRNRATRVECTTIVNGVRRSFYVYANGGKGFCKLHNWNCVNCDTFCAGSTFISDEVARDLSLQFKRPINPTDQSSYIVDSVTVKNGSTHLYFDKAGQKTYERHSLSHFVNLDNLRANNTKGSLPINVIVFDGKSKCEESSAKSASVYYSQLMCQPILLLDQALVSDVGDSAEVAVKMFDAYVNTFSSTFNVPMEKLKTLVATAEAELAKNVSLDNVLSTFISAARQGFVDSDVETKDVVECLKLSHQSDIEVTGDSCNNYMLTYNKVENMTPRDLGACIDCSARHINAQVAKSHNIALIWNVKDFMSLSEQLRKQIRSAAKKNNLPFKLTCATTRQVVNVVTTKIALKGG

SEQ ID NO: 16295 - protein, 1946 aa, Artificial Sequence
  SARS-CoV-2__MT509958.1__non-structural protein 3 (NSP3)
MAPTKVTFGDDTVIEVQGYKSVNITFELDERIDKVLNEKCSAYTVELGTEVNEFACVVADAVIKTLQPVSELLTPLGIDLDEWSMATYYLFDESGEFKLASHMYCSFYPPDEDEEEGDCEEEEFEPSTQYEYGTEDDYQGKPLEFGATSAALQPEEEQEEDWLDDDSQQTVGQQDGSEDNQTTTIQTIVEVQPQLEMELTPVVQTIEVNSFSGYLKLTDNVYIKNADIVEEAKKVKPTVVVNAANVYLKHGGGVAGALNKATNNAMQVESDDYIATNGPLKVGGSCVLSGHNLAKHCLHVVGPNVNKGEDIQLLKSAYENFNQHEVLLAPLLSAGIFGADPIHSLRVCVDTVRTNVYLAVFDKNLYDKLVSSFLEMKSEKQVEQKIAEIPKEEVKPFITESKPSVEQRKQDDKKIKACVEEVTTTLEETKFLTENLLLYIDINGNLHPDSATLVSDIDITFLKKDAPYIVGDVVQEGVLTAVVIPTKKAGGTTEMLAKALRKVPTDNYITTYPGQGLNGYTVEEAKTVLKKCKSAFYILPSIISNEKQEILGTVSWNLREMLAHAEETRKLMPVCVETKAIVSTIQRKYKGIKIQEGVVDYGARFYFYTSKTTVASLINTLNDLNETLVTMPLGYVTHGLNLEEAARYMRSLKVPATVSVSSPDAVTAYNGYLTSSSKTPEEHFIETISLAGSYKDWSYSGQSTQLGIEFLKRGDKSVYYTSNPTTFHLDGEVITFDNLKTLLSLREVRTIKVFTTVDNINLHTQVVDMSMTYGQQFGPTYLDGADVTKIKPHNSHEGKTFYVLPNDDTLRVEAFEYYHTTDPSFLGRYMSALNHTKKWKYPQFNGLTSIKWADNNCYLATALLTLQQIELKFNPPALQDAYYRARAGEVANFCALILAYCNKTVGELGDVRETMSYLFQHANLDSCKRVLNVVCKTCGQQQTTLKGVEAVMYMGTLSYEQFKKGVQIPCTCGKQATKYLVQQESPFVMMSAPPAQYELKHGTFTCASEYTGNYQCGHYKHITSKETLYCIDGALLTKSSEYKGPITDVFYKENSYTTTIKPVTYKLDGVVCTEIDPKLDNYYKKDNSYFTEQPIDLVPNQPYPNASFDNFKFVCDNIKFADDLNQLTGYKKPASRELKVTFFPDLNGDVVAIDYKHYTPSFKKGAKLLHKPIVWHVNNATNKATYKPNTWCIRCLWSTKPVETSNSFDVLKSEDAQGMDNLACEDLKPVSEEVVENPTIQKDVLECNVKTTEVVGDIILKPANNSLKITEEVGHTDLMAAYVDNSSLTIKKPNELSRVLGLKTLATHGLAAVNSVPWDTIANYAKPFLNKVVSTTTNIVTRCLNRVCTNYMPYFFTLLLQLCTFTRSTNSRIKASMPTTIAKNTVKSVGKFCLEASFNYLKSPNFSKLINIIIWFLLLSVCLGSLIYSTAALGVLMSNLGMPSYCTGYREGYLNSTNVTIATYCTGSIPCSVCLSGLDSLDTYPSLETIQITISSFKWDLTAFGLVAEWFLAYILFTRFFYVLGLAAIMQLFFSYFAVHFISNSWLMWLIINLVQMAPISAMVRMYIFFASFYYVWKSYVHVVDGCNSSTCMMCYKRNRATRVECTTIVNGVRRSFYVYANGGKGFCKLHNWNCVNCDTFCAGSTFISDEVARDLSLQFKRPINPTDQSSYIVDSVTVKNGSIHLYFDKACQKTYERHSLSHFVNLDNLRANNTKGSLPINVIVFDGKSKCEESSAKSASVYYSQLMCQPILLLDQALVSDVGDSAEVAVKMFDAYVNTFSSTFNVPMEKLKTLVATAEAELAKNVSLDNVLSTFISTARQGFVDSDVETKDVVECLKLSHQSDIEVTGDSCNNYMLTYNKVENMTPRDLGACIDCSARHINAQVAKSHNIALIWNVKDFMSLSEQLRKQIRSAAKKNNLPFKLTCATTRQVVNVVTTKIALKGG

SEQ ID NO: 16296 - protein, 1946 aa, Artificial Sequence
  SARS-CoV-2__MT509657.1__non-structural protein 3 (NSP3)
MAPTKVTFGDDTVIEVQGYKSVNITFELDERIDKVLNEKCSAYTVELGTEVNEFACVVADAVIKTLQPVSELLTPLGIDLDEWSMATYYLFDESGEFKLASHMYCSFYPPDEDEEEGDCEEEEFEPSTQYEYGTEDDYQGKPLEFGATSAALQPEEEQEEDWLDDDSQQTVGQQDGSEDNQTTTIQTIVEVQPQLEMELTPVVQTIEVNSFSGYLKLTDNVYIKNADIVEEAKKVKPTVVVNAANVYLKHGGGVAGALNKATNNAMQVESDDYIATNGPLKVGGSCVLSGHNLAKHCLHVVGPNVNKGEDIQLLKSAYENFNQHEVLLAPLLSAGIFGADPIHSLRVCVDTVRTNVYLAVFDKNLYDKLVSSFLEMKSEKQVEQKIAEIPKEEVKPFITESKPSVEQRKQDDKKIKACVEEVTTTLEETKFLTENLLLYIDINGNLHPDSATLVSDIDITFLKKDAPYIVGDVVQEGVLTAVVIPTKKAGGTTEMLAKALRKVPTDNYITTYPGQGLNGYTVEEAKTVLKKCKSAFYILPSIISNEKQEILGTVSWNLREMLAHAEETRKLMPVCVETKAIVSTIQRKYKGIKIQEGVVDYGARFYFYTSKTTVASLINTLNDLNETLVTMPLGYVTHGLNLEEAARYMRSLKVPATVSVSSPDAVTAYNGYLTSSSKTPEEHFIETISLAGSYKDWSYSGQSTQLGIEFLKRGDKSVYYTSNPTTFHLDGEVITFDNLKTLLSLREVRTIKVFTTVDNINLHTQVVDMSMTYGQQFGPTYLDGADVTKIKPHNSHEGKTFYVLPNDDTLRVEAFEYYHTTDPSFLGRYMSALNHTKKWKYPQVNGLTSIKWADNNCYLATALLTLQQIELKFNPPALQDAYYRARAGEAANFCALILAYCNKTVGELGDVRETMSYLFQHANLDSCKRVLNVVCKTCGQQQTTLKGVEAVMYMGTLSYEQFKKGVQIPCTCGKQATKYLVQQESPFVMMSAPPAQYELKHGTFTCASEYTGNYQCGHYKHITSKETLYCIDGALLTKSSEYKGPITDVFYKENSYTTTIKPVTYKLDGVVCTEIDPKLDNYYKKDNSYFTEQPIDLVPNQPYPNASFDNFKFVCDNIKFADDLNQLTGYKKPASRELKVTFFPDLNGDVVAIDYKHYTPSFKKGAKLLHKPIVWHVNNATNKATYKPNTWCIRCLWRKKPVETSNSFDVLKSEDAQGMDNLACEDLKPVSEEVVENPTIQKDVLECNVKTTEVVGDIILKPANNSLKITEEVGHTDLMAAYVDNSSLTIKKPNELSRVLGLKTLATHGLAAVNSVPWDTIANYAKPFLNKVVSTTTNIVTRCLNRVCTNYMPYFFTLLLQLCTFTRSTNSRIKASMPTTIAKNTVKSVGKFCLEASFNYLKSPNFSKLINIIIWFLLLSVCLGSLIYSTAALGVLMSNLGMPSYCTGYREGYLNSTNVTIATYCTGSIPCSVCLSGLDSLDTYPSLETIQITISSFKWDLTAFGLVAEWFLAYILFTRFFYVLGLAAIMQLFFSYFAVHFISNSWLMWLIINLVQMAPISAMVRMYIFFASFYYVWKSYVHVVDGCNSSTCMMCYKRNRATRVECTTIVNGVRRSFYVYANGGKGFCKLHNWNCVNCDTFCAGSTFISDEVARDLSLQFKRPINPTDQSSYIVDSVTVKNGSIHLYFDKAGQKTYERHSLSHFVNLDNLRANNTKGSLPINVIVFDGKSKCEESSAKSASVYYSQLMCQPILLLDQALVSDVGDSAEVAVKMFDAYVNTFSSTFNVPMEKLKTLVATAEAELAKNVSLDNVLSTFISAARQGFVDSDVETKDVVECLKLSHQSDIEVTGDSCNNYMLTYNKVENMTPRDLGACIDCSARHINAQVAKSHNIALIWNVKDFMSLSEQLRKQIRSAAKKNNLPFKLTCATTRQVVNVVTTKIALKGG

SEQ ID NO: 16297 - protein, 1946 aa, Artificial Sequence
  SARS-CoV-2__MT509497.1__non-structural protein 3 (NSP3)
MAPTKVTFGDDTVIEVQGYKSVNITFELDERIDKVLNEKCSAYTVELGTEVNEFACVVADAVIKTLQPVSELLTPLGIDLDEWSMATYYLFDESGEFKLASHMYCSFYPPDEDEEEGDCEEEEFEPSTQYEYGTEDDYQGKPLEFGATSAALQPEEEQEEDWLDDDSQQTVGQQDGSEDNQTTTIQTIVEVQPQLEMELTPVVQTIEVNSFSGYLKLTDNVYIKNADIVEEAKKVKPTVVVNAANVYLKHGGGVAGALNKATNNAMQVESDDYIATNGPLKVGGSCVLSGHNLAKHCLHVVGPNVNKGEDIQLLKSAYENFNQHEVLLAPLLSAGIFGADPIHSLRVCVDTVRTNVYLAVFDKNLYDKLVSSFLEMKSEKQVEQKIAEIPKEEVKPFITESKPSVEQRKQDDKKIKACVEEVTTTLEETKFLTENLLLYIDINGNLHPDSATLVSDIDITFLKKDAPYIVGDVVQEGVLTAVVIPTKKAGGTTEMLAKALRKVPTDNYITTYPGQGLNGYTVEEAKTVLKKCKSAFYILPSIISNEKQEILGTVSWNLREMLAHAEETRKLMPVCVETKAIVSTIQRKYKGIKIQEGVVDYGARFYFYTSKTTVASLINTLNDLNETLVTMPLGYVTHGLNLEEAARYMRSLKVPATVSVSSPDAVTAYNGYLTSSSKTPEEHFIETISLAGSYKDWSYSGQSTQLGIEFLKRGDKSVYYTSNPTTFHLDGEVITFDNLKTLLSLREVRTIKVFTTVDNINLHTQVVDMSMTYGQQFGPTYLDGADVTKIKPHNSHEGKTFYVLPNDDTLRVEAFEYYHTTDPSFLGRYMSALNHTKKWKYPQVNGLTSIKWADNNCYLATALLTLQQIELKFNPPALQDAYYRARAGEAANFCALILAYCNKTVGELGDVRETMSYLFQHANLDSCKRVLNVVCKTCGQQQTTLKGVEAVMYMGTLSYEQFKKGVQIPCTCGKQATKYLVQQESPFVMMSAPPAQYELKHGTFTCASEYTGNYQCGHYKHITSKETLYCIDGALLTKSSEYKGPITDVFYKENSYTTTIKPVTYKLDGVVCTEIDPKLDNYYKKDNSYFTEQPIDLVPNQPYPNASFDNFKFVCDNIKFADDLNQLTGYKKPASRELKVTFFPDLNGDVVAIDYKHYTPSFKKGAKLLHKPIVWHVNNATNKATYKPNTWCIRCLWRKKPVETSNSFDVLKSEDAQGMDNLACEDLKPVSEEVVENPTIQKDVLECNVKTTEVVGDIILKPANNSLKITEEVGHTDLMAAYVDNSSLTIKKPNELSRVLGLKTLATHGLAAVNSVPWDTIANYAKPFLNKVVSTTTNIVTRCLNRVCTNYMPYFFTLLLQLCTFTRSTNSRIKASMPTTIAKNTVKSVGKFCLEASFNYLKSPNFSKLINIIIWFLLLSVCLGSLIYSTAALGVLMSNLGMPSYCTGYREGYLNSTNVTIATYCTGSIPCSVCLSGLDSLDTYPSLETIQITISSFKWDLTAFGLVAEWFLAYILFTRFFYVLGLAAIMQLFFSYFAVHFISNSWLMWLIINLVQMAPISAMVRMYIFFASFYYVWKSYVHVVDGCNSSTCMMCYKRNRATRVECTTIVNGVRRSFYVYANGGKGFCKLHNWNCVNCDTFCAGSTFISDEVARDLSLQFKRPINPTDQSSYIVDSVTVKNGSIHLYFDKAGQKTYERHSLSHFVNLDNLRANNTKGSLPINVIVFDGKSKCEESSAKSASVYYSQLMCQPILLLDQALVSDVGDSAEVAVKMFDAYVNTFSSTFNVPMEKLKTLVATAEAELAKNVSLDNVLSTFISAARQGFVDSDVETKDVVECLKLSHQSDIEVTGDSCNNYMLTYNKVENMTPRDLGACIDCSARHINAQVAKSHNIALIWNVKDFMSLSEQLRKQIRSAAKKNNLLFKLTCATTRQVVNVVTTKIALKGG

SEQ ID NO: 16298 - protein, 1946 aa, Artificial Sequence
  SARS-CoV-2__MT509504.1__non-structural protein 3 (NSP3)
MAPTKVTFGDDTVIEVQGYKSVNITFELDERIDKVLNEKCSAYTVELGTEVNEFACVVADAVIKTLQPVSELLTPLGIDLDEWSMATYYLFDESGEFKLASHMYCSFYPPDEDEEEGDCEEEEFEPSTQYEYGTEDDYQGKPLEFGATSAALQPEEEQEEDWLDDDSQQTVGQQDGSEDNQTTTIQTIVEVQPQLEMELTPVVQTIEVNSFSGYLKLTDNVYIKNADIVEEAKKVKPTVVVNAANVYLKHGGGVAGALNKATNNAMQVESDDYIATNGPLKVGGSCVLSGHNLAKHCLHVVGPNVNKGEDIQLLKSAYENFNQHEVLLAPLLSAGIFGADPIHSLRVCVDTVRTNVYLAVFDKNLYDKLVSSFLEMKSEKQVEQKIAEIPKEEVKPFITESKPSVEQRKQDDKKIKACVEEVTTTLEETKFLTENLLLYIDINGNLHPDSATLVSDIDITFLKKDAPYIVGDVVQEGVLTAVVIPTKKAGGTTEMLAKALRKVPTDNYITTYPGQGLNGYTVEEAKTVLKKCKSAFYILPSIISNEKQEILGTVSWNLREMLAHAEETRKLMPVCVETKAIVSTIQRKYKGIKIQEGVVDYGARFYFYTSKTTVASLINTLNDLNETLVTMPLGYVTHGLNLEEAARYMRSLKVPATVSVSSPDAVTAYNGYLTSSSKTPEEHFIETISLAGSYKDWSYSGQSTQLGIEFLKRGDKIVYYTSNPTTFHLDGEVITFDNLKTLLSLREVRTIKVFTTVDNINLHTQVVDMSMTYGQQFGPTYLDGADVTKIKPHNSHEGKTFYVLPNDDTLRVEAFEYYHTTDPSFLGRYMSALNHTKKWKYPQVNGLTSIKWADNNCYLATALLTLQQIELKFNPPALQDAYYRARAGEAANFCALILAYCNKTVGELGDVRETMSYLFQHANLDSCKRVLNVVCKTCGQQQTTLKGVEAVMYMGTLSYEQFKKGVQIPCTCGKQATKYLVQQESPFVMMSAPPAQYELKHGTFTCASEYTGNYQCGHYKHITSKETLYCIDGALLTKSSEYKGPITDVFYKENSYTTTIKPVTYKLDGVVCTEIDPKLDNYYKKDNSYFTEQPIDLVPNQPYPNASFDNFKFVCDNIKFADDLNQLTGYKKPASRELKVTFFPDLNGDVVAIDYKHYTPSFKKGAKLLHKPIVWHVNNATNKATYKPNTWCIRCLWSTKPVETSNSFDVLKSEDAQGMDNLACEDLKPVSEEVVENPTIQKDVLECNVKTTEVVGDIILKPANNSLKITEEVGHTDLMAAYVDNSSLTIKKPNELSRVLGLKTLATHGLAAVNSVPWDTIANYAKPFLNKVVSTTTNIVTRCLNRVCTNYMPYFFTLLLQLCTFTRSTNSRIKASMPTTIAKNTVKSVGKFCLEASFNYLKSPNFSKLINIIIWFLLLSVCLGSLIYSTAALGVLMSNLGMPSYCTGYREGYLNSTNVTIATYCTGSIPCSVCLSGLDSLDTYPSLETIQITISSFKWDLTAFGLVAEWFLAYILFTRFFYVLGLAAIMQLFFSYFAVHFISNSWLMWLIINLVQMAPISAMVRMYIFFASFYYVWKSYVHVVDGCNSSTCMMCYKRNRATRVECTTIVNGVRRSFYVYANGGKGFCKLHNWNCVNCDTFCAGSTFISDEVARDLSLQFKRPINPTDQSSYIVDSVTVKNGSIHLYFDKAGQKTYERHSLSHFVNLDNLRANNTKGSLPINVIVFDGKSKCEESSAKSASVYYSQLMCQPILLLDQALVSDVGDSAEVAVKMFDAYVNTFSSTFNVPMEKLKTLVATAEAELAKNVSLDNVLSTFISAARQGFVDSDVETKDVVECLKLSHQSDIEVTGDSCNNYMLTYNKVENMTPRDLGACIDCSARHINAQVAKSHNIALIWNVKDFMSLSEQLRKQIRSAAKKNNLPFKLTCATTRQVVNVVTTKIALKGG

SEQ ID NO: 16299 - protein, 1946 aa, Artificial Sequence
  SARS-CoV-2__MT509503.1__non-structural protein 3 (NSP3)
MAPTKVTFGDDTVIEVQGYKSVNITFELDERIDKVLNEKCSAYTVELGTEVNEFACVVADAVIKTLQPVSELLTPLGIDLDEWSMATYYLFDESGEFKLASHMYCSFYPPDEDEEEGDCEEEEFEPSTQYEYGTEDDYQGKPLEFGATSAALQPEEEQEEDWLDDDSQQTVGQQDGSEDNQTTTIQTIVEVQPQLEMELTPVVQTIEVNSFSGYLKLTDNVYIKNADIVEEAKKVKPTVVVNAANVYLKHGGGVAGALNKATNNAMQVESDDYIATNGPLKVGGSCVLSGHNLAKHCLHVVGPNVNKGEDIQLLKSAYENFNQHEVLLAPLLSAGIFGADPIHSLRVCVDTVRTNVYLAVFDKNLYDKLVSSFLEMKSEKQVEQKIAEIPKEEVKPFITESKPSVEQRKQDDKKIKACVEEVTTTLEETKFLTENLLLYIDINGNLHPDSATLVSDIDITFLKKDAPYIVGDVVQEGVLTAVVIPTKKAGGTTEMLAKALRKVPTDNYITTYPGQGLNGYTVEEAKTVLKKCKSAFYILPSIISNEKQEILGTVSWNLREMLAHAEETRKLMPVCVETKAIVSTIQRKYKGIKIQEGVVDYGARFYFYTSKTTVASLINTLNDLNETLVTMPLGYVTHGLNLEEAARYMRSLKVPATVSVSSPDAVTAYNGYLTSSSKTPEEHFIETISLAGSYKDWSYSGQSTQLGIEFLKRGDKSVYYTSNPTTFHLDGEVITFDNLKTLLSLREVRTIKVFTTVDNINLHTQVVDMSMTYGQQFGPTYLDGADVTKIKPHNSHEGKTFYVLPNDDTLRVEAFEYYHTTDPSFLGRYMSALNHTKKWKYPQVNGLTSIKWADNNCYLATALLTLQQIELKFNPPALQDAYYRARAGEAANFCALILAYCNKTVGELGDVRETMSYLFQHANLDSCKRVLNVVCKTCGQQQTTLKGVEAVMYMGTLSYEQFKKGVQIPCTCGKQATKYLVQQESPFVMMSAPPAQYELKHGTFTCASEYTGNYQCGHYKHITSKETLYCIDGALLTKSSEYKGPITDVFYKENSYTTTIKPVTYKLDGVVCTEIDPKLDNYYKKDNSYFTEQPIDLVPNQPYPNASFDNFKFVCDNIKFADDLNQLTGYKKPASRELKVTFFPDLNGDVVAIDYKHYTPSFKKGAKLLHKPIVWHVNNATNKATYKPNTWCIRCLWSTKPVETSNSFDVLESEDAQGMDNLACEDLKPVSEEVVENPTIQKDVLECNVKTTEVVGDIILKPANNSLKITEEVGHTDLMAAYVDNSSLTIKKPNELSRVLGLKTLATHGLAAVNSVPWDTIANYAKPFLNKVVSTTTNIVTRCLNRVCTNYMPYFFTLLLQLCTFTRSTNSRIKASMPTTIAKNTVKSVGKFCLEASFNYLKSPNFSKLINIIIWFLLLSVCLGSLIYSTAALGVLMSNLGMPSYCTGYREGYLNSTNVTIATYCTGSIPCSVCLSGLDSLDTYPSLETIQITISSFKWDLTAFGLVAEWFLAYILFTRFFYVLGLAAIMQLFFSYFAVHFISNSWLMWLIINLVQMAPISAMVRMYIFFASFYYVWKSYVHVVDGCNSSTCMMCYKRNRATRVECTTIVNGVRRSFYVYANGGKGFCKLHNWNCVNCDTFCAGSTFISDEVARDLSLQFKRPINPTDQSSYIVDSVTVKNGSIHLYFDKAGQKTYERHSLSHFVNLDNLRANNTKGSLPINVIVFDGKSKCEESSAKSASVYYSQLMCQPILLLDQALVSDVGDSAEVAVKMFDAYVNTFSSTFNVPMEKLKTLVATAEAELAKNVSLDNVLSTFISAARQGFVDSDVETKDVVECLKLSHQSDIEVTGDSCNNYMLTYNKVENMTPRDLGACIDCSARHINAQVAKSHNIALIWNVKDFMSLSEQLRKQIRSAAKKNNLPFKLTCATTRQVVNVVTTKIALKGG

SEQ ID NO: 16300 - protein, 1946 aa, Artificial Sequence
  SARS-CoV-2__MT506571.1__non-structural protein 3 (NSP3)
MAPTKVTFGDDTVIEVQGYKSVNITFELDERIDKVLNEKCSAYTVELGTEVNEFACVVADAVIKTLQPVSELLTPLGIDLDEWSMATYYLFDESGEFKLASHMYCSFYPPDEDEEEGDCEEEEFEPSTQYEYGTEDDYQGKPLEFGATSAALQPEEEQEEDWLDDDSQQTVGQQDGSEDNQTTTIQTIVEVQPQLEMELTPVVQTIEVNSFSGYLKLTDNVYIKNADIVEEAKKVKPTVVVNAANVYLKHGGGVAGALNKATNNAMQVESDDYIATNGPLKVGGSCVLSGHNLAKHCLHVVGPNVNKGEDIQLLKSAYENFNQHEVLLAPLLSAGIFGADPIHSLRVCVDTVRTNVYLAVFDKNLYDKLVSSFLEMKSEKQVEQKIAEIPKEEVKPFITESKPSVEQRKQDDKKIKACVEEVTTTLEETKFLTENLLLYIDINGNLHPDSATLVSDIDITFLKKDAPYIVGDVVQEGVLTAVVIPTKKAGGTTEMLAKALRKVPTDNYITTYPGQGLNGYTVEEAKTVLKKCKSAFYILPSIISNEKQEILGTVSWNLREMLAHAEETRKLMPVCVETKAIVSTIQRKYKGIKIQEGVVDYGARFYFYTSKTTVASLINTLNDLNETLVTMPLGYVTHGLNLEEAARYMRSLKVPATVSVSSPDAVTAYNGYLTSSSKTPEEHFIETISLAGSYKDWSYSGQSTQLGIEFLKRGDKSVYYTSNPTTFHLDGEVITFDNLKTLLSLREVRTIKVFTTVDNINLHTQVVDMSMTYGQQFGPTYLDGADVTKIKPHNSHEGKTFYVLPNDDTLRVEAFEYYHTTDPSFLGRYMSALNHTKKWKYPQVNGLTSIKWADNNCYLATALLTLQQIELKFNPPALQDAYYRARAGEAANFCALILAYCNKTVGELGDVRETMSYLFQHANLDSCKRVLNVVCKTCGQQQTTLKGVEAVMYMGTLSYEQFKKGVQIPCTCGKQATKYLVQQESPFVMMSAPPAQYELKHGTFTCASEYTGNYQCGHYKHITSKETLYCIDGALLTKSSEYKGPITDVFYKENSYTTTIKPVTYKLDGVVCTEIDPKLDNYYKKDNSYFTEQPIDLVPNQPYPNASFDNFKFVCDNIKFADDLNQLTGYKKPASRELKVTFFPDLNGDVVAIDYKHYTPSFKKGAKLLHKPIVWHVNNATNKATYKPNTWCIRCLWSTKPVETSNSFDVLKSEDAQGMDNLACEDLKPVSEEVVENPTIQKDVLECNVKTTEVVGDIILKPANNSLKITEEVGHTDLMAAYVDNSSLTIKKPNELSRVLGLKTLATHGLAAVNSVPWDTIANYAKPFLNKVVSTTTNIVTRCLNRVCTNYMPYFFTLLLQLCTFTRSTNSRIKASMPTTIAKNTVKSVGKFCLEASFNYLKSPNFSKLINIIIWFLLLSVCLGSLIYSTAALGVLMSNLGMPSYCTGYREGYLNSTNVTIATYCTGSIPCSVCLSGLDSLDTYPSLETIQITISSFKWDLTAFGLVAEWFLAYILFTRFFYVLGLAAIMQLFFSYFAVHFISNSWLMWLIINLVQMAPISAMVRMYIFFASFYYVWKSYVHVVDGCNSSTCMMCYKRNRATRVECTTIVNGVRRSFYVYANGGKGFCKLHNWNCVNCDTFCAGSTFISDEVARDLSLQFKRPINPTDQSSYIVDSVTVKNGSIHLYFDKAGQKTYERHSLSHFVNLDNLRANNTKGSLPINVIVFDGKSKCEESSAKSASVYYSQLMCQPILLLDQALVSDVGDSAEVAVKMFDAYVNTFSSTFNVPMEKLKTLVATAEAELAKNVSLDNVLSTFISAARQGFVDSDVETKDVVECLKLSHQSDIEVTGDSCNNYMLTYNKVENMTPRDLGACIDCSARHINVQVAKSHNIALIWNVKDFMSLSEQLRKQIRSAAKKNNLPFKLTCATTRQVVNVVTTKIALKGG

SEQ ID NO: 16301 - protein, 1946 aa, Artificial Sequence
  SARS-CoV-2__MT507793.1__non-structural protein 3 (NSP3)
MAPTKVTFGDDTVIEVQGYKSVNITFELDERIDKVLNEKCSAYTVELGTEVNEFACVVADAVIKTLQPVSELLTPLGIDLDEWSMATYYLFDESGEFKLASHMYCSFYPPDEDEEEGDCEEEEFEPSTQYEYGTEDDYQGKPLEFGATSAALQPEEEQEEDWLDDDSQQTVGQQDGSEDNQTTTIQTIVEVQPQLEMELTPVVQTIEVNSFSGYLKLTDNVYIKNADIVEEAKKVKPTVVVNAANVYLKHGGGVAGALNKATNNAMQVESDDYIATNGPLKVGGSCVLSGHNLAKHCLHVVGPNVNKGEDIQLLKSAYENFNQHEVLLAPLLSAGIFGADPIHSLRVCVDTVRTNVYLAVFDKNLYDKLVSSFLEMKSEKQVEQKIAEIPKEEVKPFITESKPSVEQRKQDDKKIKACVEEVTTTLEETKFLTENLLLYIDINGNLHPDSATLVSDIDITFLKKDAPYIVGDVVQEGVLTAVVIPTKKAGGTTEMLAKALRKVPTDNYITTYPGQGLNGYTVEEAKTVLKKCKSAFYILPSIISNEKQEILGTVSWNLREMLAHAEETRKLMPVCVETKAIVSTIQRKYKGIKIQEGVVDYGARFYFYTSKTTVASLINTLNDLNETLVTMPLGYVTHGLNLEEAARYMRSLKVPATVSVSSPDAVTAYNGYLTSSSKTPEEHFIETISLAGSYKDWSYSGQSTQLGIEFLKRGDKSVYYTSNPTTFHLDGEVITFDNLKTLLSLREVRTIKVFTTVDNINLHTQVVDMSMTYGQQFGPTYLDGADVTKIKPHNSHEGKTFYVLPNDDTLRVEAFEYYHTTDPSFLGRYMSALNHTKKWKYPQVNGLTSIKWADNNCYLATALLTLQQIELKFNPPALQDAYYRARAGEAANFCALILAYCNKTVGELGDVRETMSYLFQHANLDSCKRVLNVVCKTCGQQQTTLKGVEAVMYMGTLSYEQFKKGVQIPCTCGKQATKYLVQQESPFVMMSAPPAQYELKHGTFTCASEYTGNYQCGHYKHITSKETLYCIDGALLTKSSEYKGPITDVFYKENSYTTTIKPVTYKLDGVVCTEIDPKLDNYYKKDNSYFTEQPIDLVPNQPYPNASFDNFKFVCDNIKFADDLNQLTGYKKPASRELKVTFFPDLNGDVVAIDYKHYTPSFKKGAKLLHKPIVWHVNNATNKATYKPNTWCIRCLWSTKPVETSNSFDVLKSEDAQGMDNLACEDLKPVSEEVVENPTIQKDVLECNVKTTEVVGDIILKPANNSLKITEEVGHTDLMAAYVDNSSLTINKPNELSRVLGLKTLATHGLAAVNSVPWDTIANYAKPFLNKVVSTTTNIVTRCLNRVCTNYMPYFFTLLLQLCTFTRSTNSRIKASMPTTIAKNTVKSVGKFCLEASFNYLKSPNFSKLINIIIWFLLLSVCLGSLIYSTAALGVLMSNLGMPSYCTGYREGYLNSTNVTIATYCTGSIPCSVCLSGLDSLDTYPSLETIQITISSFKWDLTAFGLVAEWFLAYILFTRFFYVLGLAAIMQLFFSYFAVHFISNSWLMWLIINLVQMAPISAMVRMYIFFASFYYVWKSYVHVVDGCNSSTCMMCYKRNRATRVECTTIVNGVRRSFYVYANGGKGFCKLHNWNCVNCDTFCAGSTFISDEVARDLSLQFKRPINPTDQSSYIVDSVTVKNGSIHLYFDKAGQKTYERHSLSHFVNLDNLRANNTKGSLPINVIVFDGKSKCEESSAKSASVYYSQLMCQPILLLDQALVSDVGDSAEVAVKMFDAYVNTFSSTFNVPMEKLKTLVATAEAELAKNVSLDNVLSTFISAARQGFVDSDVETKDVVECLKLSHQSDIEVTGDSCNNYMLTYNKVENMTPRDLGACIDCSARHINAQVAKSHNIALIWNVKDFMSLSEQLRKQIRSAAKKNNLPFKLTCATTRQVVNVVTTKIALKGG

SEQ ID NO: 16302 - protein, 1946 aa, Artificial Sequence
  SARS-CoV-2__MT499208.1__non-structural protein 3 (NSP3)
MAPTKVTFGDDTVIEVQGYKSVNITFELDERIDKVLNEKCSAYTVELGTEVNEFACVVADAVIKTLQPVSELLTPLGIDLDEWSMATYYLFDESGEFKLASHMYCSFYPPDEDEEEGDCEEEEFEPSTQYEYGTEDDYQGKPLEFGATSAALQPEEEQEEDWLDDDSQQTVGQQDGSEDNQTTTIQTIVEVQPQLEMELTPVVQTIEVNSFSGYLKLTDNVYIKNADIVEEAKKVKPTVVVNAANVYLKHGGGVAGALNKATNNAMQVESDDYIATNGPLKVGGSCVLSGHNLAKHCLHVVGPNVNKGEDIQFLKSAYENFNQHEVLLAPLLSAGIFGADPIHSLRVCVDTVRTNVYLAVFDKNLYDKLVSSFLEMKSEKQVEQKIAEIPKEEVKPFITESKPSVEQRKQDDKKIKACVEEVTTTLEETKFLTENLLLYIDINGNLHPDSATLVSDIDITFLKKDAPYIVGDVVQEGVLTAVVIPTKKAGGTTEMLAKALRKVPTDNYITTYPGQGLNGYTVEEAKTVLKKCKSAFYILPSIISNEKQEILGTVSWNLREMLAHAEETRKLMPVCVETKAIVSTIQRKYKGIKIQEGVVDYGARFYFYTSKTTVASLINTLNDLNETLVTMPLGYVTHGLNLEEAARYMRSLKVPATVSVSSPDAVTAYNGYLTSSSKTPEEHFIETISLAGSYKDWSYSGQSTQLGIEFLKRGDKSVYYTSNPTTFHLDGEVITFDNLKTLLSLREVRTIKVFTTVDNINLHTQVVDMSMTYGQQFGPTYLDGADVTKIKPHNSHEGKTFYVLPNDDTLRVEAFEYYHTTDPSFLGRYMSALNHTKKWKYPQVNGLTSIKWADNNCYLATALLTLQQIELKFNPPALQDAYYRARAGEAANFCALILAYCNKTVGELGDVRETMSYLFQHANLDSCKRVLNVVCKTCGQQQTTLKGVEAVIYMGTLSYEQFKKGVQIPCTCGKQATKYLVQQESPFVMMSAPPAQYELKHGTFTCASEYTGNYQCGHYKHITSKETLYCIDGALLTKSSEYKGPITDVFYKENSYTTTIKPVTYKLDGVVCTEIDPKLDNYYKKDNSYFTEQPIDLVPNQPYPNASFDNFKFVCDNIKFADDLNQLTGYKKPASRELKVTFFPDLNGDVVAIDYKHYTPSFKKGAKLLHKPIVWHVNNATNKATYKPNTWCIRCLWSTKPVETSNSFDVLKSEDAQGMDNLACEDLKPVSEEVVENPTIQKDVLECNVKTTEVVGDIILKPANNSLKITEEVGHTDLMAAYVDNSSLTIKKPNELSRVLGLKTLATHGLAAVNSVPWDTIANYAKPFLNKVVSTTTNIVTRCLNRVCTNYMPYFFTLLLQLCTFTRSTNSRIKASMPTTIAKNTVKSVGKFCLEASFNYLKSPNFSKLINIIIWFLLLSVCLGSLIYSTAALGVLMSNLGMPSYCTGYREGYLNSTNVTIATYCTGSIPCSVCLSGLDSLDTYPSLETIQITISSFKWDLTAFGLVAEWFLAYILFTRFFYVLGLAAIMQLFFSYFAVHFISNSWLMWLIINLVQMAPISAMVRMYIFFASFYYVWKSYVHVVDGCNSSTCMMCYKRNRATRVECTTIVNGVRRSFYVYANGGKGFCKLHNWNCVNCDTFCAGSTFISDEVARDLSLQFKRPINPTDQSSYIVDSVTVKNGSIHLYFDKAGQKTYERHSLSHFVNLDNLRANNTKGSLPINVIVFDGKSKCEESSAKSASVYYSQLMCQPILLLDQALVSDVGDSAEVAVKMFDAYVNTFSSTFNVPMEKLKTLVATAEAELAKNVSLDNVLSTFISAARQGFVDSDVETKDVVECLKLSHQSDIEVTGDSCNNYMLTYNKVENMTPRDLGACIDCSARHINAQVAKSHNIALIWNVKDFMSLSEQLRKQIRSAAKKNNLPFKLTCATTRQVVNVVTTKIALKGG

SEQ ID NO: 16303 - protein, 1946 aa, Artificial Sequence
  SARS-CoV-2__MT270104.1__non-structural protein 3 (NSP3)
MAPTKVTFGDDTVIEVQGYKSVNITFELDERIDKVLNEKCSAYTVELGTEVNEFACVVADAVIKTLQPVSELLTPLGIDLDEWSMATYYLFDESGEFKLASHMYCSFYPPDEDEEEGDCEEEEFEPSTQYEYGTEDDYQGKPLEFGATSAALQPEEEQEEDWLDDDSQQTVGQQDGSEDNQTTTIQTIVEVQPQLEMELTPVVQTIEVNSFSGYLKLTDNVYIKNADIVEEAKKVKPTVVVNAANVYLKHGGGVAGALNKATNNAMQVESDDYIATNGPLKVGGSCVLSGHNLAKHCLHVVGPNVNKGEDIQLLKSAYENFNQHEVLLAPLLSAGIFGADPIHSLRVCVDTVRTNVYLAVFDKNLYDKLVSSFLEMKSEKQVEQKIAEIPKEEVKPFITESKPSVEQRKQDDKKIKACVEEVTTTLEETKFLTENLLLYIDINGNLHPDSATLVSDIDITFLKKDAPYIVGDVVQEGVLTAVVIPTKKAGGTTEMLAKALRKVPTDNYITTYPGQGLNGYTVEEAKTVLKKCKSAFYILPSIISNEKQEILGTVSWNLREMLAHAEETRKLMPVCVETKAIVSTIQRKYKGIKIQEGVVDYGARFYFYTSKTTVASLINTLNDLNETLVTMPLGYVTHGLNLEEAARYMRSLKVPATVSVSSPDAVTAYNGYLTSSSKTPEEHFIETISLAGSYKDWSYSGQSTQLGIEFLKRGDKSVYYTSNPTTFHLDGEVITFDNLKTLLSLREVRTIKVFTTVDNINLHTQVVDMSMTYGQQFGPTYLDGADVTKIKPHNSHEGKTFYVLPNDDTLRVEAFEYYHTTDPSFLGRYMSALNHTKKWKYPQVNGLTSIKWADNNCYLATALLTLQQIELKFNPPALQDAYYRARAGEAANFCALILAYCNKTVGELGDVRETMSYLFQHANLDSCKRVLNVVCKTCGQQQTTLKGVEAVMYMGTLSYEQFKKGVQIPCTCGKQATKYLVQQESPFVMMSAPPAQYELKHGTFTCASEYTGNYQCGHYKHITSKETLYCIDGALLTKSSEYKGPITDVFYKENSYTTTIKPVTYKLDGVVCTEIDPKLDNYYKKDNSYFTEQPIDLVPNQPYPNASFDNFKFVCDNIKFADDLNQLTGYKKPASRELKVTFFPDLNGDVVAIDYKHYTPSFKKGAKLLHKPIVWHVNNATNKATYKPNTWCIRCLWSTKPVETSNSFDVLKSEDAQGMDNLACEDLKPVSEEVVENPTIQKDILECNVKTTEVVGDIILKPANNSLKITEEVGHTDLMAAYVDNSSLTIKKPNELSRVLGLKTLATHGLAAVNSVPWDTIANYAKPFLNKVVSTTTNIVTRCLNRVCTNYMPYFFTLLLQLCTFTRSTNSRIKASMPTTIAKNTVKSVGKFCLEASFNYLKSPNFSKLINIIIWFLLLSVCLGSLIYSTAALGVLMSNLGMPSYCTGYREGYLNSTNVTIATYCTGSIPCSVCLSGLDSLDTYPSLETIQITISSFKWDLTAFGLVAEWFLAYILFTRFFYVLGLAAIMQLFFSYFAVHFISNSWLMWLIINLVQMAPISAMVRMYIFFASFYYVWKSYVHVVDGCNSSTCMMCYKRNRATRVECTTIVNGVRRSFYVYANGGKGFCKLHNWNCVNCDTFCAGSTFISDEVARDLSLQFKRPINPTDQSSYIVDSVTVKNGSIHLYFDKAGQKTYERHSLSHFVNLDNLRANNTKGSLPINVIVFDGKSKCEESSAKSASVYYSQLMCQPILLLDQALVSDVGDSAEVAVKMFDAYVNTFSSTFNVPMEKLKTLVATAEAELAKNVSLDNVLSTFISAARQGFVDSDVETKDVVECLKLSHQSDIEVTGDSCNNYMLTYNKVENMTPRDLGACIDCSARHINAQVAKSHNIALIWNVKDFMSLSEQLRKQIRSAAKKNNLPFKLTCATTRQVVNVVTTKIALKGG

SEQ ID NO: 16304 - protein, 1946 aa, Artificial Sequence
  SARS-CoV-2__MT477835.1__non-structural protein 3 (NSP3)
MAPTKVTFGDDTVIEVQGYKSVNITFELDERIDKVLNEKCSAYTVELGTEVNEFACVVADAVIKTLQPVSELLTPLGIDLDEWSMATYYLFDESGEFKLASHMYCSFYPPDEDEEEGDCEEEEFEPSTQYEYGTEDDYQGKPLEFGATSAALQPEEEQEEDWLDDDSQQTVGQQDGSEDNQTTTIQTIVEVQPQLEMELTPVVQTIEVNSFSGYLKLTDNVYIKNADIVEEAKKVKPTVVVNAANVYLKHGGGVAGALNKATNNAMQVESDDYIATNGPLKVGGSCVLSGHNLAKHCLHVVGPNVNKGEDIQLLKSAYENFNQHEVLLAPLLSAGIFGADPIHSLRVCVDTVRTNVYLAVFDKNLYDKLVSSFLEMKSEKQVEQKIAEIPKEEVKPFITESKPSVEQRKQDDKKIKACVEEVTTTLEETKFLTENLLLYIDINGNLHPDSATLVSDIDITFLKKDAPYIVGDVVQEGVLTAVVIPTKKAGGTTEMLAKALRKVPTDNYITTYPGQGLNGYTVEEAKTVLKKCKSAFYILPSIISNEKQEILGTVSWNLREMLAHAEETRKLMPVCVETKAIVSTIQRKYKGIKIQEGVVDYGARFYFYTSKTTVASLINTLNDLNETLVTMPLGYVTHGLNLEEAARYMRSLKVPATVSVSSPDAVTAYNGYLTSSSKTPEEHFIETISLAGSYKDWSYSGQSTQLGIEFLKRGDKSVYYTSNPTTFHLDGEVITFDNLKTLLSLREVRTIKVFTTVDNINLHTQVVDMSMTYGQQFGPTYLDGADVTKIKPHNSHEGKTFYVLPNDDTLRVEAFEYYHTTDPSFLGRYMSALNHTKKWKYPQVNGLTSIKWADNNCYLATALLTLQQIELKFNPPALQDAYYRARAGEAANFCALILAYCNKTVGELGDVRETMSYLFQHANLDSCKRVLNVVCKTCGQQQTTLKGVEAVMYMGTLSYEQFKKGVQIPCTCGKQATKYLVQQESPFVMMSAPPAQYELKHGTFTCASEYTGNYQCGHYKHITSKETLYCIDGALLTKSSEYKGPITDVFYKENSYTTTIKPVTYKLDGVVCTEIDPKLDNYYKKDNSYFTEQPIDLVPNQPYPNASFDNFKFVCDNIKFADDLNQLTGYKKPASRELKVTFFPDLNGDVVAIDYKHYTPSFKKGAKLLHKPIVWHVNNATNKATYKPNTWCIRCLWSTKPVETSNSFDVLKSEDAQGMDNLACEDLKPVSEEVVENPTIQKDVLECNVKTTEVVGDIILKPVNNSLKITEEVGHTDLMAAYVDNSSLTIKKPNELSRVLGLKTLATHGLAAVNSVPWDTIANYAKPFLNKVVSTTTNIVTRCLNRVCTNYMPYFFTLLLQLCTFTRSTNSRIKASMPTTIAKNTVKSVGKFCLEASFNYLKSPNFSKLINIIIWFLLLSVCLGSLIYSTAALGVLMSNLGMPSYCTGYREGYLNSTNVTIATYCTGSIPCSVCLSGLDSLDTYPSLETIQITISSFKWDLTAFGLVAEWFLAYILFTRFFYVLGLAAIMQLFFSYFAVHFISNSWLMWLIINLVQMAPISAMVRMYIFFASFYYVWKSYVHVVDGCNSSTCMMCYKRNRATRVECTTIVNGVRRSFYVYANGGKGFCKLHNWNCVNCDTFCAGSTFISDEVARDLSLQFKRPINPTDQSSYIVDSVTVKNGSIHLYFDKAGQKTYERHSLSHFVNLDNLRANNTKGSLPINVIVFDGKSKCEESSAKSASVYYSQLMCQPILLLDQALVSDVGDSAEVAVKMFDAYVNTFSSTFNVPMEKLKTLVATAEAELAKNVSLDNVLSTFISAARQGFVDSDVETKDVVECLKLSHQSDIEVTGDSCNNYMLTYNKVENMTPRDLGACIDCSARHINAQVAKSHNIALIWNVKDFMSLSEQLRKQIRSAAKKNNLPFKLTCATTRQVVNVVTTKIALKGG

SEQ ID NO: 16305 - protein, 1946 aa, Artificial Sequence
  SARS-CoV-2__MT477844.1__non-structural protein 3 (NSP3)
MAPTKVTFGDDTVIEVQGYKSVNITFELDERIDKVLNEKCSAYTVELGTEVNEFACVVADAVIKTLQPVSELLTPLGIDLDEWSMATYYLFDESGEFKLASHMYCSFYPPDEDEEEGDCEEEEFEPSTQYEYGTEDDYQGKPLEFGATSAALQPEEEQEEDWLDDDSQQTVGQQDGSEDNQTTTIQTIVEVQSQLEMELTPVVQTIEVNSFSGYLKLTDNVYIKNADIVEEAKKVKPTVVVNAANVYLKHGGGVAGALNKATNNAMQVESDDYIATNGPLKVGGSCVLSGHNLAKHCLHVVGPNVNKGEDIQLLKSAYENFNQHEVLLAPLLSAGIFGADPIHSLRVCVDTVRTNVYLAVFDKNLYDKLVSSFLEMKSEKQVEQKIAEIPKEEVKPFITESKPSVEQRKQDDKKIKACVEEVTTTLEETKFLTENLLLYIDINGNLHPDSATLVSDIDITFLKKDAPYIVGDVVQEGVLTAVVIPTKKAGGTTEMLAKALRKVPTDNYITTYPGQGLNGYTVEEAKTVLKKCKSAFYILPSIISNEKQEILGTVSWNLREMLAHAEETRKLMPVCVETKAIVSTIQRKYKGIKIQEGVVDYGARFYFYTSKTTVASLINTLNDLNETLVTMPLGYVTHGLNLEEAARYMRSLKVPATVSVSSPDAVTAYNGYLTSSSKTPEEHFIETISLAGSYKDWSYSGQSTQLGIEFLKRGDKSVYYTSNPTTFHLDGEVITFDNLKTLLSLREVRTIKVFTTVDNINLHTQVVDMSMTYGQQFGPTYLDGADVTKIKPHNSHEGKTFYVLPNDDTLRVEAFEYYHTTDPSFLGRYMSALNHTKKWKYPQVNGLTSIKWADNNCYLATALLTLQQIELKFNPPALQDAYYRARAGEAANFCALILAYCNKTVGELGDVRETMSYLFQHANLDSCKRVLNVVCKTCGQQQTTLKGVEAVMYMGTLSYEQFKKGVQIPCTCGKQATKYLVQQESPFVMMSAPPAQYELKHGTFTCASEYTGNYQCGHYKHITSKETLYCIDGALLTKSSEYKGPITDVFYKENSYTTTIKPVTYKLDGVVCTEIDPKLDNYYKKDNSYFTEQPIDLVPNQPYPNASFDNFKFVCDNIKFADDLNQLTGYKKPASRELKVTFFPDLNGDVVAIDYKHYTPSFKKGAKLLHKPIVWHVNNATNKATYKPNTWCIRCLWSTKPVETSNSFDVLKSEDAQGMDNLACEDLKPVSEEVVENPTIQKDVLECNVKTTEVVGDIILKPANNSLKITEEVGHTDLMAAYVDNSSLTIKKPNELSRVLGLKTLATHGLAAVNSVPWDTIANYAKPFLNKVVSTTTNIVTRCLNRVCTNYMPYFFTLLLQLCTFTRSTNSRIKASMPTTIAKNTVKSVGKFCLEASFNYLKSPNFSKLINIIIWFLLLSVCLGSLIYSTAALGVLMSNLGMPSYCTGYREGYLNSTNVTIATYCTGSIPCSVCLSGLDSLDTYPSLETIQITISSFKWDLTAFGLVAEWFLAYILFTRFFYVLGLAAIMQLFFSYFAVHFISNSWLMWLIINLVQMAPISAMVRMYIFFASFYYVWKSYVHVVDGCNSSTCMMCYKRNRATRVECTTIVNGVRRSFYVYANGGKGFCKLHNWNCVNCDTFCAGSTFISDEVARDLSLQFKRPINPTDQSSYIVDSVTVKNGSIHLYFDKAGQKTYERHSLSHFVNLDNLRANNTKGSLPINVIVFDGKSKCEESSAKSASVYYSQLMCQPILLLDQALVSDVGDSAEVAVKMFDAYVNTFSSTFNVPMEKLKTLVATAEAELAKNVSLDNVLSTFISAARQGFVDSDVETKDVVECLKLSHQSDIEVTGDSCNNYMLTYNKVENMTPRDLGACIDCSARHINAQVAKSHNIALIWNVKDFMSLSEQLRKQIRSAAKKNNLPFKLTCATTRQVVNVVTTKIALKGG

SEQ ID NO: 16306 - protein, 1946 aa, Artificial Sequence
  SARS-CoV-2__MT482113.1__non-structural protein 3 (NSP3)
MAPTKVTFGDDTVIEVQGYKSVNITFELDERIDKVLNEKCSAYTVELGTEVNEFACVVADAVIKTLQPVSELLTPLGIDLDEWSMATYYLFDESGEFKLASHMYCSFYPPDEDEEEGDCEEEEFEPSTQYEYGTEDDYQGKPLEFGATSAALQPEEEQEEDWLDDDSQQTVGQQDGSEDNQTTTIQTIVEVQPQLEMELTPVVQTIEVNSFSGYLKLTDNVYIKNADIVEEAKKVKPTVVVNAANVYLKHGGGVAGALNKATNNAMQVESDDYIATNGPLKVGGSCVLSGHNLAKHCLHVVGPNVNKGEDIQLLKSAYENFNQHEVLLAPLLSAGIFGADPIHSLRVCVDTVRTNVYLAVFDKNLYDKLVSSFLEMKSEKQVEQKIAEIPKEEVKPFITESKPSVEQRKQDDKKIKACVEEVTTTLEETKFLTENLLLYIDINGNLHPDSATLVSDIDITFLKKDAPYIVGDVVQEGVLTAVVIPTKKAGGTTEMLAKALRKVPTDNYITTYPGQGLNGYTVEEAKTVLKKCKSAFYILPSIISNEKQEILGTVSWNLREMLAHAEETRKLMPVCVETKAIVSTIQRKYKGIKIQEGVVDYGARFYFYTSKTTVASLINTLNDLNETLVTMPLGYVTHGLNLEEAARYMRSLKVPATVSVSSPDAVTAYNGYLTSSSKTPEEHFIETISLAGSYKDWSYSGQSTQLGIEFLKRGDKSVYYTSNPTTFHLDGEVITFDNLKTLLSLREVRTIKVFTTVDNINLHTQVVDMSMTYGQQFGPTYLDGADVTKIKPHNSHEGKTFYVLPNDDTLRVEAFEYYHTTDPSFLGRYMSALNHTKKWKYPQVNGLTSIKWADNNCYLATALLTLQQIELKFSPPALQDAYYRARAGEAANFCALILAYCNKTVGELGDVRETMSYLFQHANLDSCKRVLNVVCKTCGQQQTTLKGVEAVMYMGTLSYEQFKKGVQIPCTCGKQATKYLVQQESPFVMMSAPPAQYELKHGTFTCASEYTGNYQCGHYKHITSKETLYCIDGALLTKSSEYKGPITDVFYKENSYTTTIKPVTYKLDGVVCTEIDPKLDNYYKKDNSYFTEQPIDLVPNQPYPNASFDNFKFVCDNIKFADDLNQLTGYKKPASRELKVTFFPDLNGDVVAIDYKHYTPSFKKGAKLLHKPIVWHVNNATNKATYKPNTWCIRCLWSTKPVETSNSFDVLKSEDAQGMDNLACEDLKPVSEEVVENPTIQKDVLECNVKTTEVVGDIILKPANNSLKITEEVGHTDLMAAYVDNSSLTIKKPNELSRVLGLKTLATHGLAAVNSVPWDTIANYAKPFLNKVVSTTTNIVTRCLNRVCTNYMPYFFTLLLQLCTFTRSTNSRIKASMPTTIAKNTVKSVGKFCLEASFNYLKSPNFSKLINIIIWFLLLSVCLGSLIYSTAALGVLMSNLGMPSYCTGYREGYLNSTNVTIATYCTGSIPCSVCLSGLDSLDTYPSLETIQITISSFKWDLTAFGLVAEWFLAYILFTRFFYVLGLAAIMQLFFSYFAVHFISNSWLMWLIINLVQMAPISAMVRMYIFFASFYYVWKSYVHVVDGCNSSTCMMCYKRNRATRVECTTIVNGVRRSFYVYANGGKGFCKLHNWNCVNCDTFCAGSTFISDEVARDLSLQFKRPINPTDQSSYIVDSVTVKNGSIHLYFDKAGQKTYERHSLSHFVNLDNLRANNTKGSLPINVIVFDGKSKCEESSAKSASVYYSQLMCQPILLLDQALVSDVGDSAEVAVKMFDAYVNTFSSTFNVPMEKLKTLVATAEAELAKNVSLDNVLSTFISAARQGFVDSDVETKDVVECLKLSHQSDIEVTGDSCNNYMLTYNKVENMTPRDLGACIDCSARHINAQVAKSHNIALIWNVKDFMSLSEQLRKQIRSAAKKNNLPFKLTCATTRQVVNVVTTKIALKGG

SEQ ID NO: 16307 - protein, 1946 aa, Artificial Sequence
  SARS-CoV-2__MT482134.1__non-structural protein 3 (NSP3)
MAPTKVTFGDDTVIEVQGYKSVNITFELDERIDKVLNEKCSAYTVELGTEVNEFACVVADAVIKTLQPVSELLTPLGIDLDEWSMATYYLFDESGEFKLASHMYCSFYPPDEDEEEGDCEEEEFEPSTQYEYGTEDDYQGKPLEFGATSAALQPEEEQEEDWLDDDSQQTVGQQDGSEDNQTTTIQTIVEVQPQLEMELTPVVQTSFSGYLKLTDNVYIKNADIVEEAKKVKPTVVVNAANVYLKHGGGVAGALNKATNNAMQVESDDYIATNGPLKVGGSCVLSGHNLAKHCLHVVGPNVNKGEDIQLLKSAYENFNQHEVLLAPLLSAGIFGADPIHSLRVCVDTVRTNVYLAVFDKNLYDKLVSSFLEMKSEKQVEQKIAEIPKEEVKPFITESKPSVEQRKQDDKKIKACVEEVTTTLEETKFLTENLLLYIDINGNLHPDSATLVSDIDITFLKKDAPYIVGDVVQEGVLTAVVIPTKKAGGTTEMLAKALRKVPTDNYITTYPGQGLNGYTVEEAKTVLKKCKSAFYILPSIISNEKQEILGTVSWNLREMLAHAEETRKLMPVCVETKAIVSTIQRKYKGIKIQEGVVDYGARFYFYTSKTTVASLINTLNDLNETLVTMPLGYVTHGLNLEEAARYMRSLKVPATVSVSSPDAVTAYNGYLTSSSKTPEEHFIETISLAGSYKDWSYSGQSTQLGIEFLKRGDKSVYYTSNPTTFHLDGEVITFDNLKTLLSLREVRTIKVFTTVDNINLHTQVVDMSMTYGQQFGPTYLDGADVTKIKPHNSHEGKTFYVLPNDDTLRVEAFEYYHTTDPSFLGRYMSALNHTKKWKYPQVNGLTSIKWADNNCYLATALLTLQQIELKFNPPALQDAYYRARAGEAANFCALILAYCNKTVGELGDVRETMSYLFQHANLDSCKRVLNVVCKTCGQQQTTLKGVEAVMYMGTLSYEQFKKGVQIPCTCGKQATKYLVQQESPFVMMSAPPAQYELKHGTFTCASEYTGNYQCGHYKHITSKETLYCIDGALLTKSSEYKGPITDVFYKENSYTTTIKPVTYKLDGVVCTEIDPKLDNYYKKDNSYFTEQPIDLVPNQPYPNASFDNFKFVCDNIKFADDLNQLTGYKKPASRELKVTFFPDLNGDVVAIDYKHYTPSFKKGAKLLHKPIVWHVNNATNKATYKPNTWCIRCLWSTKPVETSNSFDVLKSEDAQGMDNLACEDLKPVSEEVVENPTIQKDVLECNVKTTEVVGDIILKPANNSLKITEEVGHTDLMAAYVDNSSLTIKKPNELSRVLGLKTLATHGLAAVNSVPWDTIANYAKPFLNKVVSTTTNIVTRCLNRVCTNYMPYFFTLLLQLCTFTRSTNSRIKASMPTTIAKNTVKSVGKFCLEASFNYLKSPNFSKLINIIIWFLLLSVCLGSLIYSTAALGVLMSNLGMPSYCTGYREGYLNSTNVTIATYCTGSIPCSVCLSGLDSLDTYPSLETIQITISSFKWDLTAFGLVAEWFLAYILFTRFFYVLGLAAIMQLFFSYFAVHFISNSWLMWLIINLVQMAPISAMVRMYIFFASFYYVWKSYVHVVDGCNSSTCMMCYKRNRATRVECTTIVNGVRRSFYVYANGGKGFCKLHNWNCVNCDTFCAGSTFISDEVARDLSLQFKRPINPTDQSSYIVDSVTVKNGSIHLYFDKAGQKTYERHSLSHFVNLDNLRANNTKGSLPINVIVFDGKSKCEESSAKSASVYYSQLMCQPILLLDQALVSDVGDSAEVAVKMFDAYVNTFSSTFNVPMEKLKTLVATAEAELAKNVSLDNVLSTFISAARQGFVDSDVETKDVVECLKLSHQSDIEVTGDSCNNYMLTYNKVENMTPRDLGACIDCSARHINAQVAKSHNIALIWNVKDFMSLSEQLRKQIRSAAKKNNLPFKLTCATTRQVVNVVTTKIALKGGKIVN

SEQ ID NO: 16308 - protein, 1946 aa, Artificial Sequence
  SARS-CoV-2__MT482141.1__non-structural protein 3 (NSP3)
MAPTKVTFGDDTVIEVQGYKSVNITFELDERIDKVLNEKCSAYTVELGTEVNEFACVVADAVIKTLQPVSELLTPLGIDLDEWSMATYYLFDESGEFKLASHMYCSFYPPDEDEEEGDCEEEEFEPSTQYEYGTEDDYQGKPLEFGATSAALQPEEEQEEDWLDDDSQQTVGQQDGSEDNQTTTIQTIVEVQPQLEMELTPVVQTIEVNSFSGYLKLTDNVYIKNADIVEEAKKVKPTVVVNAANVYLKHGGGVAGALNKATNNAMQVESDDYIATNGPLKVGGSCVLSGHNLAKHCLHVVGPNVNKGEDIQLLKSAYENFNQHEVLLAPLLSAGIFGADPIHSLRVCVDTVRTNVYLAVFDKNLYDKLVSSFLEMKSEKQVEQKIAEIPKEEVKPFITESKPSVEQRKQDDKKIKACVEEVTTTLEETKFLTENLLLYIDINGNLHPDSATLVSDIDITFLKKDAPYIVGDVVQEGVLTAVVIPTKKAGGTTEMLAKALRKVPTDNYITTYPGQGLNGYTVEEAKTVLKKCKSAFYILPSIISNEKQEILGTVSWNLREMLAHAEETRKLMPVCVETKAIVSTIQRKYKGIKIQEGVVDYGARFYFYTSKTTVASLINTFNDLNETLVTMPLGYVTHGLNLEEAARYMRSLKVPATVSVSSPDAVTAYNGYLTSSSKTPEEHFIETISLAGSYKDWSYSGQSTQLGIEFLKRGDKSVYYTSNPTTFHLDGEVITFDNLKTLLSLREVRTIKVFTTVDNINLHTQVVDMSMTYGQQFGPTYLDGADVTKIKPHNSHEGKTFYVLPNDDTLRVEAFEYYHTTDPSFLGRYMSALNHTKKWKYPQVNGLTSIKWADNNCYLATALLTLQQIELKFNPPALQDAYYRARAGEAANFCALILAYCNKTVGELGDVRETMSYLFQHANLDSCKRVLNVVCKTCGQQQTTLKGVEAVMYMGTLSYEQFKKGVQIPCTCGKQATKYLVQQESPFVMMSAPPAQYELKHGTFTCASEYTGNYQCGHYKHITSKETLYCIDGALLTKSSEYKGPITDVFYKENSYTTTIKPVTYKLDGVVCTEIDPKLDNYYKKDNSYFTEQPIDLVPNQPYPNASFDNFKFVCDNIKFADDLNQLTGYKKPASRELKVTFFPDLNGDVVAIDYKHYTPSFKKGAKLLHKPIVWHVNNATNKATYKPNTWCIRCLWSTKPVETSNSFDVLKSEDAQGMDNLACEDLKPVSEEVVENPTIQKDVLECNVKTTEVVGDIILKPANNSLKITEEVGHTDLMAAYVDNSSLTIKKPNELSRVLGLKTLATHGLAAVNSVPWDTIANYAKPFLNKVVSTTTNIVTRCLNRVCTNYMPYFFTLLLQLCTFTRSTNSRIKASMPTTIAKNTVKSVGKFCLEASFNYLKSPNFSKLINIIIWFLLLSVCLGSLIYSTAALGVLMSNLGMPSYCTGYREGYLNSTNVTIATYCTGSIPCSVCLSGLDSLDTYPSLETIQITISSFKWDLTAFGLVAEWFLAYILFTRFFYVLGLAAIMQLFFSYFAVHFISNSWLMWLIINLVQMAPISAMVRMYIFFASFYYVWKSYVHVVDGCNSSTCMMCYKRNRATRVECTTIVNGVRRSFYVYANGGKGFCKLHNWNCVNCDTFCAGSTFISDEVARDLSLQFKRPINPTDQSSYIVDSVTVKNGSIHLYFDKAGQKTYERHSLSHFVNLDNLRANNTKGSLPINVIVFDGKSKCEESSAKSASVYYSQLMCQPILLLDQALVSDVGDSAEVAVKMFDAYVNTFSSTFNVPMEKLKTLVATAEAELAKNVSLDNVLSTFISAARQGFVDSDVETKDVVECLKLSHQSDIEVTGDSCNNYMLTYNKVENMTPRDLGACIDCSARHINAQVAKSHNIALIWNVKDFMSLSEQLRKQIRSAAKKNNLPFKLTCATTRQVVNVVTTKIALKGG

SEQ ID NO: 16309 - protein, 1946 aa, Artificial Sequence
  SARS-CoV-2__MT482144.1__non-structural protein 3 (NSP3)
MAPTKVTFGDDTVIEVQGYKSVNITFELDERIDKVLNEKCSAYTVELGTEVNEFACVVADAVIKTLQPVSELLTPLGIDLDEWSMATYYLFDESGEFKLASHMYCSFYPPDEDEEEGDCEEEEFEPSTQYEYGTEDDYQGKPLEFGATSAALQPEEEQEEDWLDDDSQQTVGQQDGSEDNQTTTIQTIVEVQPQLEMELTPVVQTIEVNSFSGYLKLTDNVYIKNADIVEEAKKVKPTVVVNAANVYLKHGGGVAGALNKATNNAMQVESDDYIATNGPLKVGGSCVLSGHNLAKHCLHVVGPNVNKGEDIQLLKSAYENFNQHEVLLAPLLSAGIFGADPIHSLRVCVDTVRTNVYLAVFDKNLYDKLVSSFLEMKSEKQVEQKIAEIPKEEVKPFITESKPSVEQRKQDDKKIKACVEEVTTTLEETKFLTENLLLYIDINGNLHPDSATLVSDIDITFLKKDAPYIVGDVVQEGVLTAVVIPTKKAGGTTEMLAKALRKVPTDNYITTYPGQGLNGYTVEEAKTVLKKCKSAFYILPSIISNEKQEILGTVSWNLREMLAHAEETRKLMPVCVETKAIVSTIQRKYKGIKIQEGVVDYGARFYFYTSKTTVASLINTLNDLNETLVTMPLGYVTHGLNLEEAARYMRSLKVPATVSVSSPDAVTAYNGYLTSSSKTPEEHFIETISLAGSYKDWSYSGQSTQLGIEFLKRGDKSVYYTSNPTTFHLDGEVITFDNLKTLLSLREVRTIKVFTTVDNINLHTQVVDMSMTYGQQFGPTYLDGADVTKIKPHNSHEGKTFYVLPNDDTLRVEAFEYYHTTDPSFLGRYMSALNHTKKWKYPQVNGLTSIKWADNNCYLATALLTLQQIELKFNPPALQDAYYRARAGEAANFCALILAYCNKTVGELGDVRETMSYLFQHANLDSCKRVLNVVCKTCGQQQTTLKGVEAVMYMGTLSYEQFKKGVQIPCTCGKQATKYLVQQESPFVMMSAPPAQYELKHGTFTCASEYTGNYQCGHYKHITSKETLYCIDGALLTKSSEYKGPITDVFYKENSYTTTIKPVTYKLDGVVCTEIDPKLDNYYKKDNSYFTEQPIDLVPNQPYLNASFDNFKFVCDNIKFADDLNQLTGYKKPASRELKVTFFPDLNGDVVAIDYKHYTPSFKKGAKLLHKPIVWHVNNATNKATYKPNTWCIRCLWSTKPVETSNSFDVLKSEDAQGMDNLACEDLKPVSEEVVENPTIQKDVLECNVKTTEVVGDIILKPANNSLKITEEVGHTDLMAAYVDNSSLTIKKPNELSRVLGLKTLATHGLAAVNSVPWDTIANYAKPFLNKVVSTTTNIVTRCLNRVCTNYMPYFFTLLLQLCTFTRSTNSRIKASMPTTIAKNTVKSVGKFCLEASFNYLKSPNFSKLINIIIWFLLLSVCLGSLIYSTAALGVLMSNLGMPSYCTGYREGYLNSTNVTIATYCTGSIPCSVCLSGLDSLDTYPSLETIQITISSFKWDLTAFGLVAEWFLAYILFTRFFYVLGLAAIMQLFFSYFAVHFISNSWLMWLIINLVQMAPISAMVRMYIFFASFYYVWKSYVHVVDGCNSSTCMMCYKRNRATRVECTTIVNGVRRSFYVYANGGKGFCKLHNWNCVNCDTFCAGSTFISDEVARDLSLQFKRPINPTDQSSYIVDSVIVKNGSIHLYFDKAGQKTYERHSLSHFVNLDNLRANNTKGSLPINVIVFDGKSKCEESSAKSASVYYSQLMCQPILLLDQALVSDVGDSAEVAVKMFDAYVNTFSSTFNVPMEKLKTLVATAEAELAKNVSLDNVLSTFISAARQGFVDSDVETKDVVECLKLSHQSDIEVTGDSCNNYMLTYNKVENMTPRDLGACIDCSARHINAQVAKSHNIALIWNVKDFMSLSEQLRKQIRSAAKKNNLPFKLTCATTRQVVNVVTTKIALKGG

SEQ ID NO: 16310 - protein, 1946 aa, Artificial Sequence
  SARS-CoV-2__MT358638.1__non-structural protein 3 (NSP3)
MAPTKVTFGDDTVIEVQGYKSVNITFELDERIDKVLNEKCSAYTVELGTEVNEFACVVADAVIKTLQPVSELLTPLGIDLDEWSMATYYLFDESGEFKLASHMYCSFYPPDEDEEEGDCEEEEFEPSTQYEYGTEDDYQGKPLEFGATSAALQPEEEQEEDWLDDDSQQTVGQQDGSEDNQTTTIQTIVEVQPQLEMELTPVVQTIEVNSFSGYLKLTDNVYIKNADIVEEAKKVKPTVVVNAANVYLKHGGGVAGALNKATNNAMQFESDDYIATNGPLKVGGSCVLSGHNLAKHCLHVVGPNVNKGEDIQLLKSAYENFNQHEVLLAPLLSAGIFGADPIHSLRVCVDTVRTNVYLAVFDKNLYDKLVSSFLEMKSEKQVEQKIAEIPKEEVKPFITESKPSVEQRKQDDKKIKACVEEVTTTLEETKFLTENLLLYIDINGNLHPDSATLVSDIDITFLKKDAPYIVGDVVQEGVLTAVVIPTKKAGGTTEMLAKALRKVPTDNYITTYPGQGLNGYTVEEAKTVLKKCKSAFYILPSIISNEKQEILGTVSWNLREMLAHAEETRKLMPVCVETKAIVSTIQRKYKGIKIQEGVVDYGARFYFYTSKTTVASLINTLNDLNETLVTMPLGYVTHGLNLEEAARYMRSLKVPATVSVSSPDAVTAYNGYLTSSSKTPEEHFIETISLAGSYKDWSYSGQSTQLGIEFLKRGDKSVYYTSNPTTFHLDGEVITFDNLKTLLSLREVRTIKVFTTVDNINLHTQVVDMSMTYGQQFGPTYLDGADVTKIKPHNSHEGKTFYVLPNDDTLRVEAFEYYHTTDPSFLGRYMSALNHTKKWKYPQVNGLTSIKWADNNCYLATALLTLQQIELKFNPPALQDAYYRARAGEAANFCALILAYCNKTVGELGDVRETMSYLFQHANLDSCKRVLNVVCKTCGQQQTTLKGVEAVMYMGTLSYEQFKKGVQIPCTCGKQATKYLVQQESPFVMMSAPPAQYELKHGTFTCASEYTGNYQCGHYKHITSKETLYCIDGALLTKSSEYKGPITDVFYKENSYTTTIKPVTYKLDGVVCTEIDPKLDNYYKKDNSYFTEQPIDLVPNQPYPNASFDNFKFVCDNIKFADDLNQLTGYKKPASRELKVTFFPDLNGDVVAIDYKHYTPSFKKGAKLLHKPIVWHVNNATNKATYKPNTWCIRCLWSTKPVETSNSFDVLKSEDAQGMDNLACEDLKPVSEEVVENPTIQKDVLECNVKTTEVVGDIILKPANNSLKITEEVGHTDLMAAYVDNSSLTIKKPNELSRVLGLKTLATHGLAAVNSVPWDTIANYAKPFLNKVVSTTTNIVTRCLNRVCTNYMPYFFTLLLQLCTFTRSTNSRIKASMPTTIAKNTVKSVGKFCLEASFNYLKSPNFSKLINIIIWFLLLSVCLGSLIYSTAALGVLMSNLGMPSYCTGYREGYLNSTNVTIATYCTGSIPCSVCLSGLDSLDTYPSLETIQITISSFKWDLTAFGLVAEWFLAYILFTRFFYVLGLAAIMQLFFSYFAVHFISNSWLMWLIINLVQMAPISAMVRMYIFFASFYYVWKSYVHVVDGCNSSTCMMCYKRNRATRVECTTIVNGVRRSFYVYANGGKGFCKLHNWNCVNCDTFCAGSTFISDEVARDLSLQFKRPINPTDQSSYIVDSVTVKNGSIHLYFDKAGQKTYERHSLSHFVNLDNLRANNTKGSLPINVIVFDGKSKCEESSAKSASVYYSQLMCQPILLLDQALVSDVGDSAEVAVKMFDAYVNTFSSTFNVPMEKLKTLVATAEAELAKNVSLDNVLSTFISAARQGFVDSDVETKDVVECLKLSHQSDIEVTGDSCNNYMLTYNKVENMTPRDLGACIDCSARHINAQVAKSHNIALIWNVKDFMSLSEQLRKQIRSAAKKNNLPFKLTCATTRQVVNVVTTKIALKGG

SEQ ID NO: 16311 - protein, 1946 aa, Artificial Sequence
  SARS-CoV-2__MT358640.1__non-structural protein 3 (NSP3)
MAPTKVTFGDDTVIEVQGYKSVNITFELDERIDKVLNEKCSAYTVELGTEVNEFACVVADAVIKTLQPVSELLTPLGIDLDEWSMATYYLFDESGEFKLASHMYCSFYPPDEDEEEGDCEEEEFEPSTQYEYGTEDDYQGKPLEFGATSAALQPEEEQEEDWLDDDSQQTVGQQDGSEDNQTTTIQTIVEVQPQLEMELTPVVQTIEVNSFSGYLKLTDNVYIKNADIVEEAKKVKPTVVVNAANVYLKHGGGVAGALNKATNNAMQVESDDYIATNGPLKVGGSCVLSGHNLAKHCLHVVGPNVNKGEDIQLLKSAYENFNQHEVLLAPLLSAGIFGADPIHSLRVCVDTVRTNVYLAVFDKNLYDKLVSSFLEMKSEKQVEQKIAEIPKEEVKPFITESKPSVEQRKQDDKKIKACVEEVTTTLEETKFLTENLLLYIDINGNLHPDSATLVSDIDITFLKKDAPYIVGDVVQEGVLTAVVIPTKKAGGTTEMLAKALRKVPTDNYITTYPGQGLNGYTVEEAKTVLKKCKSAFYILPSIISNEKQEILGTVSWNLREMLAHAEETRKLMPVCVETKAIVSTIQRKYKGIKIQEGVVDYGARFYFYTSKTTVASLINTLNDLNETLVTMPLGYVTHGLNLEEAARYMRSLKVPATVSVSSPDAVTAYNGYLTSSSKTPEEHFIETISLAGSYKDWSYSGQSTQLGIEFLKRGDKSVYYTSNPTTFHLDGEVITFDNLKTLLSLREVRTIKVFTTVDNINLHTQVVDMSMTYGQQFGPTYLDGADVTKIKPHNSHEGKTFYVLPNDDTLRVEAFEYYHTTDPSFLGRYMSALNHTKKWKYPQVNGLTSIKWADNNCYLATALLTLQQIELKFNPPALQDAYYRARAGEAANFCALILAYCNKTVGELGDVRETMSYLFQHANLDSCKRVLNVVCKTCGQQQTTLKGVEAVMYMGTLSYEQFKKGVQIPCTCGKQATKYLVQQESPFVMMSAPPAQYELKHGTFTCASEYTGNYQCGHYKHITSKETLYCIDGALLTKSSEYKGPITDVFYKENSYTTTIKPVTYKLDGVVCTEIDPKLDNYYKKDNSYFTEQPIDLVPNQPYPNASFDNFKFVCDNIKFADDLNQLTGYKKPASRELKVTFFPDLNGDVVAIDYKHYTPSFKKGAKLLHRPIVWHVNNATNKATYKPNTWCIRCLWSTKPVETSNSFDVLKSEDAQGMDNLACEDLKPVSEEVVENPTIQKDVLECNVKTTEVVGDIILKPANNSLKITEEVGHTDLMAAYVDNSSLTIKKPNELSRVLGLKTLATHGLAAVNSVPWDTIANYAKPFLNKVVSTTTNIVTRCLNRVCTNYMPYFFTLLLQLCTFTRSTNSRIKASMPTTIAKNTVKSVGKFCLEASFNYLKSPNFSKLINIIIWFLLLSVCLGSLIYSTAALGVLMSNLGMPSYCTGYREGYLNSTNVTIATYCTGSIPCSVCLSGLDSLDTYPSLETIQITISSFKWDLTAFGLVAEWFLAYILFTRFFYVLGLAAIMQLFFSYFAVHFISNSWLMWLIINLVQMAPISAMVRMYIFFASFYYVWKSYVHVVDGCNSSTCMMCYKRNRATRVECTTIVNGVRRSFYVYANGGKGFCKLHNWNCVNCDTFCAGSTFISDEVARDLSLQFKRPINPTDQSSYIVDSVTVKNGSIHLYFDKAGQKTYERHSLSHFVNLDNLRANNTKGSLPINVIVFDGKSKCEESSAKSASVYYSQLMCQPILLLDQALVSDVGDSAEVAVKMFDAYVNTFSSTFNVPMEKLKTLVATAEAELAKNVSLDNVLSTFISAARQGFVDSDVETKDVVECLKLSHQSDIEVTGDSCNNYMLTYNKVENMTPRDLGACIDCSARHINAQVAKSHNIALIWNVKDFMSLSEQLRKQIRSAAKKNNLPFKLTCATTRQVVNVVTTKIALKGG

SEQ ID NO: 16312 - protein, 1946 aa, Artificial Sequence
  SARS-CoV-2__MT467247.1__non-structural protein 3 (NSP3)
MAPTKVTFGDDTVIEVQGYKSVNITFELDERIDKVLNEKCSAYTVELGTEVNEFACVVADAVIKTLQPVSELLTPLGIDLDEWSMATYYLFDESGEFKLASHMYCSFYPPDEDEEEGDCEEEEFEPSTQYEYGTEDDYQGKPLEFGATSAALQPEEEQEEDWLDDDSQQTVGQQDGSEDNQTTTIQTIVEVQPQLEMELTPVVQTIEVNSFSGYLKLTDNVYIKNADIVEEAKKVKPTVVVNAANVYLKHGGGVAGALNKATNNAMQVESDDYIATNGPLKVGGSCVLSGHNLAKHCLHVVGPNVNKGEDIQLLKSAYENFNQHEVLLAPLLSAGIFGADSIHSLRVCVDTVRTNVYLAVFDKNLYDKLVSSFLEMKSEKQVEQKIAEIPKEEVKPFITESKPSVEQRKQDDKKIKACVEEVTTTLEETKFLTENLLLYIDINGNLHPDSATLVSDIDITFLKKDAPYIVGDVVQEGVLTAVVIPTKKAGGTTEMLAKALRKVPTDNYITTYPGQGLNGYTVEEAKTVLKKCKSAFYILPSIISNEKQEILGTVSWNLREMLAHAEETRKLMPVCVETKAIVSTIQRKYKGIKIQEGVVDYGARFYFYTSKTTVASLINTLNDLNETLVTMPLGYVTHGLNLEEAARYMRSLKVPATVSVSSPDAVTAYNGYLTSSSKTPEEHFIETISLAGSYKDWSYSGQSTQLGIEFLKRGDKIVYYTSNPTTFHLDGEVITFDNLKTLLSLREVRTIKVFTTVDNINLHTQVVDMSMTYGQQFGPTYLDGADVTKIKPHNSHEGKTFYVLPNDDTLRVEAFEYYHTTDPSFLGRYMSALNHTKKWKYPQVNGLTSIKWADNNCYLATALLTLQQIELKFNPPALQDAYYRARAGEAANFCALILAYCNKTVGELGDVRETMSYLFQHANLDSCKRVLNVVCKTCGQQQTTLKGVEAVMYMGTLSYEQFKKGVQIPCTCGKQATKYLVQQESPFVMMSAPPAQYELKHGTFTCASEYTGNYQCGHYKHITSKETLYCIDGALLTKSSEYKGPITDVFYKENSYTTTIKPVTYKLDGVVCTEIDPKLDNYYKKDNSYFTEQPIDLVPNQPYPNASFDNFKFVCDNIKFADDLNQLTGYKKPASRELKVTFFPDLNGDVVAIDYKHYTPSFKKGAKLLHKPIVWHVNNATNKATYKPNTWCIRCLWSTKPVETSNSFDVLKSEDAQGMDNLACEDLKPVSEEVVENPTIQKDVLECNVKTTEVVGDIILKPANNSLKITEEVGHTDLMAAYVDNSSLTIKKPNELSRVLGLKTLATHGLAAVNSVPWDTIANYAKPFLNKVVSTTTNIVTRCLNRVCTNYMPYFFTLLLQLCTFTRSTNSRIKASMPTTIAKNTVKSVGKFCLEASFNYLKSPNFSKLINIIIWFLLLSVCLGSLIYSTAALGVLMSNLGMPSYCTGYREGYLNSTNVTIATYCTGSIPCSVCLSGLDSLDTYPSLETIQITISSFKWDLTAFGLVAEWFLAYILFTRFFYVLGLAAIMQLFFSYFAVHFISNSWLMWLIINLVQMAPISAMVRMYIFFASFYYVWKSYVHVVDGCNSSTCMMCYKRNRATRVECTTIVNGVRRSFYVYANGGKGFCKLHNWNCVNCDTFCAGSTFISDEVARDLSLQFKRPINPTDQSSYIVDSVTVKNGSIHLYFDKAGQKTYERHSLSHFVNLDNLRANNTKGSLPINVIVFDGKSKCEESSAKSASVYYSQLMCQPILLLDQALVSDVGDSAEVAVKMFDAYVNTFSSTFNVPMEKLKTLVATAEAELAKNVSLDNVLSTFISAARQGFVDSDVETKDVVECLKLSHQSDIEVTGDSCNNYMLTYNKVENMTPRDLGACIDCSARHINAQVAKSHNIALIWNVKDFMSLSEQLRKQIRSAAKKNNLPFKLTCATTRQVVNVVTTKIALKGG

SEQ ID NO: 16313 - protein, 1946 aa, Artificial Sequence
  SARS-CoV-2__MT470104.1__non-structural protein 3 (NSP3)
MAPTKVTFGDDTVIEVQGYKSVNITFELDERIDKVLNEKCSAYTVELGTEVNEFACVVADAVIKTLQPVSELLTPLGIDLDEWSMATYYLFDESGEFKLASHMYCSFYPPDEDEEEGDCEEEEFEPSTQYEYGTEDDYQGKPLEFGATSAALQPEEEQEEDWLDDDSQQTVGQQDGSEDNQTTTIQTIVEVQPQLEMELTPVVQTIEVNSFSGYLKLTDNVYIKNADIVEEAKKVKPTVVVNAANVYLKHGGGVAGALNKATNNAMQVESDDYIATNGPLKVGGSCVLSGHNLAKHCLHVVGPNVNKGEDIQLLKSAYENFNQHEVLLAPLLSAGIFGADPIHSLRVCVDTVRTNVYLAVFDKNLYDKLVSSFLEMKSEKQVEQKIAEIPKEEVKPFITESKPSVEQRKQDDKKIKACVEEVTTTLEETKFLTENLLLYIDINGNLHPDSATLVSDIDITFLKKDAPYIVGDVVQEGVLTAVVIPTKKAGGTTEMLAKALRKVPTDNYITTYPGQGLNGYTVEEAKTVLKKCKSAFYILPSIISNEKQEILGTVSWNLREMLAHAEETRKLMPVCVETKAIVSTIQRKYKGIKIQEGVVDYGARFYFYTSKTTVASLINTLNDLNETLVTMPLGYVTHGLNLEEAARYMRSLKVPATVSVSSPDAVTAYNGYLTSSSKTPEEHFIETISLAGSYKDWSYSGQSTQLGIEFLKRGDKSVYYTSNPTTFHLDGEVITFDNLKTLLSLREVRTIKVFTTVDNINLHTQVVDMSMTYGQQFGPTYLDGADVTKIKPHNSHEGKTFYVLPNDDTLRVEAFEYYHTTDPSFLGRYMSALNHTKKWKYPQVNGLTSIKWADNNCYLATALLTLQQIELKFNPPALQDAYYRARAGEAANFCALILAYCNKTVGELGDVRETMSYLFQHANLDSCKRVLNVVCKTCGQQQTTLKGVEAVMYMGTLSYEQFKKGVQIPCTCGKQATKYLVQQESPFVMMSAPPAQYELKHGTFTCASEYTGNYQCGHYKHITSKETLYCIDGALLTKSSEYKGPITDVFYKENSYTTTIKPVTYKLDGVVCTEIDPKLDNYYKKDNSYFTEQPIDLVPNQPYPNASFDNFKFVCDNIKFADDLNQLTGYKKPASRELKVTFFPDLNGDVVAIDYKHYTPSFKKGAKLLHKPIVWHVNNATNKATYKPNTWCIRCLWSTKPVETSNSFDVLKSEDAQGMDNLACEDLKPVSEEVVENPTIQKDVLECNVKTTEVVGDIILKPANNSLKITEEVGHTDLMAAYVDNSSLTIKKPNELSRVLGLKTLATHGLAAVNSVPWDTIANYAKPFLNKVVSTTTNIVTRCLNRVCTNYMPYFFTLLLQLCTFTRSTNSRIKASMPTTIAKNTVKSVGKFCLEASFNYLKSPNFSKLINIIIWFLLLSVCLGSLIYSTAALGVLMSNLGMPSYCTGYREGYLNSTNVTIATYCTGSIPCSVCLSGLDSLDTYPSLETIQITISSFKWDLTAFGLVAEWFLAYILFTRFFYVLGLAAIMQLFFSYFAVYFISNSWLMWLIINLVQMAPISAMVRMYIFFASFYYVWKSYVHVVDGCSSSTCMMCYKRNRATRVECTTIVNGVRRSFYVYANGGKGFCKLHNWNCVNCDTFCAGSTFISDEVARDLSLQFKRPINPTDQSSYIVDSVTVKNGSIHLYFDKAGQKTYERHSLSHFVNLDNLRANNTKGSLPINVIVFDGKSKCEESSAKSASVYYSQLMCQPILLLDQALVSDVGDSAEVAVKMFDAYVNTFSSTFNVPMEKLKTLVATAEAELAKNVSLDNVLSTFISAARQGFVDSDVETKDVVECLKLSHQSDIEVTGDSCNNYMLTYNKVENMTPRDLGACIDCSARHINAQVAKSHNIALIWNVKDFMSLSEQLRKQIRSAAKKNNLPFKLTCATTRQVVNVVTTKIALKGG

SEQ ID NO: 16314 - protein, 1946 aa, Artificial Sequence
  SARS-CoV-2__MT470114.1__non-structural protein 3 (NSP3)
MAPTKVTFGDDTVIEVQGYKSVNITFELDERIDKVLNEKCSAYTVELGTEVNEFACVVADAVIKTLQPVSELLTPLGIDLDEWSMATYYLFDESGEFKLASHMYCSFYPPDEDEEEGDCEEEEFEPSTQYEYGTEDDYQGKPLEFGATSAALQPEEEQEEDWLDDDSQQTVGQQDGSEDNQTTTIQTIVEVQPQLEMELTPVVQTIEVNSFSGYLKLTDNVYIKNADIVEEAKKVKPPVVVNAANVYLKHGGGVAGALNKATNNAMQVESDDYIATNGPLKVGGSCVLSGHNLAKHCLHVVGPNVNKGEDIQLLKSAYENFNQHEVLLAPLLSAGIFGADPIHSLRVCVDTVRTNVYLAVFDKNLYDKLVSSFLEMKSEKQVEQKIAEIPKEEVKPFITESKPSVEQRKQDDKKIKACVEEVTTTLEETKFLTENLLLYIDINGNLHPDSATLVSDIDITFLKKDAPYIVGDVVQEGVLTAVVIPTKKAGGTTEMLAKALRKVPTDNYITTYPGQGLNGYTVEEAKTVLKKCKSAFYILPSIISNEKQEILGTVSWNLREMLAHAEETRKLMPVCVETKAIVSTIQRKYKGIKIQEGVVDYGARFYFYTSKTTVASLINTLNDLNETLVTMPLGYVTHGLNLEEAARYMRSLKVPATVSVSSPDAVTAYNGYLTSSSKTPEEHFIETISLAGSYKDWSYSGQSTQLGIEFLKRGDKSVYYTSNPTTFHLDGEVITFDNLKTLLSLREVRTIKVFTTVDNINLHTQVVDMSMTYGQQFGPTYLDGADVTKIKPHNSHEGKTFYVLPNDDTLRVEAFEYYHTTDPSFLGRYMSALNHTKKWKYPQVNGLTSIKWADNNCYLATALLTLQQIELKFNPPALQDAYYRARAGEAANFCALILAYCNKTVGELGDVRETMSYLFQHANLDSCKRVLNVVCKTCGQQQTTLKGVEAVMYMGTLSYEQFKKGVQIPCTCGKQATKYLVQQESPFVMMSAPPAQYELKHGTFTCASEYTGNYQCGHYKHITSKETLYCIDGALLTKSSEYKGPITDVFYKENSYTTTIKPVTYKLDGVVCTEIDPKLDNYYKKDNSYFTEQPIDLVPNQPYPNASFDNFKFVCDNIKFADDLNQLTGYKKPASRELKVTFFPDLNGDVVAIDYKHYTPSFKKGAKLLHKPIVWHVNNATNKATYKPNTWCIRCLWSTKPVETSNSFDVLKSEDAQGMDNLACEDLKPVSEEVVENPTIQKDVLECNVKTTEVVGDIILKPANNSLKITEEVGHTDLMAAYVDNSSLTIKKPNELSRVLGLKTLATHGLAAVNSVPWDTIANYAKPFLNKVVSTTTNIVTRCLNRVCTNYMPYFFTLLLQLCTFTRSTNSRIKASMPTTIAKNTVKSVGKFCLEASFNYLKSPNFSKLINIIIWFLLLSVCLGSLIYSTAALGVLMSNLGMPSYCTGYREGYLNSTNVTIATYCTGSIPCSVCLSGLDSLDTYPSLETIQITISSFKWDLTAFGLVAEWFLAYILFTRFFYVLGLAAIMQLFFSYFAVHFISNSWLMWLIINLVQMAPISAMVRMYIFFASFYYVWKSYVHVVDGCNSSTCMMCYKRNRATRVECTTIVNGVRRSFYVYANGGKGFCKLHNWNCVNCDTFCAGSTFISDEVARDLSLQFKRPINPTDQSSYIVDSVTVKNGSIHLYFDKAGQKTYERHSLSHFVNLDNLRANNTKGSLPINVIVFDGKSKCEESSAKSASVYYSQLMCQPILLLDQALVSDVGDSAEVAVKMFDAYVNTFSSTFNVPMEKLKTLVATAEAELAKNVSLDNVLSTFISAARQGFVDSDVETKDVVECLKLSHQSDIEVTGDSCNNYMLTYNKVENMTPRDLGACIDCSARHINAQVAKSHNIALIWNVKDFMSLSEQLRKQIRSAAKKNNLPFKLTCATTRQVVNVVTTKIALKGG

SEQ ID NO: 16315 - protein, 1946 aa, Artificial Sequence
  SARS-CoV-2__MT470125.1__non-structural protein 3 (NSP3)
MAPTKVTFGDDTVIEVQGYKSVNITFELDERIDKVLNEKCSAYTVELGTEVNEFACVVADAVIKTLQPVSELLTPLGIDLDEWSMATYYLFDESGEFKLASHMYCSFYPPDEDEEEGDCEEEEFEPSTQYEYGTEDDYQGKPLEFGATSAALQPEEEQEEDWLDDDSQQTVGQQDGSEDNQTTTIQTIVEVQPQLEMELTPVVQTIEVNSFSGYLKLTDNVYIKNADIVEEAKKVKPTVVVNAANVYLKHGGGVAGALNKATNNAMQVESDDYIATNGPLKVGGSCVLSGHNLAKHCLHVVGPNVNKGEDIQLLKSAYENFNQHEVLLAPLLSAGIFGADPIHSLRVCVDTVRTNVYLAVFDKNLYDKLVSSFLEMKSEKQVEQKIAEIPKEEVKPFITESKPSVEQRKQDDKKIKACVEEVTTTLEETKFLTENLLLYIDINGNLHPDSATLVSDIDITFLKKDAPYIVGDVVQEGVLTAVVIPTKKAGGTTEMLAKALRKVPTDNYITTYPGQGLNGYTVEEAKTVLKKCKSAFYILPSIISNEKQEILGTVSWNLREMLAHAEETRKLMPVCVETKAIVSTIQRKYKGIKIQEGVVDYGARFYFYTSKTTVASLINTLNDLNETLVTMPLGYVTHGLNLEEAARYMRSLKVPATVSVSSPDAVTAYNGYLTSSSKTPEEHFIETISLAGSYKDWSYSGQSTQLGIEFLKRGDKSVYYTSNPTTFHLDGEVITFDNLKTLLSLREVRTIKVFTTVDNINLHTQVVDMSMTYGQQFGPTYLDGADVTKIKPHNSHEGKTFYVLPNDDTLRVEAFEYYHTTDPSFLGRYMSALNHTKKWKYPQVNGLTSIKWADNNCYLATALLTLQQIELKFNPPALQDAYYRARAGEAANFCALILAYCNKTVGELGDVRETMSYLFQHANLDSCKRVLNVVCKTCGQQQTTLKGVEAVMYMGTLSYEQFKKGVQIPCTCGKQATKYLVQQESPFVMMSAPPAQYELKHGTFTCASEYTGNYQCGHYKHITSKETLYCIDGALLTKSSEYKGPITDVFYKENSYTTTIKPVTYKLDGVVCTEIDPKLDNYYKKDNSYFTEQPIDLVPNQPYPNASFDNFKFVCDNIKFADDLNQLTGYKKPASRELKVTFFPDLNGDVVAIDYKHYTPSFKKGAKLLHKPIVWHVNNATNKATYKPNTWCIRCLWSTKPVETSNSFDVLKSEDAQGMDNLACEDLKPVSEEVVENPTIQKDVLECNVKTTEVVGDIILKPANNSLKITEEVGHTDLMAAYVDNSSLTIKKPNELSRVLGLKTLATHGLAAVNSVPWDTIANYAKPFLNKVVSTTTNIVTRCLNRVCTNYMPYFFTLLLQLCTFTRSTNSRIKASMPTTIAKNTVKSVGKFCLEASFNYLKSPNFSKLINIIIWFLLLSVCLGSLIYSTAALGVLMSNLGMPSYCTGYREGYLNSTNVTIATYCTGSIPCSVCLSGLDSLDTYPSLETIQITISSFKWDLTAFGLVAEWFLAYILFTRFFYVLGLAAIMQLFFSYFAVHFISNSWLMWLIINLVQMAPISAMVRMYIFFASFYYVWKSYVHVVDGCNSSTCMMCYKRNRATRVECTTIVNGVRRSFYVYANGGKGFCKLHNWNCVNCDTFCAGSTFISDEVARDLSLQFKRPINPTDQSSYIVDSVTVKNGSIHLYFDKAGQKTYERHSLSHFVNLDNLRANNTKGSLPINVIVFDGKSKCEESSAKSASVYYSQLMCQPILLLDQALVSDAGDSAEVAVKMFDAYVNTFSSTFNVPMEKLKTLVATAEAELAKNVSLDNVLSTFISAARQGFVDSDVETKDVVECLKLSHQSDIEVTGDSCNNYMLTYNKVENMTPRDLGACIDCSARHINAQVAKSHNIALIWNVKDFMSLSEQLRKQIRSAAKKNNLPFKLTCATTRQVVNVVTTKIALKGG

SEQ ID NO: 16316 - protein, 1946 aa, Artificial Sequence
  SARS-CoV-2__MT470127.1__non-structural protein 3 (NSP3)
MAPTKVTFGDDTVIEVQGYKSVNITFELDERIDKVLNEKCSAYTVELGTEVNEFACVVADAVIKTLQPVSELLTPLGIDLDEWSMATYYLFDESGEFKLASHMYCSFYPPDEDEEEGDCEEEEFEPSTQYEYGTEDDYQGKPLEFGATSAALQPEEEQEEDWLDDDSQQTVGQQDGSEDNQTTTIQTIVEVQPQLEMELTPVVQTIEVNSFSGYLKLTDNVYIKNADIVEEAKKVKPTVVVNAANVYLKHGGGVAGALNKATNNAMQVESDDYIATNGPLKVGGSCVLSGHNLAKHCLHVVGPNVNKGEDIQLLKSAYENFNQHEVLLAPLLSAGIFGADPIHSLRVCVDTVRTNVYLAVFDKNLYDKLVSSFLEMKSEKQVEQKIAEIPKEEVKPFITESKPSVEQRKQDDKKIKACVEEVTTTLEETKFLTENLLLYIDINGNLHPDSATLVSDIDITFLKKDAPYIVGDVVQEGVLTAVVIPTKKAGGTTEMLAKALRKVPTDNYITTYPGQGLNGYTVEEAKTVLKKCKSAFYILPSIISNEKQEILGTVSWNLREMLAHAEETRKLMPVCVETKAIVSTIQRKYKGIKIQEGVVDYGARFYFYTSKTTVASLINTLNDLNETLVTMPLGYVTHGLNLEEAARYMRSLKVPATVSVSSPDAVTAYNGYLTSSSKTPEEHFIETISLAGSYKDWSYSGQSTQLGIEFLKRGDKSVYYTSNPTTFHLDGEVITFDNLKTLLSLREVRTIKVFTTVDNINLHTQVVDMSMTYGQQFGPTYLDGADVTKIKPHNSHEGKTFYVLPNDDTLRVEAFEYYHTTDPSFLGRYMSALNHTKKWKYPQVNGLTSIKWADNNCYLATALLTLQQIELKFNPPALQDAYYRARAGEAANFCALILAYCNKTVGELGDVRETMSYLFQHANLDSCKRVLNVVCKTCGQQQTTLKGVEAVMYMGTLSYEQFKKGVQIPCTCGKQATKYLVQQESPFVMMSAPPAQYELKHGTFTCASEYTGNYQCGHYKHITSKETLYCIDGALLTKSSEYKGPITDVFYKENSYTTTIKPVTYKLDGVVCTEIDPKLDNYYKKDNSYFTEQPIDLVPKQPYPNASFDNFKFVCDNIKFADDLNQLTGYKKPASRELKVTFFPDLNGDVVAIDYKHYTPSFKKGAKLLHKPIVWHVNNATNKATYKPNTWCIRCLWSTKPVETSNSFDVLKSEDAQGMDNLACEDLKPVSEEVVENPTIQKDVLECNVKTTEVVGDIILKPANNSLKITEEVGHTDLMAAYVDNSSLTIKKPNELSRVLGLKTLATHGLAAVNSVPWDTIANYAKPFLNKVVSTTTNIVTRCLNRVCTNYMPYFFTLLLQLCTFTRSTNSRIKASMPTTIAKNTVKSVGKFCLEASFNYLKSPNFSKLINIIIWFLLLSVCLGSLIYSTAALGVLMSNLGMPSYCTGYREGYLNSTNVTIATYCTGSIPCSVCLSGLDSLDTYPSLETIQITISSFKWDLTAFGLVAEWFLAYILFTRFFYVLGLAAIMQLFFSYFAVHFISNSWLMWLIINLVQMAPISAMVRMYIFFASFYYVWKSYVHVVDGCNSSTCMMCYKRNRATRVECTTIVNGVRRSFYVYANGGKGFCKLHNWNCVNCDTFCAGSTFISDEVARDLSLQFKRPINPTDQSSYIVDSVTVKNGSIHLYFDKAGQKTYERHSLSHFVNLDNLRANNTKGSLPINVIVFDGKSKCEESSAKSASVYYSQLMCQPILLLDQALVSDVGDSAEVAVKMFDAYVNTFSSTFNVPMEKLKTLVATAEAELAKNVSLDNVLSTFISAARQGFVDSDVETKDVVECLKLSHQSDIEVTGDSCNNYMLTYNKVENMTPRDLGACIDCSARHINAQVAKSHNIALIWNVKDFMSLSEQLRKQIRSAAKKNNLPFKLTCATTRQVVNVVTTKIALKGG

SEQ ID NO: 16317 - protein, 1946 aa, Artificial Sequence
  SARS-CoV-2__MT470134.1__non-structural protein 3 (NSP3)
MAPTKVTFGDDTVIEVQGYKSVNITFELDERIDKVLNEKCSAYTVELGTEVNEFACVVADAVIKTLQPVSELLTPLGIDLDEWSMATYYLFDESGEFKLASHMYCSFYPPDEDEEEGDCEEEEFEPSTQYEYGTEDDYQGKPLEFGATSAALQPEEEQEEDWLDDDSQQTVGQQDGSEDNQTTTIQTIVEVQPQLEMELTPVVQTIEVNSFSGYLKLTDNVYIKNADIVEEAKKVKPTVVVNAANVYLKHGGGVAGALNKATNNAMQVESDDYIATNGPLKVGGSCVLSGHNLAKHCLHVVGPNVNKGEDIQLLKSAYENFNQHEVLLAPLLSAGIFGADPIHSLRVCVDTVRTNVYLAVFDKNLYDKLVSSFLEMKSEKQVEQKIAEIPKEEVKPFITESKPSVEQRKQDDKKIKACVEEVTTTLEETKFLTENLLLYIDINGNLHPDSATLVSDIDITFLKKDAPYIVGDVVQEGVLTAVVIPTKKAGGTTEMLAKALRKVPTDNYITTYPGQGLNGYTVEEAKTVLKKCKSAFYILPSIISNEKQEILGTVSWNLREMLAHAEETRKLMPVCVETKAIVSTIQRKYKGIKIQEGVVDYGARFYFYTSKTTVASLINTLNDLNETLVTMPLGYVTHGLNLEEAARYMRSLKVPATVSVSSPDAVTAYNGYLTSSSKTPEEHFIETISLAGSYKDWSYSGQSTQLGIEFLKRGDKSVYYTSNPTTFHLDGEVITFDNLKTLLSLREVRTIKVFTTVDNINLHTQVVDMSMTYGQQFGPTYLDGADVTKIKPHNSHEGKTFYVLPNDDTLRVEAFEYYHTTDPSFLGRYMSALNHTKKWKYPQVNGLTSIKWADNNCYLATALLTLQQIELKFNPPALQDAYYRARAGEAANFCALILAYCNKTVGELGDVRETMSYLFQHANLDSCKRVLNVVCKTCGQQQTTLKGVEAVMYMGTLSYEQFKKGVQIPCTCGKQATKYLVQQESPFVMMSAPPAQYELKHGTFTCASEYTGNYQCGHYKHITSKETLYCIDGALLTKSSEYKGPITDVFYKENSYTTTIKPVTYKLDGVVCTEIDPKLDNYYKKDNSYFTEQPIDLVPNQPYPNASFDNFKFVCDNIKFADDLNQLTGYKKPASRELKVTFFPDLNGDVVAIDYKHYTPSFKKGAKLLHKPIVWHVNNATNKATYKPNTWCIRCLWSTKPVETSNSFDVLKSEDAQGMDNLACEDLKPVSEEVVENPTIQKDVLECNVKTTEVVGDIILKPANNSLKITEEVGHTDLMAAYVDNSSLTIKKPNELSRVLGLKTLATHGLAAVNSVPWDTIANYAKPFLNKVVSTTTNIVTRCLNRVCTNYMPYFFTLLLQLCTFTRSTNSRIKASMPTTIAKNTVKSVGKFCLEASFNYLKSPNFSKLINIIIWFLLLIVCLGSLIYSTAALGVLMSNLGMPSYCTGYREGYLNSTNVTIATYCTGSIPCSVCLSGLDSLDTYPSLETIQITISSFKWDLTAFGLVAEWFLAYILFTRFFYVLGLAAIMQLFFSYFAVHFISNSWLMWLIINLVQMAPISAMVRMYIFFASFYYVWKSYVHVVDGCNSSTCMMCYKRNRATRVECTTIVNGVRRSFYVYANGGKGFCKLHNWNCVNCDTFCAGSTFISDEVARDLSLQFKRPINPTDQSSYIVDSVTVKNGSIHLYFDKAGQKTYERHSLSHFVNLDNLRANNTKGSLPINVIVFDGKSKCEESSAKSASVYYSQLMCQPILLLDQALVSDVGDSAEVAVKMFDAYVNTFSSTFNVPMEKLKTLVATAEAELAKNVSLDNVLSTFISAARQGFVDSDVETKDVVECLKLSHQSDIEVTGDSCNNYMLTYNKVENMTPRDLGACIDCSARHINAQVAKSHNIALIWNVKDFMSLSEQLRKQIRSAAKKNNLPFKLTCATTRQVVNVVTTKIALKGG

SEQ ID NO: 16318 - protein, 1946 aa, Artificial Sequence
  SARS-CoV-2__MT459840.1__non-structural protein 3 (NSP3)
MAPTKVTFGDDTVIEVQGYKSVNITFELDERIDKVLNEKCSAYTVELGTEVNEFACVVADAVIKTLQPVSELLTPLGIDLDEWSMATYYLFDESGEFKLASHMYCSFYPPDEDEEEGDCEEEEFEPSTQYEYGTEDDYQGKPLEFGATSAALQPEEEQEEDWLDDDSQQTVGQQDGSEDNQTTTIQTIVEVQPQLEMELTPVVQTIEVNSFSGYLKLTDNVYIKNADIVEEAKKVKPTVVVNAANVYLKHGGGVAGALNKATNNAMQVESDDYIATNGPLKVGGSCVLSGHNLAKHCLHVVGPNVNKGEDIQLLKSAYENFNQHEVLLAPLLSAGIFGADPIHSLRVCVDTVRTNVYLAVFDKNLYDKLVSSFLEMKSEKQVEQKIAEIPKEEVKPFITESKPSVEQRKQDDKKIKACVEEVTTTLEETKFLTENLLLYIDINGNLHPDSATLVSDIDITFLKKDAPYIVGDVVQEGVLTAVVIPTKKAGGTTEMLAKALRKVPTDNYITTYPGQGLNGYTVEEAKTVLKKCKSAFYILPSIISNEKQEILGTVSWNLREMLAHAEETRKLMPVCVETKAIVSTIQRKYKGIKIQEGVVDYGARFYFYTSKTTVASLINTLNDLNETLVTMPLGYVTHGLNLEEAARYMRSLKVPATVSVSSPDAVTAYNGYLTSSSKTPEEHFIETISLAGSYKDWSYSGQSTQLGIEFLKRGDKSVYYTSNPTTFHLDGEVITFDNLKTLLSLREVRTIKVFTTVDNINLHTQVVDMSMTYGQQFGPTYLDGADVTKIKPHNSHEGKTFYVLPNDDTLRVEAFEYYHTTDPSFLGRYMSALNHTKNWKYPQVNGLTSIKWADNNCYLATALLTLQQIELKFNPPALQDAYYRARAGEAANFCALILAYCNKTVGELGDVRETMSYLFQHANLDSCKRVLNVVCKTCGQQQTTLKGVEAVMYMGTLSYEQFKKGVQIPCTCGKQATKYLVQQESPFVMMSAPPAQYELKHGTFTCASEYTGNYQCGHYKHITSKETLYCIDGALLTKSSEYKGPITDVFYKENSYTTTIKPVTYKLDGVVCTEIDPKLDNYYKKDNSYFTEQPIDLVPNQPYPNASFDNFKFVCDNIKFADDLNQLTGYKKPASRELKVTFFPDLNGDVVAIDYKHYTPSFKKGAKLLHKPIVWHVNNATNKATYKPNTWCIRCLWSTKPVETSNSFDVLKSEDAQGMDNLACEDLKPVSEEVVENPTIQKDVLECNVKTTEVVGDIILKPANNSLKITEEVGHTDLMAAYVDNSSLTIKKPNELSRVLGLKTLATHGLAAVNSVPWDTIANYAKPFLNKVVSTTTNIVTRCLNRVCTNYMPYFFTLLLQLCTFTRSTNSRIKASMPTTIAKNTVKSVGKFCLEASFNYLKSPNFSKLINIIIWFLLLSVCLGSLIYSTAALGVLMSNLGMPSYCTGYREGYLNSTNVTIATYCTGSIPCSVCLSGLDSLDTYPSLETIQITISSFKWDLTAFGLVAEWFLAYILFTRFFYVLGLAAIMQLFFSYFAVHFISNSWLMWLIINLVQMAPISAMVRMYIFFASFYYVWKSYVHVVDGCNSSTCMMCYKRNRATRVECTTIVNGVRRSFYVYANGGKGFCKLHNWNCVNCDTFCAGSTFISDEVARDLSLQFKRPINPTDQSSYIVDSVTVKNGSIHLYFDKAGQKTYERHSLSHFVNLDNLRANNTKGSLPINVIVFDGKSKCEESSAKSASVYYSQLMCQPILLLDQALVSDVGDSAEVAVKMFDAYVNTFSSTFNVPMEKLKTLVATAEAELAKNVSLDNVLSTFISAARQGFVDSDVETKDVVECLKLSHQSDIEVTGDSCNNYMLTYNKVENMTPRDLGACIDCSARHINAQVAKSHNIALIWNVKDFMSLSEQLRKQIRSAAKKNNLPFKLTCATTRQVVNVVTTKIALKGG

SEQ ID NO: 16319 - protein, 1946 aa, Artificial Sequence
  SARS-CoV-2__MT459849.1__non-structural protein 3 (NSP3)
MAPTKVTFGDDTVIEVQGYKSVNITFELDERIDKVLNEKCSAYTVELGTEVNEFACVVADAVIKTLQPVSELLTPLGIDLDEWSMATYYLFDESGEFKLASHMYCSFYPPDEDEEEGDCEEEEFEPSTQYEYGTEDDYQGKPLEFGATSAALQPEEEQEEDWLDDDSQQTVGQQDGSEDNQTTTIQTIVEVQPQLEMELTPVVQTIEVNSFSGYLKLTDNVYIKNADIVEEAKKVKPTVVVNAANVYLKHGGGVAGALNKATNNAMQVESDDYIATNGPLKVGGSCVLSGHNLAKHCLHVVGPNVNKGEDIQLLKSAYENFNQHEVLLAPLLSAGIFGADPIHSLRVCVDTVRTNVYLAVFDKNLYDKLVSSFLEMKSEKQVEQKIAEIPKEEVKPFITESKPSVEQRKQDDKKIKACVEEVTTTLEETKFLTENLLLYIDINGNLHPDSATLVSDIDITFLKKDAPYIVGDVVQEGVLTAVVIPTKKAGGTTEMLAKALRKVPTDNYITTYPGQGLNGYTVEEAKTVLKKCKSAFYILPSIISNEKQEILGTVSWNLREMLAHAEETRKLMPVCVETKAIVSTIQRKYKGIKIQEGVVDYGARFYFYTSKTTVASLINTLNDLNETLVTMPLGYVTHGLNLEEAARYMRSLKVPATVSVSSPDAVTAYNGYLTSSSKTPEEHFIETISLAGSYKDWSYSGQSTQLGIEFLKRGDKSVYYTSNPTTFHLDGEVITFDNLKTLLSLREVRTIKVFTTVDNINLHTQVVDMSMTYGQQFGPTYLDGADVTKIKPHNSHEGKTFYVLPNDDTLRVEAFEYYHTTDPSFLGRYMSALNHTKKWKYPQVNGLTSIKWADNNCYLATALLTLQQIELKFNPPALQDAYYRARAGEAANFCALILAYCNKTVGELGDVRETMSYLFQHANLDSCKRVLNVVCKTCGQQQTTLKGVEAVMYMGTLSYEQFKKGVQIPCTCGKQATKYLVQQESPFVMMSAPPAQYELKHGTFTCASEYTGNYQCGHYKHITSKETLYCIDGALLTKSSEYKGPITDVFYKENSYTTTIKPVTYKLDGVVCTEIDPKLDNYYKKDNSYFTEQPIDLVPNQPYPNASFDNFKFVCDNIKFADDLNQLTGYKKPASRELKVTFFPDLNGDVVAIDYKHYTPSFKKGAKLLHKPIVWHVNNATNKATYKPNTWCIRCLWSRKPVETSNSFDVLKSEDAQGMDNLACEDLKPVSEEVVENPTIQKDVLECNVKTTEVVGDIILKPANNSLKITEEVGHTDLMAAYVDNSSLTIKKPNELSRVLGLKTLATHGLAAVNSVPWDTIANYAKPFLNKVVSTTTNIVTRCLNRVCTNYMPYFFTLLLQLCTFTRSTNSRIKASMPTTIAKNTVKSVGKFCLEASFNYLKSPNFSKLINIIIWFLLLSVCLGSLIYSTAALGVLMSNLGMPSYCTGYREGYLNSTNVTIATYCTGSIPCSVCLSGLDSLDTYPSLETIQITISSFKWDLTAFGLVAEWFLAYILFTRFFYVLGLAAIMQLFFSYFAVHFISNSWLMWLIINLVQMAPISAMVRMYIFFASFYYVWKSYVHVVDGCNSSTCMMCYKRNRATRVECTTIVNGVRRSFYVYANGGKGFCKLHNWNCVNCDTFCAGSTFISDEVARDLSLQFKRPINPTDQSSYIVDSVTVKNGSIHLYFDKAGQKTYERHSLSHFVNLDNLRANNTKGSLPINVIVFDGKSKCEESSAKSASVYYSQLMCQPILLLDQALVSDVGDSAEVAVKMFDAYVNTFSSTFNVPMEKLKTLVATAEAELAKNVSLDNVLSTFISAARQGFVDSDVETKDVVECLKLSHQSDIEVTGDSCNNYMLTYNKVENMTPRDLGACIDCSARHINAQVAKSHNIALIWNVKDFMSLSEQLRKQIRSAAKKNNLPFKLTCATTRQVVNVVTTKIALKGG

SEQ ID NO: 16320 - protein, 1946 aa, Artificial Sequence
  SARS-CoV-2__MT459923.1__non-structural protein 3 (NSP3)
MAPTKVTFGDDTVIEVQGYKSVNITFELDERIDKVLNEKCSAYTVELGTEVNEFACVVADAVIKTLQPVSELLTPLGIDLDEWSMATYYLFDESGEFKLASHMYCSFYPPDEDEEEGDCEEEEFEPSTQYEYGTEDDYQGKPLEFGATSAALQPEEEQEEDWLDDDSQQTVGQQDGSEDNQTTTIQTIVEVQPQLEMELTPVVQTIEVNSFSGYLKLTDNVYIKNADIVEEAKKVKPTVVVNAANVYLKHGGGVAGALNKATNNAMQVESDDYIATNGPLKVGGSCVLSGHNLAKHCLHVVGPNVNKGEDIQLLKSAYENFNQHEVLLAPLLSAGIFGADPIHSLRVCVDTVRTNVYLAVFDKNLYDKLVSSFLEMKSEKQVEQKIAEIPKEEVKPFITESKPSVEQRKQDDKKIKACVEEVTTTLEETKFLTENLLLYIDINGNLHPDSATLVSDIDITFLKKDAPYIVGDVVQEGVLTAVVIPTKKAGGTTEMLAKALRKVPTDNYITTYPGQGLNGYTVEEAKTVLKKCKSAFYILPSIISNEKQEILGTVSWNLREMLAHAEETRKLMPVCVETKAIVSTIQRKYKGIKIQEGVVDYGARFYFYTSKTTVASLINTLNDLNETLVTMPLGYVTHGLNLEEAARYMRSLKVPATVSVSSPDAVTAYNGYLTSSSKTPEEHFIETISLAGSYKDWSYSGQSTQLGIEFLKRGDKSVYYTSNPTTFHLDGEVITFDNLKTLLSLREVRTIKVFTTVDNINLHTQVVDMSMTYGQQFGPTYLDGADVTKIKPHNSHEGKTFYVLPNDDTLRVEAFEYYHTTDPSFLGRYMSALNHTKKWKYPQVNGLTSIKWADNNCYLATALLTLQQIELKFNPPALQDAYYRARAGEAANFCALILAYCNKTVGELGDVRETMSYLFQHANLDSCKRVLNVVCKTCGQQQTTLKGVEAVMYMGTLSYEQFKKGVQIPCTCGKQATKYLVQQESPFVMMSAPPAQYELKHGTFTCASEYTGNYQCGHYKHITSKETLYCIDGALLTKSSGYKGPITDVFYKENSYTTTIKPVTYKLDGVVCTEIDPKLDNYYKKDNSYFTEQPIDLVPNQPYPNASFDNFKFVCDNIKFADDLNQLTGYKKPASRELKVTFFPDLNGDVVAIDYKHYTPSFKKGAKLLHKPIVWHVNNATNKATYKPNTWCIRCLWSTKPVETSNSFDVLKSEDAQGMDNLACEDLKPVSEEVVENPTIQKDVLECNVKTTEVVGDIILKPANNSLKITEEVGHTDLMAAYVDNSSLTIKKPNELSRVLGLKTLATHGLAAVNSVPWDTIANYAKPFLNKVVSTTTNIVTRCLNRVCTNYMPYFFTLLLQLCTFTRSTNSRIKASMPTTIAKNTVKSVGKFCLEASFNYLKSPNFSKLINIIIWFLLLSVCLGSLIYSTAALGVLMSNLGMPSYCTGYREGYLNSTNVTIATYCTGSIPCSVCLSGLDSLDTYPSLETIQITISSFKWDLTAFGLVAEWFLAYILFTRFFYVLGLAAIMQLFFSYFAVHFISNSWLMWLIINLVQMAPISAMVRMYIFFASFYYVWKSYVHVVDGCNSSTCMMCYKRNRATRVECTTIVNGVRRSFYVYANGGKGFCKLHNWNCVNCDTFCAGSTFISDEVARDLSLQFKRPINPTDQSSYIVDSVTVKNGSIHLYFDKAGQKTYERHSLSHFVNLDNLRANNTKGSLPINVIVFDGKSKCEESSAKSASVYYSQLMCQPILLLDQALVSDVGDSAEVAVKMFDAYVNTFSSTFNVPMEKLKTLVATAGAELAKNVSLDNVLSTFISAARQGFVDSDVETKDVVECLKLSHQSDIEVTGDSCNNYMLTYNKVENMTPRDLGACIDCSARHINAQVAKSHNIALIWNVKDFMSLSEQLRKQIRSAAKKNNLPFKLTCATTRQVVNVVTTKIALKGG

SEQ ID NO: 16321 - protein, 1946 aa, Artificial Sequence
  SARS-CoV-2__MT461613.1__non-structural protein 3 (NSP3)
MAPTKVTFGDDTVIEVQGYKSVNITFELDERIDKVLNEKCSAYTVELGTEVNEFACVVADAVIKTLQPVSELLTPLGIDLDEWSMATYYLFDESGEFKLASHMYCSFYPPDEDEEEGDCEEEEFEPSTQYEYGTEDDYQGKPLEFGATSAALQPEEEQEEDWLDDDSQQTVGQQDGSEDNQTTTIQTIVEVQPQLEMELTPVVQTIEVNSFSGYLKLTDNVYIKNADIVEEAKKVKPTVVVNAANVYLKHGGGVAGALNKATNNAMQVESDDYIATNGPLRVGGSCVLSGHNLAKHCLHVVGPNVNKGEDIQLLKSAYENFNQHEVLLAPLLSAGIFGADPIHSLRVCVDTVRTNVYLAVFDKNLYDKLVSSFLEMKSEKQVEQKIAEIPKEEVKPFITESKPSVEQRKQDDKKIKACVEEVTTTLEETKFLTENLLLYIDINGNLHPDSATLVSDIDITFLKKDAPYIVGDVVQEGVLTAVVIPTKKAGGTTEMLAKALRKVPTDNYITTYPGQGLNGYTVEEAKTVLKKCKSAFYILPSIISNEKQEILGTVSWNLREMLAHAEETRKLMPVCVETKAIVSTIQRKYKGIKIQEGVVDYGARFYFYTSKTTVASLINTLNDLNETLVTMPLGYVTHGLNLEEAARYMRSLKVPATVSVSSPDAVTAYNGYLTSSSKTPEEHFIETISLAGSYKDWSYSGQSTQLGIEFLKRGDKSVYYTSNPTTFHLDGEVITFDNLKTLLSLREVRTIKVFTTVDNINLHTQVVDMSMTYGQQFGPTYLDGADVTKIKPHNSHEGKTFYVLPNDDTLRVEAFEYYHTTDPSFLGRYMSALNHTKKWKYPQVNGLTSIKWADNNCYLATALLTLQQIELKFNPPALQDAYYRARAGEAANFCALILAYCNKTVGELGDVRETMSYLFQHANLDSCKRVLNVVCKTCGQQQTTLKGVEAVMYMGTLSYEQFKKGVQIPCTCGKQATKYLVQQESPFVMMSAPPAQYELKHGTFTCASEYTGNYQCGHYKHITSKETLYCIDGALLTKSSEYKGPITDVFYKENSYTTTIKPVTYKLDGVVCTEIDPKLDNYYKKDNSYFTEQPIDLVPNQPYPNASFDNFKFVCDNIKFADDLNQLTGYKKPASRELKVTFFPDLNGDVVAIDYKHYTPSFKKGAKLLHKPIVWHVNNATNKATYKPNTWCIRCLWSTKPVETSNSFDVLKSEDAQGMDNLACEDLKPVSEEVVENPTIQKDVLECNVKTTEVVGDIILKPANNSLKITEEVGHTDLMAAYVDNSSLTIKKPNELSRVLGLKTLATHGLAAVNSVPWDTIANYARPFLNKVVSTTTNIVTRCLNRVCTNYMPYFFTLLLQLCTFTRSTNSRIKASMPTTIAKNTVKSVGKFCLEASFNYLKSPNFSKLINIIIWFLLLSVCLGSLIYSTAALGVLMSNLGMPSYCTGYREGYLNSTNVTIATYCTGSIPCSVCLSGLDSLDTYPSLETIQITISSFKWDLTAFGLVAEWFLAYILFTRFFYVLGLAAIMQLFFSYFAVHFISNSWLMWLIINLVQMAPISAMVRMYIFFASFYYVWKSYVHVVDGCNSSTCMMCYKRNRATRVECTTIVNGVRRSFYVYANGGKGFCKLHNWNCVNCDTFCAGSTFISDEVARDLSLQFKRPINPTDQSSYIVDSVTVKNGSIHLYFDKAGQKTYERHSLSHFVNLDNLRANNTKGSLPINVIVFDGKSKCEESSAKSASVYYSQLMCQPILLLDQALVSDVGDSAEVAVKMFDAYVNTFSSTFNVPMEKLKTLVATAEAELAKNVSLDNVLSTFISAARQGFVDSDVETKDVVECLKLSHQSDIEVTGDSCNNYMLTYNKVENMTPRDLGACIDCSARHINAQVAKSHNIALIWNVKDFMSLSEQLRKQIRSAAKKNNLPFKLTCATTRQVVNVVTTKIALKGG

SEQ ID NO: 16322 - protein, 1946 aa, Artificial Sequence
  SARS-CoV-2__MT461614.1__non-structural protein 3 (NSP3)
MAPTKVTFGDDTVIEVQGYKSVNITFELDERIDKVLNEKCSAYTVELGTEVNEFACVVADAVIKTLQPVSELLTPLGIDLDEWSMATYYLFDESGEFKLASHMYCSFYPPDEDEEEGDCEEEEFEPSTQYEYGTEDDYQGKPLEFGATSAALQPEEEQEEDWLDDDSQQTVGQQDGSEDNQTTTIQTIVEVQPQLEMELTPVVQTIEVNSFSGYLKLTDNVYIKNADIVEEAKKVKPTVVVNAANVYLKHGGGVAGALNKATNNAMQVESDDYIATNGPLKVGGSCVLSGHNLAKHCLHVVGPNVNKGEDIQLLKSAYENFNQHEVLLAPLLSAGIFGADPIHSLRVCVDTVRTNVYLAVFDKNLYDKLVSSFLEMKSEKQVEQKIAEIPKEEVKPFITESKPSVEQRKQDDKKIKACVEEVTTTLEETKFLTENLLLYIDINGNLHPDSATLVSDIDITFLKKDAPYIVGDVVQEGVLTAVVIPTKKAGGTTEMLAKALRKVPTDNYITTYPGQGLNGYTVEEAKTVLKKCKSAFYILPSIISNEKQEILGTVSWNLREMLAHAEETRKLMPVCVETKAIVSTIQRKYKGIKIQEGVVDYGARFYFYTSKTTVASLINTLNDLNETLVTMPLGYVTHGLNLEEAARYMRSLKVPATVSVSSPDAVTAYNGYLTSSSKTPEEHFIETISLAGSYKDWSYSGQSTQLGIEFLKRGDKSVYYTSNPTTFHLDGEVITFDNLKTLLSLREVRTIKVFTTVDNINLHTQVVDMSMTYGQQFGPTYLDGADVTKIKPHNSHEGKTFYVLPNDDTLRVEAFEYYHTTDPSFLGRYMSALNHTKKWKYPQVNGLTSIKWADNNCYLATALLTLQQIELKFNPPALQDAYYRARAGEAANFCALILAYCNKTVGELGDVRETMSYLFQHANLDSCKRVLNVVCKTCGQQQTTLKGVEAVMYMGTLSYEQFKKGVQIPCTCGKQATKYLVQQESPFVMMSAPPAQYELKHGTFTCASEYTGNYQCGHYKHITSKETLYCIDGALLTKSSEYKGPITDVFYKENSYTTTIKPVTYKLDGVVCTEIDPKLDNYYKKDNSYFTEQPIDLVPNQPYPNASFDNFKFVCDNIKFADDLNQLTGYKKPASRELKVTFFPDLNGDVVAIDYKHYTPSFKKGAKLLHKPIVWHVNNATNKATYKPNTWCIRCLWSTKPVETSNSFDVLKSEDAQGMDNLACEDLKPVSEEVVENPTIQKDVLECNVKTTEVVGDIILKPANNSLKITEEVGHTDLMAAYVDNSSLTIKKPNELSRVLGLKTLATHGLAAVNSVPWDTIANYAKPFLNKVVSTTTNIVTRCLNRVCTNYMPYFFTLLLQLCTFTRSTNSRIKASMPTTIAKNTVKSVGKFCLEASFNYLKSPNFSKLINIIIWFLLLSVCLGSLIYSTAALGVLMSNLGMPSYCTGYREGYLNSTNVTIATYCTGSIPCSVCLSGLDSLDTYPSLETIQITISSFKWDLTAFGLVAEWFLAYILFTRFFYVLGLAAIMQLFFSYFAVHFISNSWLMWLIINLVQMAPISAMVRMYIFFASFYYVWKSYVHVVDGCNSSTCMMCYKRNRATRVECTTIVNGVRRSFYVYANGGKGFCKLHNWNCVNCDTFCAGSTFISDEVARDLSLQFKRPINPTDQSYYIVDSVTVKNGSIHLYFDKAGQKTYERHSLSHFVNLDNLRANNTKGSLPINVIVFDGKSKCEESSAKSASVYYSQLMCQPILLLDQALVSDVGDSAEVAVKMFDAYVNTFSSTFNVPMEKLKTLVATAEAELAKNVSLDNVLSTFISAARQGFVDSDVETKDVVECLKLSHQSDIEVTGDSCNNYMLTYNKVENMTPRDLGACIDCSARHINAQVAKSHNIALIWNVKDFMSLSEQLRKQIRSAAKKNNLPFKLTCATTRQVVNVVTTKIALKGG

SEQ ID NO: 16323 - protein, 1946 aa, Artificial Sequence
  SARS-CoV-2__MT461625.1__non-structural protein 3 (NSP3)
MAPTKVTFGDDTVIEVQGYKSVNITFELDERIDKVLNEKCSAYTVELGTEVNEFACVVADAVIKTLQPVSELLTPLGIDLDEWSMATYYLFDESGEFKLASHMYCSFYPPDEDEEEGDCEEEEFEPSTQYEYGTEDDYQGKPLEFGATSAALQPEEEQEEDWLDDDSQQTVGQQDGSEDNQTTTIQTIVEVQPQLEMELTPVVQTIEVNSFSGYLKLTDNVYIKNADIVEEAKKVKPTVVVNAANVYLKHGGGVAGALNKATNNAMQVESDDYIATNGPLKVGGSCVLSGHNLAKHCLHVVGPNVNKGEDIQLLKSAYENFNQHEVLLAPLLSAGIFGADPIHSLRVCVDTVRTNVYLAVFDKNLYDKLVSSFLEMKSEKQVEQKIAEIPKEEVKPFITESKPSVEQRKQDDKKIKACVEEVTTTLEETKFLTENLLLYIDINGNLHPDSATLVSDIDITFLKKDAPYIVGDVVQEGVLTAVVIPTKKAGGTTEMLAKALRKVPTDNYITTYPGQGLNGYTVEEAKTVLKKCKSAFYILPSIISNEKQEILGTVSWNLREMLAHAEETRKLMPVCVETKAIVSTIQRKYKGIKIQEGVVDYGARFYFYTSKTTVASLINTLNDLNETLVTMPLGYVTHGLNLEEAARYMRSLKVPATVSVSSPDAVTAYNGYLTSSSKTPEEHFIETISLAGSYKDWSYSGQSTQLGIEFLKRGDKSVYYTSNPTTFHLDGEVITFDNLKTLLSLREVRTIKVFTTVDNINLHTQVVDMSMTYGQQFGPTYLDGADVTKIKPHNSHEGKTFYVLPNDDTLRVEAFEYYHTTDPSFLGRYMSALNHTKKWKYPQVNGLTSIKWADNNCYLATALLTLQQIELKFNPPALQDAYYRARAGEAANFCALILAYCNKTVGELGDVRETMSYLFQHANLDSCKRVLNVVCKTCGQQQTTLKGVEAVMYMGTLSYEQFKKGVQIPCTCGKQATKYLVQQESPFVMMSAPPAQYELKHGTFTCASEYTGNYQCGHYKHITSKETLYCIDGALLTKSSEYKGPITDVFYKENSYTTTIKPVTYKLDGVVCTEIDPKLDNYYKKDNSYFTEQPIDLVPNQPYPNASFDNFKFVCDNIKFADDLNQLTGYKKPASRELKVTFFPDLNGDVVAIDYKHYTLSFKKGAKLLHKPIVWHVNNATNKATYKPNTWCIRCLWSTKPVETSNSFDVLKSEDAQGMDNLACEDLKPVSEEVVENPTIQKDVLECNVKTTEVVGDIILKPANNSLKITEEVGHTDLMAAYVDNSSLTIKKPNELSRVLGLKTLATHGLAAVNSVPWDTIANYAKPFLNKVVSTTTNIVTRCLNRVCTNYMPYFFTLLLQLCTFTRSTNSRIKASMPTTIAKNTVKSVGKFCLEASFNYLKSPNFSKLINIIIWFLLLSVCLGSLIYSTAALGVLMSNLGMPSYCTGYREGYLNSTNVTIATYCTGSIPCSVCLSGLDSLDTYPSLETIQITISSFKWDLTAFGLVAEWFLAYILFTRFFYVLGLAAIMQLFFSYFAVHFISNSWLMWLIINLVQMAPISAMVRMYIFFASFYYVWKSYVHVVDGCNSSTCMMCYKRNRATRVECTTIVNGVRRSFYVYANGGKGFCKLHNWNCVNCDTFCAGSTFISDEVARDLSLQFKRPINPTDQSSYIVDSVTVKNGSIHLYFDKAGQKTYERHSLSHFVNLDNLRANNTKGSLPINVIVFDGKSKCEESSAKSASVYYSQLMCQPILLLDQALVSDVGDSAEVAVKMFDAYVNTFSSTFNVPMEKLKTLVATAEAELAKNVSLDNVLSTFISAARQGFVDSDVETKDVVECLKLSHQSDIEVTGDSCNNYMLTYNKVENMTPRDLGACIDCSARHINAQVAKSHNIALIWNVKDFMSLSEQLRKQIRSAAKKNNLPFKLTCATTRQVVNVVTTKIALKGG

SEQ ID NO: 16324 - protein, 1946 aa, Artificial Sequence
  SARS-CoV-2__MT461636.1__non-structural protein 3 (NSP3)
MAPTKVTFGDDTVIEVQGYKSVNITFELDERIDKVLNEKCSAYTVELGTEVNEFACVVADAVIKTLQPVSELLTPLGIDLDEWSMATYYLFDESGEFKLASHMYCSFYPPDEDEEEGDCEEEEFEPSTQYEYGTEDDYQGKPLEFGATSAALQPEEEQEEDWLDDDSQQTVGQQDGSEDNQTTTIQTIVEVQPQLEMELTPVVQTIEVNSFSGYLKLTDNVYIKNADIVEEAKKVKPTVVVNAANVYLKHGGGVAGALNKATNNAMQVESDDYIATNGPLKVGGSCVLSGHNLAKHCLHVVGPNVNKGEDIQLLKSAYENFNQHEVLLAPLLSAGIFGADPIHSLRVCVDTVRTNVYLAVFDKNLYDKLVSSFLEMKSEKQVEQKIAEIPKEEVKPFITESKPSVEQRKQDDKKIKACVEEVTTTLEETKFLTENLLLYIDINGNLHPDSATLVSDIDITFLKKDAPYIVGDVVQEGVLTAVVIPTKKAGGTTEMLAKALRKVPTDNYITTYPGQGLNGYTVEEAKTVLKKCKSAFYILPSIISNEKQEILGTVSWNLREMLAHAEETRKLMPVCVETKAIVSTIQRKYKGIKIQEGVVDYGARFYFYTSKTTVASLINTLNDLNETLVTMPLGYVTHGLNLEEAARYMRSLKVPATVSVSSPDAVTAYNGYLTSSSKTPEEHFIETISLAGSYKDWSYSGQSTQLGIEFLKRGDKSVYYTSNPTTFHLDGEVITFDNLKTLLSLREVRTIKVFTTVDNINLHTQVVDMSMTYGQQFGPTYLDGADVTKIKPHNSHEGKTFYVLPNDDTLRVEAFEYYHTTDPSFLGRYMSALNHTKKWKYPQVNGLTSIKWADNNCYLATALLTLQQIELKFNPPALQDAYYRARAGEAANFCALILAYCNKTVGELGDVRETMSYLFQHANLDSCKRVLNVVCKTCGQQQTTLKGVEAVMYMGTLSYEQFKKGVQIPCTCGKQATKYLVQQESPFVMMSAPPAQYELKHGTFTCASEYTGNYQCGHYKHITSKETLYCIDGALLTKSSEYKGPITDVFYKENSYTTTIKPVTYKLDGVVCTEIDPKLDNYYKKDNSYFTEQPIDLVPNQPYPNASFDNFKFVCDNIKFADDLNQLTGYKKPASRELKVTFFPDLNGDVVAIDYKHYTPSFKKGAKLLHKPIVWHVNNATNKATYKPNTWCIRCLWSTKPVETSNSFDVLKSEDAQGMDNLACEDLKPVSEEVVENPTIQKDVLECNVKTTEVVGDIILKPANNSLKITEEVGHTDLMAAYVDNSSLTIKKPNELSRVLGLKTLATHGLAAVNSVPWDTIANYAKPFLNKVVSTTTNIVTRCLNRVCTNYMPYFFTLLLQLCTFTRSTNSRIKASMPTTIAKNTVKSVGKFCLEASFNYLKSPNFSKLINIIIWFLLLSVCLGSLIYSTAALGVLMFNLGMPSYCTGYREGYLNSTNVTIATYCTGSIPCSVCLSGLDSLDTYPSLETIQITISSFKWDLTAFGLVAEWFLAYILFTRFFYVLGLAAIMQLFFSYFAVHFISNSWLMWLIINLVQMAPISAMVRMYIFFASFYYVWKSYVHVVDGCNSSTCMMCYKRNRATRVECTTIVNGVRRSFYVYANGGKGFCKLHNWNCVNCDTFCAGSTFISDEVARDLSLQFKRPINPTDQSSYIVDSVTVKNGSIHLYFDKAGQKTYERHSLSHFVNLDNLRANNTKGSLPINVIVFDGKSKCEESSAKSASVYYSQLMCQPILLLDQALVSDVGDSAEVAVKMFDAYVNTFSSTFNVPMEKLKTLVATAEAELAKNVSLDNVLSTFISAARQGFVDSDVETKDVVECLKLSHQSDIEVTGDSCNNYMLTYNKVENMTPRDLGACIDCSARHINAQVAKSHNIALIWNVKDFMSLSEQLRKQIRSAAKKNNLPFKLTCATTRQVVNVVTTKIALKGG

SEQ ID NO: 16325 - protein, 1946 aa, Artificial Sequence
  SARS-CoV-2__MT461641.1__non-structural protein 3 (NSP3)
MAPTKVTFGDDTVIEVQGYKSVNITFELDERIDKVLNEKCSAYTVELGTEVNEFACVVADAVIKTLQPVSELLTPLGIDLDEWSMATYYLFDESGEFKLASHMYCSFYPPDEDEEEGDCEEEEFEPSTQYEYGTEDDYQGKPLEFGATSAALQPEEEQEEDWLDDDSQQTVGQQDGSEDNQTTTIQTIVEVQPQLEMELTPVVQTIEVNSFSGYLKLTDNVYIKNADIVEEAKKVKPTVVVNAANVYLKHGGGVAGALNKATNNAMQVESDDYIATNGPLKVGGSCVLSGHNLAKHCLHVVGPNVNKGEDIQLLKSAYENFNQHEVLLAPLLSAGIFGADPIHSLRVCVDTVRTNVYLAVFDKNLYDKLVSSFLEMKSEKQVEQKIAEIPKEEVKPFITESKPSVEQRKQDDKKIKACVEEVTTTLEETKFLTENLLLYIDINGNLHPDSATLVSDIDITFLKKDAPYIVGDVVQEGVLTVVVIPTKKAGGTTEMLAKALRKVPTDNYITTYPGQGLNGYTVEEAKTVLKKCKSAFYILPSIISNEKQEILGTVSWNLREMLAHAEETRKLMPVCVETKAIVSTIQRKYKGIKIQEGVVDYGARFYFYTSKTTVASLINTLNDLNETLVTMPLGYVTHGLNLEEAARYMRSLKVPATVSVSSPDAVTAYNGYLTSSSKTPEEHFIETISLAGSYKDWSYSGQSTQLGIEFLKRGDKSVYYTSNPTTFHLDGEVITFDNLKTLLSLREVRTIKVFTTVDNINLHTHVVDMSMTYGQQFGPTYLDGADVTKIKPHNSHEGKTFYVLPNDDTLRVEAFEYYHTTDPSFLGRYMSALNHTKKWKYPQVNGLTSIKWADNNCYLATALLTLQQIELKFNPPALQDAYYRARAGEAANFCALILAYCNKTVGELGDVRETMSYLFQHANLDSCKRVLNVVCKTCGQQQTTLKGVEAVMYMGTLSYEQFKKGVQIPCTCGKQATKYLVQQESPFVMMSAPPAQYELKHGTFTCASEYTGNYQCGHYKHITSKETLYCIDGALLTKSSEYKGPITDVFYKENSYTTTIKPVTYKLDGVVCTEIDPKLDNYYKKDNSYFTEQPIDLVPNQPYPNASFDNFKFVCDNIKFADDLNQLTGYKKPASRELKVTFFPDLNGDVVAIDYKHYTPSFKKGAKLLHKPIVWHVNNATNKATYKPNTWCIRCLWSTKPVETSNSFDVLKSEDAQGMDNLACEDLKPVSEEVVENPTIQKDVLECNVKTTEVVGDIILKPANNSLKITEEVGHTDLMAAYVDNSSLTIKKPNELSRVLGLKTLATHGLAAVNSVPWDTIANYAKPFLNKVVSTTTNIVTRCLNRVCTNYMPYFFTLLLQLCTFTRSTNSRIKASMPTTIAKNTVKSVGKFCLEASFNYLKSPNFSKLINIIIWFLLLSVCLGSLIYSTAALGVLMSNLGMPSYCTGYREGYLNSTNVTIATYCTGSIPCSVCLSGLDSLDTYPSLETIQITISSFKWDLTAFGLVAEWFLAYILFTRFFYVLGLAAIMQLFFSYFAVHFISNSWLMWLIINLVQMAPISAMVRMYIFFASFYYVWKSYVHVVDGCNSSTCMMCYKRNRATRVECTTIVNGVRRSFYVYANGGKGFCKLHNWNCVNCDTFCAGSTFISDEVARDLSLQFKRPINPTDQSSYIVDSVTVKNGSIHLYFDKAGQKTYERHSLSHFVNLDNLRANNTKGSLPINVIVFDGKSKCEESSAKSASVYYSQLMCQPILLLDQALVSDVGDSAEVAVKMFDAYVNTFSSTFNVPMEKLKTLVATAEAELAKNVSLDNVLSTFISAARQGFVDSDVETKDVVECLKLSHQSDIEVTGDSCNNYMLTYNKVENMTPRDLGACIDCSARHINAQVAKSHNIALIWNVKDFMSLSEQLRKQIRSAAKKNNLPFKLTCATTRQVVNVVTTKIALKGG

SEQ ID NO: 16326 - protein, 1946 aa, Artificial Sequence
  SARS-CoV-2__MT457391.1__non-structural protein 3 (NSP3)
MAPTKVTFGDDTVIEVQGYKSVNITFELDERIDKVLNEKCSAYTVELGTEVNEFACVVADAVIKTLQPVSELLTPLGIDLDEWSMATYYLFDESGEFKLASHMYCSFYPPDEDEEEGDCEEEEFEPSTQYEYGTEDDYQGKPLEFGATSAALQPEEEQEEDWLDDDSQQTVGQQDGSEDNQTTTIQTIVEVQPQLEMELTPVVQTIEVNSFSGYLKLTDNVYIKNADIVEEAKKVKPTVVVNAANVYLKHGGGVAGALNKATNNAMQVESDDYIATNGPLKVGGSCVLSGHNLAKHCLHVVGPNVNKGEDIQLLKSAYENFNQHEVLLAPLLSAGIFGADPIHSLRVCVDTVRTNVYLAVFDKNLYDKLVSSFLEMKSEKQVEQKIAEIPKEEVKPFITESKPSVEQRKQDDKKIKACVEEVTTTLEETKFLTENLLLYIDINGNLHPDSATLVSDIDITFLKKDAPYIVGDVVQEGVLTAVVIPTKKAGGTTEMLAKALRKVPTDNYITTYPGQGLNGYTVEEAKTVLKKCKSAFYILPSIISNEKQEILGTVSWNLREMLAHAEETRKLMPVCVETKAIVSTIQRKYKGIKIQEGVVDYGARFYFYTSKTTVASLINTLNDLNETLVTMPLGYVTHGLNLEEAARYMRSLKVPATVSVSSPDAVTAYNGYLTSSSKTPEEHFIETISLAGSYKDWSYSGQSTQLGIEFLKRGDKSVYYTSNPTTFHLDGEVITFDNLKTLLSLREVRTIKVFTTVDNINLHTQVVDMSMTYGQQFGPTYLDGADVTKIKPHNSHEGKTFYVLPNDDTLRVEAFEYYHTTDPSFLGRYMSALNHTKKWKYPQVNGLTSIKWADNNCYLATALLTLQQIELKFNPPALQDAYYRARAGEAANFCALILAYCNKTVGELGDVRETMSYLFQHANLDSCKRVLNVVCKTCGQQQTTLKGVEAVMYMGTLSYEQFKKGVQIPCTCGKQATKYLVQQESPFVMMSAPPAQYELKHGTFTCASEYTGNYQCGHYKHITSKETLYCIDGALLTKSSEYKGPITDVFYKENSYTTTIKPVTYKLDGVVCTEIDPKLDNYYKKDNSYFTEQPIDLVPNQPYPNASFDNFKFVCDNIKFADDLNQLTGYKKPASRELKITFFPDLNGDVVAIDYKHYTPSFKKGAKLLHKPIVWHVNNATNKATYKPNTWCIRCLWSTKPVETSNSFDVLKSEDAQGMDNLACEDLKPVSEEVVENPTIQKDVLECNVKTTEVVGDIILKPANNSLKITEEVGHTDLMAAYVDNSSLTIKKPNELSRVLGLKTLATHGLAAVNSVPWDTIANYAKPFLNKVVSTTTNIVTRCLNRVCTNYMPYFFTLLLQLCTFTRSTNSRIKASMPTTIAKNTVKSVGKFCLEASFNYLKSPNFSKLINIIIWFLLLSVCLGSLIYSTAALGVLMSNLGMPSYCTGYREGYLNSTNVTIATYCTGSIPCSVCLSGLDSLDTYPSLETIQITISSFKWDLTAFGLVAEWFLAYILFTRFFYVLGLAAIMQLFFSYFAVHFISNSWLMWLIINLVQMAPISAMVRMYIFFASFYYVWKSYVHVVDGCNSSTCMMCYKRNRATRVECTTIVNGVRRSFYVYANGGKGFCKLHNWNCVNCDTFCAGSTFISDEVARDLSLQFKRPINPTDQSSYIVDSVTVKNGSIHLYFDKAGQKTYERHSLSHFVNLDNLRANNTKGSLPINVIVFDGKSKCEESSAKSASVYYSQLMCQPILLLDQALVSDVGDSAEVAVKMFDAYVNTFSSTFNVPMEKLKTLVATAEAELAKNVSLDNVLSTFISAARQGFVDSDVETKDVVECLKLSHQSDIEVTGDSCNNYMLTYNKVENMTPRDLGACIDCSARHINAQVAKSHNIALIWNVKDFMSLSEQLRKQIRSAAKKNNLPFKLTCATTRQVVNVVTTKIALKGG

SEQ ID NO: 16327 - protein, 1946 aa, Artificial Sequence
  SARS-CoV-2__MT457392.1__non-structural protein 3 (NSP3)
MAPTKVTFGDDTVIEVQGYKSVNITFELDERIDKVLNEKCSAYTVELGTEVNEFACVVADAVIKTLQPVSELLTPLGIDLDEWSMATYYLFDESGEFKLASHMYCSFYPPDEDEEEGDCEEEEFEPSTQYEYGTEDDYQGKPLEFGATSAALQPEEEQEEDWLDDDSQQTVGQQDGSEDNQTTTIQTIVEVQPQLEMELTPVVQTIEVNSFSGYLKLTDNVYIKNADIVEEAKKVKPTVVVNAANVYLKHGGGVAGALNKATNNAMQVESDDYIATNGPLKVGGSCVLSGHNLAKHCLHVVGPNVNKGEDIQLLKSAYENFNQHEVLLAPLLSAGIFGADPIHSLRVCVDTVRTNVYLAVFDKNLYDKLVSSFLEMKSEKQVEQKIAEIPKEEVKPFITESKPSVEQRKQDDKKIKACVEEVTTTLEETKFLTENLLLYIDINGNLHPDSATLVSDIDITFLKKDAPYIVGDVVQEGVLTAVVIPTKKAGGTTEMLAKALRKVPTDNYITTYPGQGLNGYTVEEAKTVLKKCKSAFYILPSIISNEKQEILGTVSWNLREMLAHAEETRKLMPVCVETKAIVSTIQRKYKGIKIQEGVVDYGARFYFYTSKTTVASLINTLNDLNETLVTMPLGYVTHGLNLEEAARYMRSLKVPATVSVSSPDAVTAYNGYLTSSSKTPEEHFIETISLAGSYKDWSYSGQSTQLGIEFLKRGDKSVYYTSNPTTFHLDGEVITFDNLKTLLSLREVRTVKVFTTVDNINLHTQVVDMSMTYGQQFGPTYLDGADVTKIKPHNSHEGKTFYVLPNDDTLRVEAFEYYHTTDPSFLGRYMSALNHTKKWKYPQVNGLTSIKWADNNCYLATALLTLQQIELKFNPPALQDAYYRARAGEAANFCALILAYCNKTVGELGDVRETMSYLFQHANLDSCKRVLNVVCKTCGQQQTTLKGVEAVMYMGTLSYEQFKKGVQIPCTCGKQATKYLVQQESPFVMMSAPPAQYELKHGTFTCASEYTGNYQCGHYKHITSKETLYCIDGALLTKSSEYKGPITDVFYKENSYTTTIKPVTYKLDGVVCTEIDPKLDNYYKKDNSYFTEQPIDLVPNQPYPNASFDNFKFVCDNIKFADDLNQLTGYKKPASRELKVTFFPDLNGDVVAIDYKHYTPSFKKGAKLLHKPIVWHVNNATNKATYKPNTWCIRCLWSTKPVETSNSFDVLKSEDAQGMDNLACEDLKPVSEEVVENPTIQKDVLECNVKTTEVVGDIILKPANNSLKITEEVGHTDLMAAYVDNSSLTIKKPNELSRVLGLKTLATHGLAAVNSVPWDTIANYAKPFLNKVVSTTTNIVTRCLNRVCTNYMPYFFTLLLQLCTFTRSTNSRIKASMPTTIAKNTVKSVGKFCLEASFNYLKSPNFSKLINIIIWFLLLSVCLGSLIYSTAALGVLMSNLGMPSYCTGYREGYLNSTNVTIATYCTGSIPCSVCLSGLDSLDTYPSLETIQITISSFKWDLTAFGLVAEWFLAYILFTRFFYVLGLAAIMQLFFSYFAVHFISNSWLMWLIINLVQMAPISAMVRMYIFFASFYYVWKSYVHVVDGCNSSTCMMCYKRNRATRVECTTIVNGVRRSFYVYANGGKGFCKLHNWNCVNCDTFCAGSTFISDEVARDLSLQFKRPINPTDQSSYIVDSVTVKNGSIHLYFDKAGQKTYERHSLSHFVNLDNLRANNTKGSLPINVIVFDGKSKCEESSAKSASVYYSQLMCQPILLLDQALVSDVGDSAEVAVKMFDAYVNTFSSTFNVPMEKLKTLVATAEAELAKNVSLDNVLSTFISAARQGFVDSDVETKDVVECLKLSHQSDIEVTGDSCNNYMLTYNKVENMTPRDLGACIDCSARHINAQVAKSHNIALIWNVKDFMSLSEQLRKQIRSAAKKNNLPFKLTCATTRQVVNVVTTKIALKGG

SEQ ID NO: 16328 - protein, 1946 aa, Artificial Sequence
  SARS-CoV-2__MT457400.1__non-structural protein 3 (NSP3)
MAPTKVTFGDDTVIEVQGYKSVNITFELDERIDKVLNEKCSAYTVELGTEVNEFACVVADAVIKTLQPVSELLTPLGIDLDEWSMATYYLFDESGEFKLASHMYCSFYPPDEDEEEGDCEEEEFEPSTQYEYGTEDDYQGKPLEFGATSAALQPEEEQEEDWLDDDSQQTVGQQDGSEYNQTTTIQTIVEVQPQLEMELTPVVQTIEVNSFSGYLKLTDNVYIKNADIVEEAKKVKPTVVVNAANVYLKHGGGVAGALNKATNNAMQVESDDYIATNGPLKVGGSCVLSGHNLAKHCLHVVGPNVNKGEDIQLLKSAYENFNQHEVLLAPLLSAGIFGADPIHSLRVCVDTVRTNVYLAVFDKNLYDKLVSSFLEMKSEKQVEQKIAEIPKEEVKPFITESKPSVEQRKQDDKKIKACVEEVTTTLEETKFLTENLLLYIDINGNLHPDSATLVSDIDITFLKKDAPYIVGDVVQEGVLTAVVIPTKKAGGTTEMLAKALRKVPTDNYITTYPGQGLNGYTVEEAKTVLKKCKSAFYILPSIISNEKQEILGTVSWNLREMLAHAEETRKLMPVCVETKAIVSTIQRKYKGIKIQEGVVDYGARFYFYTSKTTVASLINTLNDLNETLVTMPLGYVTHGLNLEEAARYMRSLKVPATVSVSSPDAVTAYNGYLTSSSKTPEEHFIETISLAGSYKDWSYSGQSTQLGIEFLKRGDKSVYYTSNPTTFHLDGEVITFDNLKTLLSLREVRTIKVFTTVDNINLHTQVVDMSMTYGQQFGPTYLDGADVTKIKPHNSHEGKTFYVLPNDDTLRVEAFEYYHTTDPSFLGRYMSALNHTKKWKYPQVNGLTSIKWADNNCYLATALLTLQQIELKFNPPALQDAYYRARAGEAANFCALILAYCNKTVGELGDVRETMSYLFQHANLDSCKRVLNVVCKTCGQQQTTLKGVEAVMYMGTLSYEQFKKGVQIPCTCGKQATKYLVQQESPFVMMSAPPAQYELKHGTFTCASEYTGNYQCGHYKHITSKETLYCIDGALLTKSSEYKGPITDVFYKENSYTTTIKPVTYKLDGVVCTEIDPKLDNYYKKDNSYFTEQPIDLVPNQPYPNASFDNFKFVCDNIKFADDLNQLTGYKKPASRELKVTFFPDLNGDVVAIDYKHYTPSFKKGAKLLHKPIVWHVNNATNKATYKPNTWCIRCLWSTKPVETSNSFDVLKSEDAQGMDNLACEDLKPVSEEVVENPTIQKDVLECNVKTTEVVGDIILKPANNSLKITEEVGHTDLMAAYVDNSSLTIKKPNELSRVLGLKTLATHGLAAVNSVPWDTIANYAKPFLNKVVSTTTNIVTRCLNRVCTNYMPYFFTLLLQLCTFTRSTNSRIKASMPTTIAKNTVKSVGKFCLEASFNYLKSPNFSKLINIIIWFLLLSVCLGSLIYSTAALGVLMSNLGMPSYCTGYREGYLNSTNVTIATYCTGSIPCSVCLSGLDSLDTYPSLETIQITISSFKWDLTAFGLVAEWFLAYILFTRFFYVLGLAAIMQLFFSYFAVHFISNSWLMWLIINLVQMAPISAMVRMYIFFASFYYVWKSYVHVVDGCNSSTCMMCYKRNRATRVECTTIVNGVRRSFYVYANGGKGFCKLHNWNCVNCDTFCAGSTFISDEVARDLSLQFKRPINPTDQSSYIVDSVTVKNGSIHLYFDKAGQKTYERHSLSHFVNLDNLRANNTKGSLPINVIVFDGKSKCEESSAKSASVYYSQLMCQPILLLDQALVSDVGDSAEVAVKMFDAYVNTFSSTFNVPMEKLKTLVATAEAELAKNVSLDNVLSTFISAARQGFVDSDVETKDVVECLKLSHQSDIEVTGDSCNNYMLTYNKVENMTPRDLGACIDCSARHINAQVAKSHNIALIWNVKDFMSLSEQLRKQIRSAAKKNNLPFKLTCATTRQVVNVVTTKIALKGG

SEQ ID NO: 16329 - protein, 1946 aa, Artificial Sequence
  SARS-CoV-2__MT457401.1__non-structural protein 3 (NSP3)
MAPTKVTFGDDTVIEVQGYKSVNITFELDERIDKVLNEKCSAYTVELGTEVNEFACVVADAVIKTLQPVSELLTPLGIDLDEWSMATYYLFDESGEFKLASHMYCSFYPPDEDEEEGDCEEEEFEPSTQYEYGTEDDYQGKPLEFGATSAALQPEEEQEEDWLDDDSQQTVGQQDGSEDNQTTTIQTIVEVQPQLEMELTPVVQTIEVNSFSGYLKLTDNVYIKNADIVEEAKKVKPTVVVNAANVYLKHGGGVAGALNKATNNAMQVESDDYIATNGLLKVGGSCVLSGHNLAKHCLHVVGPNVNKGEDIQLLKSAYENFNQHEVLLAPLLSAGIFGADPIHSLRVCVDTVRTNVYLAVFDKNLYDKLVSSFLEMKSEKQVEQKIAEIPKEEVKPFITESKPSVEQRKQDDKKIKACVEEVTTTLEETKFLTENLLLYIDINGNLHPDSATLVSDIDITFLKKDAPYIVGDVVQEGVLTAVVIPTKKAGGTTEMLAKALRKVPTDNYITTYPGQGLNGYTVEEAKTVLKKCKSAFYILPSIISNEKQEILGTVSWNLREMLAHAEETRKLMPVCVETKAIVSTIQRKYKGIKIQEGVVDYGARFYFYTSKTTVASLINTLNDLNETLVTMPLGYVTHGLNLEEAARYMRSLKVPATVSVSSPDAVTAYNGYLTSSSKTPEEHFIETISLAGSYKDWSYSGQSTQLGIEFLKRGDKSVYYTSNPTTFHLDGEVITFDNLKTLLSLREVRTIKVFTTVDNINLHTQVVDMSMTYGQQFGPTYLDGADVTKIKPHNSHEGKTFYVLPNDDTLRVEAFEYYHTTDPSFLGRYMSALNHTKKWKYPQVNGLTSIKWADNNCYLATALLTLQQIELKFNPPALQDAYYRARAGEAANFCALILAYCNKTVGELGDVRETMSYLFQHANLDSCKRVLNVVCKTCGQQQTTLKGVEAVMYMGTLSYEQFKKGVQIPCTCGKQATKYLVQQESPFVMMSAPPAQYELKHGTFTCASEYTGNYQCGHYKHITSKETLYCIDGALLTKSSEYKGPITDVFYKENSYTTTIKPVTYKLDGVVCTEIDPKLDNYYKKDNSYFTEQPIDLVPNQPYPNASFDNFKFVCDNIKFADDLNQLTGYKKPASRELKVTFFPDLNGDVVAIDYKHYTPSFKKGAKLLHKPIVWHVNNATNKVTYKPNTWCIRCLWSTKPVETSNSFDVLKSEDAQGMDNLACEDLKPVSEEVVENPTIQKDVLECNVKTTEVVGDIILKPANNSLKITEEVGHTDLMAAYVDNSSLTIKKPNELSRVLGLKTLATHGLAAVNSVPWDTIANYAKPFLNKVVSTTTNIVTRCLNRVCTNYMPYFFTLLLQLCTFTRSTNSRIKASMPTTIAKNTVKSVGKFCLEASFNYLKSPNFSKLINIIIWFLLLSVCLGSLIYSTAALGVLMSNLGMPSYCTGYREGYLNSTNVTIATYCTGSIPCSVCLSGLDSLDTYPSLETIQITISSFKWDLTAFGLVAEWFLAYILFTRFFYVLGLAAIMQLFFSYFAVHFISNSWLMWLIINLVQMAPISAMVRMYIFFASFYYVWKSYVHVVDGCNSSTCMMCYKRNRATRVECTTIVNGVRRSFYVYANGGKGFCKLHNWNCVNCDTFCAGSTFISDEVARDLSLQFKRPINPTDQSSYIVDSVTVKNGSIHLYFDKAGQKTYERHSLSHFVNLDNLRANNTKGSLPINVIVFDGKSKCEESSAKSASVYYSQLMCQPILLLDQALVSDVGDSAEVAVKMFDAYVNTFSSTFNVPMEKLKTLVATAEAELAKNVSLDNVLSTFISAARQGFVDSDVETKDVVECLKLSHQSDIEVTGDSCNNYMLTYNKVENMTPRDLGACIDCSARHINAQVAKSHNIALIWNVKDFMSLSEQLRKQIRSAAKKNNLPFKLTCATTRQVVNVVTTKIALKGG

SEQ ID NO: 16330 - protein, 1946 aa, Artificial Sequence
  SARS-CoV-2__MT451874.1__non-structural protein 3 (NSP3)
MAPTKVTFGDDTVIEVQGYKSVNITFELDERIDKVLNEKCSAYTVELGTEVNEFACVVADAVIKTLQPVSELLTPLGIDLDEWSMATYYLFDESGEFKLASHMYCSFYPPDEDEEEGDCEEEEFEPSTQYEYGTEDDYQGKPLEFGATSAALQPEEEQEEDWLDDDSQQTVGQQDGSEDNQTTTIQTIVEVQPQLEMELTPVVQTIEVNSFSGYLKLTDNVYIKNADIVEEAKKVKPTVVVNAANVYLKHGGGVAGALNKATNNAMQVESDDYIATNGPLKVGGSCVLSGHNLAKHCLHVVGPNVNKGEDIQLLKSAYENFNQHEVLLAPLLSAGIFGADPIHSLRVCVDTVRTNVYLAVFDKNLYDKLVSSFLEMKSEKQVEQKIAEIPKEEVKPFITESKPSVEQRKQDDKKIKACVEEVTTTLEETKFLTENLLLYIDINGNLHPDSATLVSDIDITFLKKDAPYIVGDVVQEGVLTAVVIPTKKAGGTTEMLAKALRKVPTDNYITTYPGQGLNGYTVEEAKTVLKKCKSAFYILPSIISNEKQEILGTVSWNLREMLAHAEETRKLMPVCVETKAIVSTIQRKYKGIKIQEGVVDYGARFYFYTSKTTVASLINTLNDLNETLVTMPLGYVTHGLNLEEAARYMRSLKVPATVSVSSPDAVTAYNGYLTSSSKTPEEHFIETISLAGSYKDWSYSGQSTQLGIEFLKRGDKSVYYTSNPTTFHLDGEVITFDNLKTLLSLREVRTIKVFTTVDNINLHTQVVDMSMTYGQQFGPTYLDGADVTKIKPHNSHEGKTFYVLPNDDTLRVEAFEYYHTTDPSFLGRYMSALNHTKKWKYPQVNGLTSIKWADNNCYLATALLTLQQIELKFNPPALQDAYYRARAGEAANFCALILAYCNKTVGELGDVRETMSYLFQHANLDSCKRVLNVVCKTCGQQQTTLKGVEAVMYMGTLSYEQFKKGVQIPCTCGKQATKYLVQQESPFVMMSAPPAQYELKHGTFTCASEYTGNYQCGHYKHITSKETLYCIDGALLTKSSEYKGPITDVFYKENSYTTTIKPVTYKLDGVVCTEIDPKLDNYYKKDNSYFTEQPIDLVPNQPYPNASFDNFKFVCDNIKFADDLNQLTGYKKPASRELKVTFFPDLNGDVVAIDYKHYTPSFKKGAKLLHKPIVWHVNNATNKATYKPNTWCIRCLWRKKPVETSNSFDVLKSEDAQGMDNLACEDLKPVSEEVVENPTIQKDVLECNVKTTEVVGDIILKPANNSLKITEEVGHTDLMAAYVDNSSLTIKKPNELSRVLGLKTLATHGLAAVNSVPWDTIANYAKPFPNKVVSTTTNIVTRCLNRVCTNYMPYFFTLLLQLCTFTRSTNSRIKASMPTTIAKNTVKSVGKFCLEASFNYLKSPNFSKLINIIIWFLLLSVCLGSLIYSTAALGVLMSNLGMPSYCTGYREGYLNSTNVTIATYCTGSIPCSVCLSGLDSLDTYPSLETIQITISSFKWDLTAFGLVAEWFLAYILFTRFFYVLGLAAIMQLFFSYFAVHFISNSWLMWLIINLVQMAPISAMVRMYIFFASFYYVWKSYVHVVDGCNSSTCMMCYKRNRATRVECTTIVNGVRRSFYVYANGGKGFCKLHNWNCVNCDTFCAGSTFISDEVARDLSLQFKRPINPTDQSSYIVDSVTVKNGSIHLYFDKAGQKTYERHSLSHFVNLDNLRANNTKGSLPINVIVFDGKSKCEESSAKSASVYYSQLMCQPILLLDQALVSDVGDSAEVAVKMFDAYVNTFSSTFNVPMEKLKTLVATAEAELAKNVSLDNVLSTFISAARQGFVDSDVETKDVVECLKLSHQSDIEVTGDSCNNYMLTYNKVENMTPRDLGACIDCSARHINAQVAKSHNIALIWNVKDFMSLSEQLRKQIRSAAKKNNLPFKLTCATTRQVVNVVTTKIALKGG

SEQ ID NO: 16331 - protein, 1946 aa, Artificial Sequence
  SARS-CoV-2__MT451888.1__non-structural protein 3 (NSP3)
MAPTKVTFGDDTVIEVQGYKSVNITFELDERIDKVLNEKCSAYTVELGTEVNEFACVVADAVIKTLQPVSELLTPLGIDLDEWSMATYYLFDESGEFKLASHMYCSFYPPDEDEEEGDCEEEEFEPSTQYEYGTEDDYQGKPLEFGATSAALQPEEEQEEDWLDDDSQQTVGQQDGSEDNQTTTIQTIVEVQPQLEMELTPVVQTIEVNSFSGYLKLTDNVYIKNADIVEEAKKVKPTVVVNAANVYLKHGGGVAGALNKATNNAMQVESDDYIATNGPLKVGGSCVLSGHNLAKHCLHVVGPNVNKGEDIQLLKSAYENFNQHEVLLAPLLSAGIFGADPIHSLRVCVDTVRTNVYLAVFDKNLYDKLVSSFLEMKSEKQVEQKIAEIPKEEVKPFITESKPSVEQRKQDDKKIKACVEEVTTTLEETKFLTENLLLYIDINGNLHPDSATLVSDIDITFLKKDAPYIVGDVVQEGVLTAVVIPTKKAGGTTEMLAKALRKVPTDNYITTYPGQGLNGYTVEEAKTVLKKCKSAFYILPSIISNEKQEILGTVSWNLREMLAHAEETRKLMPVCVETKAIVSTIQRKYKGIKIQEGVVDYGARFYFYTSKTTVASLINTLNDLNETLVTMPLGYVTHGLNLEEAARYMRSLKVPATVSVSSPDAVTAYNGYLTSSSKTPEEHFIETISLAGSYKDWSYSGQSTQLGIEFLKRGDKSVYYTSNPTTFHLDGEVITFDNLKTLLSLREVRTIKVFTTVDNINLHTQVVDMSMTYGQQFGPTYLDGADVTKIKPHNSHEGKTFYVLPNDDTLRVEAFEYYHTTDPSFLGRYMSALNHTKKWKYPQVNGLTSIKWADNNCYLATALLTLQQIELKFNPPALQDAYYRARAGEAANFCALILAYCNKTVGELGDVRETMSYLFQHANLDSCKRVLNVVCKTCGQQQTTLKGVEAVMYMGTLSYEQFKKGVQIPCTCGKQATKYLVQQESPFVMMSAPPAQYELKHGTFTCASEYTGNYQCGHYKHITSKETLYCIDGALLAKSSEYKGPITDVFYKENSYTTTIKPVTYKLDGVVCTEIDPKLDNYYKKDNSYFTEQPIDLVPNQPYPNASFDNFKFVCDNIKFADDLNQLTGYKKPASRELKVTFFPDLNGDVVAIDYRHYTPSFKKGAKLLHKPIVWHVNNATNKATYKPNTWCIRCLWSTKPVETSNSFDVLKSEDAQGMDNLACEDLKPVSEEVVENPTIQKDVLECNVKTTEVVGDIILKPANNSLKITEEVGHTDLMAAYVDNSSLTIKKPNELSRVLGLKTLATHGLAAVNSVPWDTIANYAKPFLNKVVSTTTNIVTRCLNRVCTNYMPYFFTLLLQLCTFTRSTNSRIKASMPTTIAKNTVKSVGKFCLEASFNYLKSPNFSKLINIIIWFLLLSVCLGSLIYSTAALGVLMSNLGMPSYCTGYREGYLNSTNVTIATYCTGSIPCSVCLSGLDSLDTYPSLETIQITISSFKWDLTAFGLVAEWFLAYILFTRFFYVLGLAAIMQLFFSYFAVHFISNSWLMWLIINLVQMAPISAMVRMYIFFASFYYVWKSYVHVVDGCNSSTCMMCYKRNRATRVECTTIVNGVRRSFYVYANGGKGFCKLHNWNCVNCDTFCAGSTFISDEVARDLSLQFKRPINPTDQSSYIVDSVTVKNGSIHLYFDKAGQKTYERHSLSHFVNLDNLRANNTKGSLPINVIVFDGKSKCEESSAKSASVYYSQLMCQPILLLDQALVSDVGDSAEVAVKMFDAYVNTFSSTFNVPMEKLKTLVATAEAELAKNVSLDNVLSTFISAARQGFVDSDVETKDVVECLKLSHQSDIEVTGDSCNNYMLTYNKVENMTPRDLGACIDCSARHINAQVAKSHNIALIWNVKDFMSLSEQLRKQIRSAAKKNNLPFKLTCATTRQVVNVVTTKIALKGG

SEQ ID NO: 16332 - protein, 1946 aa, Artificial Sequence
  SARS-CoV-2__MT451889.1__non-structural protein 3 (NSP3)
MAPTKVTFGDDTVIEVQGYKSVNITFELDERIDKVLNEKCSAYTVELGTEVNEFACVVADAVIKTLQPVSELLTPLGIDLDEWSMATYYLFDESGEFKLASHMYCSFYPPDEDEEEGDCEEEEFEPSTQYEYGTEDDYQGKPLEFGATSAALQPEEEQEEDWLDDDSQQTVGQQDGSEDNQTTTIQTIVEVQPQLEMELTPVVQTIEVNSFSGYLKLTDNVYIKNADIVEEAKKVKPTVVVNAANVYLKHGGGVAGALNKATNNAMQVESDDYIATNGPLKVGGSCVLSGHNLAKHCLHVVGPNVNKGEDIQLLKSAYENFNQHEVLLAPLLSAGIFGADPIHSLRVCVDTVRTNVYLAVFDKNLYDKLVSSFLEMKSEKQVEQKIAEIPKEEVKPFITESKPSVEQRKQDDKKIKACVEEVTTTLEETKFLTENLLLYIDINGNLHPDSATLVSDIDITFLKKDAPYIVGDVVQEGVLTAVVIPTKKAGGTTEMLAKALRKVPTDNYITTYPGQGLNGYTVEEAKTVLKKCKSAFYILPSIISNEKQEILGTVSWNLREMLAHAEETRKLMPVCVETKAIVSTIQRKYKGIKIQEGVVDYGARFYFYTSKTTVASLINTLNDLNETLVTMPLGYVTHGLNLEEAARYMRSLKVPATVSVSSPDAVTAYNGYLTSSSKTPEEHFIETISLAGSYKDWSYSGQSTQLGIEFLKRGDKSVYYTSNPTTFHLDGEVITFDNLKTLLSLREVRTIKVFTTVDNINLHTQVVDMSMTYGQQFGPTYLDGADVTKIKPHNSHEGKTFYVLPNDDTLRVEAFEYYHTTDPSFLGRYMSALNHTKKWKYPQVNGLTSIKWADNNCYLATALLTLQQIELKFNPPALQDAYYRARAGEAANFCALILAYCNKTVGELGDVRETMSYLFQHANLDSCKRVLNVVCKTCGQQQTTLKGVEAVMYMGTLSYEQFKKGVQIPCTCGKQATKYLVQQESPFVMMSAPPAQYELKHGTFTCASEYTGNYQCGHYKHITSKETLYCIDGALLTKSSEYKGPITDVFYKENSYTTTIKPVTYKLDGVVCTEIDPKLDNYYKKDNSYFTEQPIDLVPNQPYPNASFDNFKFVCDNIKFAGDLNQLTGYKKPASRELKVTFFPDLNGDVVAIDYKHYTPSFKKGAKLLHKPIVWHVNNATNKATYKPNTWCIRCLWSKKPVETSNSFDVLKSEDAQGMDNLACEDLKPVSEEVVENPTIQKDVLECNVKTTEVVGDIILKPANNSLKITEEVGHTDLMAAYVDNSSLTIKKPNELSRVLGLKTLATHGLAAVNSVPWDTIANYAKPFLNKVVSTTTNIVTRCLNRVCTNYMPYFFTLLLQLCTFTRSTNSRIKASMPTTIAKNTVKSVGKFCLEASFNYLKSPNFSKLINIIIWFLLLSVCLGPLIYSTAALGVLMSNLGMPSYCTGYREGYLNSTNVTIATYCTGSIPCSVCLSGLDSLDTYPSLETIQITISSFKWDLTAFGLVAEWFLAYILFTRFFYVLGLAAIMQLFFSYFAVHFISNSWLMWLIINLVQMAPISAMVRMYIFFASFYYVWKSYVHVVDGCNSSTCMMCYKRNRATRVECTTIVNGVRRSFYVYANGGKGFCKLHNWNCVNCDTFCAGSTFISDEVARDLSLQFKRPINPTDQSSYIVDSVTVKNGSIHLYFDKAGQKTYERHSLSHFVNLDNLRANNTKGSLPINVIVFDGKSKCEESSAKSASVYYSQLMCQPILLLDQALVSDVGDSAEVAVKMFDAYVNTFSSTFNVPMEKLKTLVATAEAELAKNVSLDNVLSTFISAARQGFVDSDVETKDVVECLKLSHQSDIEVTGDSCNNYMLTYNKVENMTPRDLGACIDCSARHINAQVAKSHNIALIWNVKDFMSLSEQLRKQIRSAAKKNNLPFKLTCATTRQVVNVVTTKIALKGG

SEQ ID NO: 16333 - protein, 1946 aa, Artificial Sequence
  SARS-CoV-2__MT450936.1__non-structural protein 3 (NSP3)
MAPTKVTFGDDTVIEVQGYKSVNITFELDERIDKVLNEKCSAYTVELGTEVNEFACVVADAVIKTLQPVSELLTPLGIDLDEWSMATYYLFDESGEFKLASHMYCSFYPPDEDEEEGDCEEEEFEPSTQYEYGTEDDYQGKPLEFGATSAALQPEEEQEEDWLDDDSQQTVGQQDGSEDNQTTTIQTIVEVQPQLEMELTPVVQTIEVNSFSGYLKLTDNVYIKNADIVEEAKKVKPTVVVNAANVYLKHGGGVAGALNKATNNAMQVESDDYIATNGPLKVGGSCVLSGHNLAKHCLHVVGPNVNKGEDIQLLKSAYENFNQHEVLLAPLLSAGIFGADPIHSLRVCVDTVRTNVYLAVFDKNLYDKLVSSFLEMKSEKQVEQKIAEIPKEEVKPFITESKPSVEQRKQDDKKIKACVEEVTTTLEETKFLTENLLLYIDINGNLHPDSATLVSDIDITFLKKDAPYIVGDVVQEGVLTAVVIPTKKAGGTTEMLAKALRKVPTDNYITTYPGQGLNGYTVEEAKTVLKKCKSAFYILPSIISNEKQEILGTVSWNLREMLAHAEETRKLMPVCVETKAIVSTIQRKYKGIKIQEGVVDYGARFYFYTSKTTVASLINTLNDLNETLVTMPLGYVTHGLNLEEAARYMRSLKVPATVSVSSPDAVTAYNGYLTSSSKTPEEHFIETISLAGSYKDWSYSGQSTQLGIEFLKRGDKSVYYTSNPTTFHLDGEVITFDNLKTLLSLREVRTIKVFTTVDNINLHTQVVDMSMTYGQQFGPTYLDGADVTKIKPHNSHEGKTFYVLPNDDTLRVEAFEYYHTTDPSFLGRYMSALNHTKKWKYPQVNGLTSIKWADNNCYLATALLTLQQIELKFNPPALQDAYYRARAGEAANFCALILAYCNKTVGELGDVRETMSYLFQHANLDSCKRVLNVVCKTCGQQQTTLKGVEAVMYMGTLSYEQFKKGVQIPCTCGKQATKYLVQQESPFVMMSAPPAQYELKHGTFTCASEYTGNYQCGHYKHITSKETLYCIDGALLTKSSEYKGPITDVFYKENSYTTTIKPVTYKLDGVVCTEIDPKLDNYYKKDNSYFTEQPIDLVPNQPYPNASFDNFKFVCDNIKFADDLNQLTGYKKPASRELKVTFFPDLNGDVVAIDYKHYTPSFKKGAKLLHKPIVWHVNNATNKATYKPNTWCIRCLWSTKPVETSNSFDVLKSEDAQGMDNLACEDLKPVSEEVVENPTIQKDVLECNVKTTEVVGDIILKPANNSLKITEEVGHTDLMAAYVDNSSLTIKKPNELSRVLGLKTLATHGLAAVNSVPWDTIANYAKPFLNKVVSTTTNIVTRCLNRVCTNYMPYFFTLLLQLCTFTRSTNSRIKASMPTTIAKNTVKSVGKFCLEASFNYLKSPNFSKLINIIIWFLLLIICLGSLIYSTAALGVLMSNLGMPSYCTGYREGYLNSTNVTIATYCTGSIPCSVCLSGLDSLDTYPSLETIQITISSFKWDLTAFGLVAEWFLAYILFTRFFYVLGLAAIMQLFFSYFAVHFISNSWLMWLIINLVQMAPISAMVRMYIFFASFYYVWKSYVHVVDGCNSSTCMMCYKRNRATRVECTTIVNGVRRSFYVYANGGKGFCKLHNWNCVNCDTFCAGSTFISDEVARDLSLQFKRPINPTDQSSYIVDSVTVKNGSIHLYFDKAGQKTYERHSLSHFVNLDNLRANNTKGSLPINVIVFDGKSKCEESSAKSASVYYSQLMCQPILLLDQALVSDVGDSAEVAVKMFDAYVNTFSSTFNVPMEKLKTLVATAEAELAKNVSLDNVLSTFISAARQGFVDSDVETKDVVECLKLSHQSDIEVTGDSCNNYMLTYNKVENMTPRDLGACIDCSARHINAQVAKSHNIALIWNVKDFMSLSEQLRKQIRSAAKKNNLPFKLTCATTRQVVNVVTTKIALKGG

SEQ ID NO: 16334 - protein, 1946 aa, Artificial Sequence
  SARS-CoV-2__MT450951.1__non-structural protein 3 (NSP3)
MAPTKVTFGDDTVIEVQGYKSVNITFELDERIDKVLNEKCSAYTVELGTEVNEFACVVADAVIKTLQPVSELLTPLGIDLDEWSMATYYLFDESGEFKLASHMYCSFYPPDEDEEEGDCEEEEFEPSTQYEYGTEDDYQGKPLEFGATSAALQPEEEQEEDWLDDDSQQTVGQQDGSEDNQTTTIQTIVEVQPQLEMELTPVVQTIEVNSFSGYLKLTDNVYIKNADIVEEAKKVKPTVVVNAANVYLKHGGGVAGALNKATNNAMQVESDDYIATNGPLKVGGSCVLSGHNLAKHCLHVVGPNVNKGEDIQLLKSAYENFNQHEVLLAPLLSAGIFGADPIHSLRVCVDTVRTNVYLAVFDKNLYDKLVSSFLEMKSEKQVEQKIAEIPKEEVKPFITESKPSVEQRKQDDKKIKACVEEVTTTLEETKFLTENLLLYIDINGNLHPDSATLVSDIDITFLKKDAPYIVGDVVQEGVLTAVVIPTKKAGGTTEMLAKALRKVPTDNYITTYPGQGLNGYTVEEAKTVLKKCKSAFYILPSIISNEKQEILGTVSWNLREMLAHAEETRKLMPVCVETKAIVSTIQRKYKGIKIQEGVVDYGARFYFYTSKTTVASLINTLNDLNETLVTMPLGYVTHGLNLEEAARYMRSLKVPATVSVSSPDAVTAYNGYLTSSSKTPEEHFIETISLAGSYKDWSYSGQSTQLGIEFLKRGDKSVYYTSNPTTFHLDGEVITFDNLKTLLSLREVRTIKVFTTVDNINLHTQVVDMSMTYGQQFGPTYLDGADVTKIKPHNSHEGKTFYVLPNDDTLRVEAFEYYHTTDPSFLGRYMSALNHTKKWKYPQVNGLTSIKWADNNCYLATALLTLQQIELKFNPPALQDAYYRARAGEAANFCALILAYCNKTVGELGDVRETMSYLFQHANLDSCKRVLNVVCKTCGQQQTTLKGVEAVMYMGTLSYEQFKKGVQIPCTCGKQATKYLVQQESPFVMMSAPPAQYELKHGTFTCASEYTGNYQCGHYKHITSKETLYCIDGALLTKSSEYKGPITDVFYKENSYTTTIKPVTYKLDGVVCTEIDPKLDNYYKKDNSYFTEQPIDLVPNQPYPNASFDNFKFVCDNIKFADDLNQLTGYKKPASRELKVTFFPDLNGDVVAIDYKHYTPSFKKGAKLLHKPIVWHVNNATNKATYKPNTWCIRCLWSTKPVETSNSFDVLKSEDAQGMDNLACEDLKPVSEEVVENPTIQKDVLECNVKTTEVVGDIILKPANNSLKITEEVGHTDLMAAYVDNSSLTIKKPNELSRVLGLKTLATHGLAAVNSVPWDTIANYAKPFLNKVVSTTTNIVTRCLNRVCTNYMPYFFTLLLQLCTFTRSTNSRIKASMPTTIAKNTVKSVGKFCLEASFNYLKSPNFSKLINIIIWFLLLSVCLGSLIYSTAALGVLMSNLGMPSYCTGYREGYLNSTNVTIATYCTGSIPYSVCLSGLDSLDTYPSLETIQITISSFKWDLTAFGLVAEWFLAYILFTRFFYVLGLAAIMQLFFSYFAVHFISNSWLMWLIINLVQMAPISAMVRMYIFFASFYYVWKSYVHVVDGCNSSTCMMCYKRNRATRVECTTIVNGVRRSFYVYANGGKGFCKLHNWNCVNCDTFCAGSTFISDEVARDLSLQFKRPINPTDQSSYIVDSVTVKNGSIHLYFDKAGQKTYERHSLSHFVNLDNLRANNTKGSLPINVIVFDGKSKCEESSAKSASVYYSQLMCQPILLLDQALVSDVGDSAEVAVKMFDAYVNTFSSTFNVPMEKLKTLVATAEAELAKNVSLDNVLSTFISAARQGFVDSDVETKDVVECLKLSHQSDIEVTGDSCNNYMLTYNKVENMTPRDLGACIDCSARHINAQVAKSHNIALIWNVKDFMSLSEQLRKQIRSAAKKNNLPFKLTCATTRQVVNVVTTKIALKGG

SEQ ID NO: 16335 - protein, 1946 aa, Artificial Sequence
  SARS-CoV-2__MT451017.1__non-structural protein 3 (NSP3)
MAPTKVTFGDDTVIEVQGYKSVNITFELDERIDKVLNEKCSAYTVELGTEVNEFACVVADAVIKTLQPVSELLTPLGIDLDEWSMATYYLFDESGEFKLASHMYCSFYPPDEDEEEGDCEEEEFEPSTQYEYGTEDDYQGKPLEFGATSAALQLEEEQEEDWLDDDSQQTVGQQDGSEDNQTTTIQTIVEVQPQLEMELTPVVQTIEVNSFSGYLKLTDNVYIKNADIVEEAKKVKPTVVVNAANVYLKHGGGVAGALNKATNNAMQVESDDYIATNGPLKVGGSCVLSGHNLAKHCLHVVGPNVNKGEDIQLLKSAYENFNQHEVLLAPLLSAGIFGADPIHSLRVCVDTVRTNVYLAVFDKNLYDKLVSSFLEMKSEKQVEQKIAEIPKEEVKPFITESKPSVEQRKQDDKKIKACVEEVTTTLEETKFLTENLLLYIDINGNLHPDSATLVSDIDITFLKKDAPYIVGDVVQEGVLTAVVIPTKKAGGTTEMLAKALRKVPTDNYITTYPGQGLNGYTVEEAKTVLKKCKSAFYILPSIISNEKQEILGTVSWNLREMFAHAEETRKLMPVCVETKAIVSTIQRKYKGIKIQEGVVDYGARFYFYTSKTTVASLINTLNDLNETLVTMPLGYVTHGLNLEEAARYMRSLKVPATVSVSSPDAVTAYNGYLTSSSKTPEEHFIETISLAGSYKDWSYSGQSTQLGIEFLKRGDKSVYYTSNPTTFHLDGEVITFDNLKTLLSLREVRTIKVFTTVDNINLHTQVVDMSMTYGQQFGPTYLDGADVTKIKPHNSHEGKTFYVLPNDDTLRVEAFEYYHTTDPSFLGRYMSALNHTKKWKYPQVNGLTSIKWADNNCYLATALLTLQQIELKFNPPALQDAYYRARAGEAANFCALILAYCNKTVGELGDVRETMSYLFQHANLDSCKRVLNVVCKTCGQQQTTLKGVEAVMYMGTLSYEQFKKGVQIPCTCGKQATKYLVQQESPFVMMSAPPAQYELKHGTFTCASEYTGNYQCGHYKHITSKETLYCIDGALLTKSSEYKGPITDVFYKENSYTTTIKPVTYKLDGVVCTEIDPKLDNYYKKDNSYFTEQPIDLVPNQPYPNASFDNFKFVCDNIKFADDLNQLTGYKKPASRELKVTFFPDLNGDVVAIDYKHYTPSFKKGAKLLHKPIVWHVNNATNKATYKPNTWCIRCLWSTKPVETSNSFDVLKSEDAQGMDNLACEDLKPVSEEVVENPTIQKDVLECNVKTTEVVGDIILKPANNSLKITEEVGHTDLMAAYVDNSSLTIKKPNELSRVLGLKTLATHGLAAVNSVPWDTIANYAKPFLNKVVSTTTNIVTRCLNRVCTNYMPYFFTLLLQLCTFTRSTNSRIKASMPTTIAKNTVKSVGKFCLEASFNYLKSPNFSKLINIIIWFLLLSVCLGSLIYSTAALGVLMSNLGMPSYCTGYREGYLNSTNVTIATYCTGSIPCSVCLSGLDSLDTYPSLETIQITISSFKWDLTAFGLVAEWFLAYILFTRFFYVLGLAAIMQLFFSYFAVHFISNSWLMWLIINLVQMAPISAMVRMYIFFASFYYVWKSYVHVVDGCNSSTCMMCYKRNRATRVECTTIVNGVRRSFYVYANGGKGFCKLHNWNCVNCDTFCAGSTFISDEVARDLSLQFKRPINPTDQSSYIVDSVTVKNGSIHLYFDKAGQKTYERHSLSHFVNLDNLRANNTKGSLPINVIVFDGKSKCEESSAKSASVYYSQLMCQPILLLDQALVSDVGDSAEVAVKMFDAYVNTFSSTFNVPMEKLKTLVATAEAELAKNVSLDNVLSTFISAARQGFVDSDVETKDVVECLKLSHQSDIEVTGDSCNNYMLTYNKVENMTPRDLGACIDCSARHINAQVAKSHNIALIWNVKDFMSLSEQLRKQIRSAAKKNNLPFKLTCATTRQVVNVVTTKIALKGG

SEQ ID NO: 16336 - protein, 1946 aa, Artificial Sequence
  SARS-CoV-2__MT451142.1__non-structural protein 3 (NSP3)
MAPTKVTFGDDTVIEVQGYKSVNITFELDERIDKVLNEKCSAYTVELGTEVNEFACVVADAVIKTLQPVSELLTPLGIDLDEWSMATYYLFDESGEFKLTSHMYCSFYPPDEDEEEGDCEEEEFEPSTQYEYGTEDDYQGKPLEFGATSAALQPEEEQEEDWLDDDSQQTVGQQDGSEDNQTTTIQTIVEVQPQLEMELTPVVQTIEVNSFSGYLKLTDNVYIKNADIVEEAKKVKPTVVVNAANVYLKHGGGVAGALNKATNNAMQVESDDYIATNGPLKVGGSCVLSGHNLAKHCLHVVGPNVNKGEDIQLLKSAYENFNQHEVLLAPLLSAGIFGADPIHSLRVCVDTVRTNVYLAVFDKNLYDKLVSSFLEMKSEKQVEQKIAEIPKEEVKPFITESKPSVEQRKQDDKKIKACVEEVTTTLEETKFLTENLLLYIDINGNLHPDSATLVSDIDITFLKKDAPYIVGDVVQEGVLTAVVIPTKKAGGTTEMLAKALRKVPTDNYITTYPGQGLNGYTVEEAKTVLKKCKSAFYILPSIISNEKQEILGTVSWNLREMLAHAEETRKLMPVCVETKAIVSTIQRKYKGIKIQEGVVDYGARFYFYTSKTTVASLINTLNDLNETLVTMPLGYVTHGLNLEEAARYMRSLKVPATVSVSSPDAVTAYNGYLTSSSKTPEEHFIETISLAGSYKDWSYSGQSTQLGIEFLKRGDKSVYYTSNPTTFHLDGEVITFDNLKTLLSLREVRTIKVFTTVDNINLHTQVVDMSMTYGQQFGPTYLDGADVTKIKPHNSHEGKTFYVLPNDDTLRVEAFEYYHTTDPSFLGRYMSALNHTKKWKYPQVNGLTSIKWADNNCYLATALLTLQQIELKFNPPALQDAYYRARAGEAANFCALILAYCNKTVGELGDVRETMSYLFQHANLDSCKRVLNVVCKTCGQQQTTLKGVEAVMYMGTLSYEQFKKGVQIPCTCGKQATKYLVQQESPFVMMSAPPAQYELKHGTFTCASEYTGNYQCGHYKHITSKETLYCIDGALLTKSSEYKGPITDVFYKENSYTTTIKPVTYKLDGVVCTEIDPKLDNYYKKDNSYFTEQPIDLVPNQPYPNASFDNFKFVCDNIKFADDLNQLTGYKKPASRELKVTFFPDLNGDVVAIDYKHYTPSFKKGAKLLHKPIVWHVNNATNKATYKPNTWCIRCLWSTKPVETSNSFDVLKSEDAQGMDNLACEDLKPVSEEVVENPTIQKDVLECNVKTTEVVGDIILKPANNSLKITEEVGHTDLMAAYVDNSSLTIKKPNELSRVLGLKTLATHGLAAVNSVPWDTIANYAKPFLNKVVSTTTNIVTRCLNRVCTNYMPYFFTLLLQLCTFTRSTNSRIKASMPTTIAKNTVKSVGKFCLEASFNYLKSPNFSKLINIIIWFLLLSVCLGSLIYSTAALGVLMSNLGMPSYCTGYREGYLNSTNVTIATYCTGSIPCSVCLSGLDSLDTYPSLETIQITISSFKWDLTAFGLVAEWFLAYILFTRFFYVLGLAAIMQLFFSYFAVHFISNSWLMWLIINLVQMAPISAMVRMYIFFASFYYVWKSYVHVVDGCNSSTCMMCYKRNRATRVECTTIVNGVRRSFYVYANGGKGFCKLHNWNCVNCDTFCAGSTFISDEVARDLSLQFKRPINPTDQSSYIVDSVTVKNGSIHLYFDKAGQKTYERHSLSHFVNLDNLRANNTKGSLPINVIVFDGKSKCEESSAKSASVYYSQLMCQPILLLDQALVSDVGDSAEVAVKMFDAYVNTFSSTFNVPMEKLKTLVATAEAELAKNVSLDNVLSTFISAARQGFVDSDVETKDVVECLKLSHQSDIEVTGDSCNNYMLTYNKVENMTPRDLGACIDCSARHINAQVAKSHNIALIWNVKDFMSLSEQLRKQIRSAAKKNNLPFKLTCATTRQVVNVVTTKIALKGG

SEQ ID NO: 16337 - protein, 1946 aa, Artificial Sequence
  SARS-CoV-2__MT451146.1__non-structural protein 3 (NSP3)
MAPTKVTFGDDTVIEVQGYKSVNITFELDERIDKVLNEKCSAYTVELGTEVNEFACVVADAVIKTLQPVSELLTPLGIDLDEWSMATYYLFDESGEFKLASHMYCSFYPPDEDEEEGDCEEEEFEPSTQYEYGTEDDYQGKPLEFGATSAALQPEEEQEEDWLDDDSQQTVGQQDGSEDNQTTTIQTIVEVQPQLEMELTPVVQTIEVNSFSGYLKLTDNVYIKNADIVEEAKKIKPTVVVNAANVYLKHGGGVAGALNKATNNAMQVESDDYIATNGPLKVGGSCVLSGHNLAKHCLHVVGPNVNKGEDIQLLKSAYENFNQHEVLLAPLLSAGIFGADPIHSLRVCVDTVRTNVYLAVFDKNLYDKLVSSFLEMKSEKQVEQKIAEIPKEEVKPFITESKPSVEQRKQDDKKIKACVEEVTTTLEETKFLTENLLLYIDINGNLHPDSATLVSDIDITFLKKDAPYIVGDVVQEGVLTAVVIPTKKAGGTTEMLAKALRKVPTDNYITTYPGQGLNGYTVEEAKTVLKKCKSAFYILPSIISNEKQEILGTVSWNLREMLAHAEETRKLMPVCVETKAIVSTIQRKYKGIKIQEGVVDYGARFYFYTSKTTVASLINTLNDLNETLVTMPLGYVTHGLNLEEAARYMRSLKVPATVSVSSPDAVTAYNGYLTSSSKTPEEHFIETISLAGSYKDWSYSGQSTQLGIEFLKRGDKSVYYTSNPTTFHLDGEVITFDNLKTLLSLREVRTIKVFTTVDNINLHTQVVDMSMTYGQQFGPTYLDGADVTKIKPHNSHEGKTFYVLPNDDTLRVEAFEYYHTTDPSFLGRYMSALNHTKKWKYPQVNGLTSIKWADNNCYLATALLTLQQIELKFNPPALQDAYYRARAGEAANFCALILAYCNKTVGELGDVRETMSYLFQHANLDSCKRVLNVVCKTCGQQQTTLKGVEAVMYMGTLSYEQFKKGVQIPCTCGKQATKYLVQQESPFVMMSAPPAQYELKHGTFTCASEYTGNYQCGHYKHITSKETLYCIDGALLTKSSEYKGPITDVFYKENSYTTTIKPVTYKLDGVVCTEIDPKLDNYYKKDNSYFTEQPIDLVPNQPYPNASFDNFKFVCDNIKFADDLNQLTGYKKPASRELKVTFFPDLNGDVVAIDYKHYTPSFKKGAKLLHKPIVWHVNNATNKATYKPNTWCIRCLWSTKPVETSNSFDVLKSEDAQGMDNLACEDLKPVSEEVVENPTIQKDVLECNVKTTEVVGDIILKPANNSLKITEEVGHTDLMAAYVDNSSLTIKKPNELSRVLGLKTLATHGLAAVNSVPWDTIANYAKPFLNKVVSTTTNIVTRCLNRVCTNYMPYFFTLLLQLCTFTRSTNSRIKASMPTTIAKNTVKSVGKFCLEASFNYLKSPNFSKLINIIIWFLLLSVCLGSLIYSTAALGVLMSNLGMPSYCTGYREGYLNSTNVTIATYCTGSIPCSVCLSGLDSLDTYPSLETIQITISSFKWDLTAFGLVAEWFLAYILFTRFFYVLGLAAIMQLFFSYFAVHFISNSWLMWLIINLVQMAPISAMVRMYIFFASFYYVWKSYVHVVDGCNSSTCMMCYKRNRATRVECTTIVNGVRRSFYVYANGGKGFCKLHNWNCVNCDTFCAGSTFISDEVARDLSLQFKRPINPTDQSSYIVDSVTVKNGSIHLYFDKAGQKTYERHSLSHFVNLDNLRANNTKGSLPINVIVFDGKSKCEESSAKSASVYYSQLMCQPILLLDQALVSDVGDSAEVAVKMFDAYVNTFSSTFNVPMEKLKTLVATAEAELAKNVSLDNVLSTFISAARQGFVDSDVETKDVVECLKLSHQSDIEVTGDSCNNYMLTYNKVENMTPRDLGACIDCSARHINAQVAKSHNIALIWNVKDFMSLSEQLRKQIRSAAKKNNLPFKLTCATTRQVVNVVTTKIALKGG

SEQ ID NO: 16338 - protein, 1946 aa, Artificial Sequence
  SARS-CoV-2__MT451231.1__non-structural protein 3 (NSP3)
MAPTKVTFGDDTVIEVQGYKSVNITFELDERIDKVLNEKCSAYTVELGTEVNEFACVVADAVIKTLQPVSELLTPLGIDLDEWSMATYYLFDESGEFKLASHMYCSFYPPDEDEEEGDCEEEEFEPSTQYEYGTEDDYQGKPLEFGATSAALQPEEEQEEDWLDDDSQQTVGQQDGSEDNQTTTIQTIVEVQPQLEMELTPVVQTIEVNSFSGYLKLTDNVYIKNADIVEEAKKVKPTVVVNAANVYLKHGGGVAGALNKATNNAMQVESDDYIATNGPLKVGGSCVLSGHNLAKHCLHVVGPNVNKGEDIQLLKSAYENFNQHEVLLAPLLSAGIFGADPIHSLRVCVDTVRTNVYLAVFDKNLYDKLVSSFLEMKSEKQVEQKIAEIPKEEVKPFITESKPSVEQRKQDDKKIKACVEEVTTTLEETKFLTENLLLYIDINGNLHPDSATLVSDIDITFLKKDAPYIVGDVVQEGVLTAVVIPTKKAGGTTEMLAKALRKVPTDNYITTYPGQGLNGYTVEEAKTVLKKCKSAFYILPSIISNEKQEILGTVSWNLREMLAHAEETRKLMPVCVETKAIVSTIQRKYKGIKIQEGVVDYGARFYFYTSKTTVASLINTLNDLNETLVTMPLGYVTHGLNLEEAARYMRSLKVPATVSVSSPDAVTAYNGYLTSSSKTPEEHFIETISLAGSYKDWSYSGQSTQLGIEFLKRGDKSVYYTSNPTTFHLDGEVITFDNLKTLLSLREVRTIKVFTTVDNINLHTQVVDMSMTYGQQFGPTYLDGADVTKIKPHNSHEGKTFYVLPNDDTLRVEAFEYYHTTDPSFLGRYMSALNHTKKWKYPQVNGLTSIKWADNNCYLATALLTLQQIELKFNPPALQDAYYRARAGEAANFCALILAYCNKTVGELGDVRETMSYLFQHANLDSCKRVLNVVCKTCGQQQTTLKGVEAVMYMGTLSYEQFKKGVQIPCTCGKQATKYLVQQESPFVMMSAPPAQYELKHGTFTCASEYTGNYQCGHYKHITSKETLYCIDGALLTKSSEYKGPITDVFYKENSYTTTIKPVTYKLDGVVCTEIDPKLDNYYKKDNSYFTEQPIDLVPNQPYPNASFDNFKFVCDNIKFADDLNQLTGYKKPASRELKVTFFPDLNGDVVAIDYKHYTPSFKKGAKLLHKPIVWHVNNATNKATYKPNTWCIRCLWSTKPVETSNSFDVLKSEDAQGMDNLACEDLKPVSEEVVENPTIQKDVLECNVKTTEVVGDIILKPANNSLKITEEVGHTDLMAAYVDNSSLTIKKPNELSRVLGLKTLATHGLAAVNSVPWDTIANYAKPFLNKVVSTTTNIVTRCLNRVCTNYMPYFFTLLLQLCTFTRSTNSRIKASMPTTIAKNTVKSVGKFCLEASFNYLKSPNFSKLINIIIWFLLLSVCLGSLIYSTAVLGVLMSNLGMPSYCTGYREGYLNSTNVTIATYCTGSIPCSVCLSGLDSLDTYPSLETIQITISSFKWDLTAFGLVAEWFLAYILFTRFFYVLGLAAIMQLFFSYFAVHFISNSWLMWLIINLVQMAPISAMVRMYIFFASFYYVWKSYVHVVDGCNSSTCMMCYKRNRATRVECTTIVNGVRRSFYVYANGGKGFCKLHNWNCVNCDTFCAGSTFISDEVARDLSLQFKRPINPTDQSSYIVDSVTVKNGSIHLYFDKAGQKTYERHSLSHFVNLDNLRANNTKGSLPINVIVFDGKSKCEESSAKSASVYYSQLMCQPILLLDQALVSDVGDSAEVAVKMFDAYVNTFSSTFNVPMEKLKTLVATAEAELAKNVSLDNVLSTFISAARQGFVDSDVETKDVVECLKLSHQSDIEVTGDSCNNYMLTYNKVENMTPRDLGACIDCSARHINAQVAKSHNIALIWNVKDFMSLSEQLRKQIRSAAKKNNLPFKLTCATTRQVVNVVTTKIALKGG

SEQ ID NO: 16339 - protein, 1946 aa, Artificial Sequence
  SARS-CoV-2__MT451236.1__non-structural protein 3 (NSP3)
MAPTKVTFGDDTVIEVQGYKSVNITFELDERIDKVLNEKCSAYTVELGTEVNEFACVVADAVIKTLQPVSELLTPLGIDLDEWSMATYYLFDESGEFKLASHMYCSFYPPDEDEEEGDCEEEEFEPSTQYEYGTEDDYQGKPLEFGATSAALQPEEEQEEDWLDDDSQQTVGQQDGSKDNQTTTIQTIVEVQPQLEMELTPVVQTIEVNSFSGYLKLTDNVYIKNADIVEEAKKVKPTVVVNAANVYLKHGGGVAGALNKATNNAMQVESDDYIATNGPLKVGGSCVLSGHNLAKHCLHVVGPNVNKGEDIQLLKSAYENFNQHEVLLAPLLSAGIFGADPIHSLRVCVDTVRTNVYLAVFDKNLYDKLVSSFLEMKSEKQVEQKIAEIPKEEVKPFITESKPSVEQRKQDDKKIKACVEEVTTTLEETKFLTENLLLYIDINGNLHPDSATLVSDIDITFLKKDAPYIVGDVVQEGVLTAVVIPTKKAGGTTEMLAKALRKVPTDNYITTYPGQGLNGYTVEEAKTVLKKCKSAFYILPSIISNEKQEILGTVSWNLREMLAHAEETRKLMPVCVETKAIVSTIQRKYKGIKIQEGVVDYGARFYFYTSKTTVASLINTLNDLNETLVTMPLGYVTHGLNLEEAARYMRSLKVPATVSVSSPDAVTAYNGYLTSSSKTPEEHFIETISLAGSYKDWSYSGQSTQLGIEFLKRGDKSVYYTSNPTTFHLDGEVITFDNLKTLLSLREVRTIKVFTTVDNINLHTQVVDMSMTYGQQFGPTYLDGADVTKIKPHNSHEGKTFYVLPNDDTLRVEAFEYYHTTDPSFLGRYMSALNHTKKWKYPQVNGLTSIKWADNNCYLATALLTLQQIELKFNPPALQDAYYRARAGEAANFCALILAYCNKTVGELGDVRETMSYLFQHANLDSCKRVLNVVCKTCGQQQTTLKGVEAVMYMGTLSYEQFKKGVQIPCTCGKQATKYLVQQESPFVMMSAPPAQYELKHGTFTCASEYTGNYQCGHYKHITSKETLYCIDGALLTKSSEYKGPITDVFYKENSYTTTIKPVTYKLDGVVCTEIDPKLDNYYKKDNSYFTEQPIDLVPNQPYPNASFDNFKFVCDNIKFADDLNQLTGYKKPASRELKVTFFPDLNGDVVAIDYKHYTPSFKKGAKLLHKPIVWHVNNATNKATYKPNTWCIRCLWSTKPVETSNSFDVLKSEDAQGMDNLACEDLKPVSEEVVENPTIQKDVLECNVKTTEVVGDIILKPANNSLKITEEVGHTDLMAAYVDNSSLTIKKPNELSRVLGLKTLATHGLAAVNSVPWDTIANYAKPFLNKVVSTTTNIVTRCLNRVCTNYMPYFFTLLLQLCTFTRSTNSRIKASMPTTIAKNTVKSVGKFCLEASFNYLKSPNFSKLINIIIWFLLLSVCLGSLIYSTAALGVLMSNLGMPSYCTGYREGYLNSTNVTIATYCTGSIPCSVCLSGLDSLDTYPSLETIQITISSFKWDLTAFGLVAEWFLAYILFTRFFYVLGLAAIMQLFFSYFAVHFISNSWLMWLIINLVQMAPISAMVRMYIFFASFYYVWKSYVHVVDGCNSSTCMMCYKRNRATRVECTTIVNGVRRSFYVYANGGKGFCKLHNWNCVNCDTFCAGSTFISDEVARDLSLQFKRPINPTDQSSYIVDSVTVKNGSIHLYFDKAGQKTYERHSLSHFVNLDNLRANNTKGSLPINVIVFDGKSKCEESSAKSASVYYSQLMCQPILLLDQALVSDVGDSAEVAVKMFDAYVNTFSSTFNVPMEKLKTLVATAEAELAKNVSLDNVLSTFISAARQGFVDSDVETKDVVECLKLSHQSDIEVTGDSCNNYMLTYNKVENMTPRDLGACIDCSARHINAQVAKSHNIALIWNVKDFMSLSEQLRKQIRSAAKKNNLPFKLTCATTRQVVNVVTTKIALKGG

SEQ ID NO: 16340 - protein, 1946 aa, Artificial Sequence
  SARS-CoV-2__MT451238.1__non-structural protein 3 (NSP3)
MAPTKVTFGDDTVIEVQGYKSVNITFELDERIDKVLNEKCSAYTVELGTEVNEFACVVADAVIKTLQPVSELLTPLSIDLDEWSMATYYLFDESGEFKLASHMYCSFYPPDEDEEEGDCEEEEFEPSTQYEYGTEDDYQGKPLEFGATSAALQPEEEQEEDWLDDDSQQTVGQQDGSEDNQTTTIQTIVEVQPQLEMELTPVVQTIEVNSFSGYLKLTDNVYIKNADIVEEAKKVKPTVVVNAANVYLKHGGGVAGALNKATNNAMQVESDDYIATNGPLKVGGSCVLSGHNLAKHCLHVVGPNVNKGEDIQLLKSAYENFNQHEVLLAPLLSAGIFGADPIHSLRVCVDTVRTNVYLAVFDKNLYDKLVSSFLEMKSEKQVEQKIAEIPKEEVKPFITESKPSVEQRKQDDKKIKACVEEVTTTLEETKFLTENLLLYIDINGNLHPDSATLVSDIDITFLKKDAPYIVGDVVQEGVLTAVVIPTKKAGGTTEMLAKALRKVPTDNYITTYPGQGLNGYTVEEAKTVLKKCKSAFYILPSIISNEKQEILGTVSWNLREMLAHAEETRKLMPVCVETKAIVSTIQRKYKGIKIQEGVVDYGARFYFYTSKTTVASLINTLNDLNETLVTMPLGYVTHGLNLEEAARYMRSLKVPATVSVSSPDAVTAYNGYLTSSSKTPEEHFIETISLAGSYKDWSYSGQSTQLGIEFLKRGDKSVYYTSNPTTFHLDGEVITFDNLKTLLSLREVRTIKVFTTVDNINLHTQVVDMSMTYGQQFGPTYLDGADVTKIKPHNSHEGKTFYVLPNDDTLRVEAFEYYHTTDPSFLGRYMSALNHTKKWKYPQVNGLTSIKWADNNCYLATALLTLQQIELKFNPPALQDAYYRARAGEAANFCALILAYCNKTVGELGDVRETMSYLFQHANLDSCKRVLNVVCKTCGQQQTTLKGVEAVMYMGTLSYEQFKKGVQIPCTCGKQATKYLVQQESPFVMMSAPPAQYELKHGTFTCASEYTGNYQCGHYKHITSKETLYCIDGALLTKSSEYKGPITDVFYKENSYTTTIKPVTYKLDGVVCTEIDPKLDNYYKKDNSYFTEQPIDLVPNQPYPNASFDNFKFVCDNIKFADDLNQLTGYKKPASRELKVTFFPDLNGDVVAIDYKHYTPSFKKGAKLLHKPIVWHVNNATNKATYKPNTWCIRCLWSTKPVETSNSFDVLKSEDAQGMDNLACEDLKPVSEEVVENPTIQKDVLECNVKTTEVVGDIILKPANNSLKITEEVGHTDLMAAYVDNSSLTIKKPNELSRVLGLKTLATHGLAAVNSVPWDTIANYAKPFLNKVVSTTTNIVTRCLNRVCTNYMPYFFTLLLQLCTFTRSTNSRIKASMPTTIAKNTVKSVGKFCLEASFNYLKSPNFSKLINIIIWFLLLSVCLGSLIYSTAALGVLMSNLGMPSYCTGYREGYLNSTNVTIATYCTGSIPCSVCLSGLDSLDTYPSLETIQITISSFKWDLTAFGLVAEWFLAYILFTRFFYVLGLAAIMQLFFSYFAVHFISNSWLMWLIINLVQMAPISAMVRMYIFFASFYYVWKSYVHVVDGCNSSTCMMCYKRNRATRVECTTIVNGVRRSFYVYANGGKGFCKLHNWNCVNCDTFCAGSTFISDEVARDLSLQFKRPINPTDQSSYIVDSVTVKNGSIHLYFDKAGQKTYERHSLSHFVNLDNLRANNTKGSLPINVIVFDGKSKCEESSAKSASVYYSQLMCQPILLLDQALVSDVGDSAEVAVKMFDAYVNTFSSTFNVPMEKLKTLVATAEAELAKNVSLDNVLSTFISAARQGFVDSDVETKDVVECLKLSHQSDIEVTGDSCNNYMLTYNKVENMTPRDLGACIDCSARHINAQVAKSHNIALIWNVKDFMSLSEQLRKQIRSAAKKNNLPFKLTCATTRQVVNVVTTKIALKGG

SEQ ID NO: 16341 - protein, 1946 aa, Artificial Sequence
  SARS-CoV-2__MT451255.1__non-structural protein 3 (NSP3)
MAPTKVTFGDDTVIEVQGYKSVNITFELDERIDKVLNEKCSAYTVELGTEVNEFACVVADAVIKTLQPVSELLTPLGIDLDEWSMATYYLFDESGEFKLASHMYCSFYPPDEDEEEGDCEEEEFEPSTQYEYGTEDDYQGKPLEFGATSAALQPEEEQEEDWLDDDSQQTVGQQDGSEDNQTTTIQTIVEVQPQLEMELTPVVQTIEVNSFSGYLKLTDNVYIKNADIVEEAKKVKPTVVVNAANVYLKHGGGVAGALNKATNNAMQVESDDYIATNGPLKVGGSCVLSGHNLAKHCLHVVGPNVNKGEDIQLLKSAYENFNQHEVLLAPLLSAGIFGADPIHSLRVCVDTVRTNVYLAVFDKNLYDKLVSSFLEMKSEKQVEQKIAEIPKEEVKPFITESKPSVEQRKQDDKKIKACVEEVTTTLEETKFLTENLLLYIDINGNLHPDSATLVSDIDITFLKKDAPYIVGDVVQEGVLTAVVIPTKKAGGTTEMLAKALRKVPTDNYITTYPGQGLNGYTVEEAKTVLKKCKSAFYILPSIISNEKQEILGTVSWNLREMLAHAEETRKLMPVCVETKAIVSTIQRKYKGIKIQEGVVDYGARFYFYTSKTTVASLINTLNDLNETLVTMPLGYVTHGLNLEEAARYMRSLKVPATVSVSSPDAVTAYNGYLTSSSKTPEEHFIETISLAGSYKDWSYSGQSTQLGIEFLKRGDKSVYYTSNPTTFHLDGEVITFDNLKTLLSLREVRTIKVFTTVDNINLHTQVVDMSMTYGQQFGPTYLDGADVTKIKPHNSHEGKTFYVLPNDDTLRVEAFEYYHTTDPSFLGRYMSALNHTKKWKYPQVNGLTSIKWADNNCYLATALLTLQQIELKFNPPALQDAYYRARAGEAANFCALILAYCNKTVGELGDVRETMSYLFQHANLDSCKRVLNVVCKTCGQQQTTLKGVEAVMYMGTLSYEQFKKGVQIPCTCGKQATKYLVQQESPFVMMSAPPAQYELKHGTFTCASEYTGNYQCGHYKHITSKETLYCIDGALLTKSSEYKGPITDVFYKENSYTTTIKPVTYKLDGVVCTEIDPKLDNYYKKDNSYFTEQPIDLVPNQPYPNASFDNFKFVCDNIKFADDLNQLTGYKKPASRELKVTFFPDLNGDVVAIDYKHYTPSFKKGAKLLHKPIVWHVNNATNKATYKPNTWCIRCLWSTKPVETSNSFDVLKSEDAQGMDNLACEDLKPVSEEVVENPTIQKDVLECNVKTTEVVGDIILKPANNSLKITEEVGHTDLMAAYVDNSSLTIKKPNELSRVLGLKTLATHGLAAVNSVPWDTIANYAKPFLNKVVSTTTNIVTRCLNRVCTNYMPYFFTLLLQLCTFTRSTNSRIKASMPTTIAKNTVKSVGKFCLEASFNYLKSPNFFKLINIIIWFLLLSVCLGSLIYSTAALGVLMSNLGMPSYCTGYREGYLNSTNVTIATYCTGSIPCSVCLSGLDSLDTYPSLETIQITISSFKWDLTAFGLVAEWFLAYILFTRFFYVLGLAAIMQLFFSYFAVHFISNSWLMWLIINLVQMAPISAMVRMYIFFASFYYVWKSYVHVVDGCNSSTCMMCYKRNRATRVECTTIVNGVRRSFYVYANGGKGFCKLHNWNCVNCDTFCAGSTFISDEVARDLSLQFKRPINPTDQSSYIVDSVTVKNGSIHLYFDKAGQKTYERHSLSHFVNLDNLRANNTKGSLPINVIVFDGKSKCEESSAKSASVYYSQLMCQPILLLDQALVSDVGDSAEVAVKMFDAYVNTFSSTFNVPMEKLKTLVATAEAELAKNVSLDNVLSTFISAARQGFVDSDVETKDVVECLKLSHQSDIEVTGDSCNNYMLTYNKVENMTPRDLGACIDCSARHINAQVAKSHNIALIWNVKDFMSLSEQLRKQIRSAAKKNNLPFKLTCATTRQVVNVVTTKIALKGG

SEQ ID NO: 16342 - protein, 1946 aa, Artificial Sequence
  SARS-CoV-2__MT451356.1__non-structural protein 3 (NSP3)
MAPTKVTFGDDTVIEVQGYKSVNITFELDERIDKVLNEKCSAYTVELGTEVNEFACVVADAVIKTLQPVSELLTPLGIDLDEWSMATYYLFDESGEFKLASHMYCSFYPPDEDEEEGDCEEEEFEPSTQYEYGTEDDYQGKPLEFGATSAALQPEEEQEEDWLDDDSQQTVGQQDGSEDNQTTTIQTIVEVQPQLEMELTPVVQTIEVNSFSGYLKLTDNVYIKNADIVEEAKKVKPTVVVNAANVYLKHGGGVAGALNKATNNAMQVESDDYIATNGPLKVGGSCVLSGHNLAKHCLHVVGPNVNKGEDIQLLKSAYENFNQHEVLLAPLLSAGIFGADPIHSLRVCVDTVRTNVYLAVFDKNLYDKLVSSFLEMKSEKQVEQKIAEIPKEEVKPFITESKPSVEQRKQDDKKIKACVEEVTTTLEETKFLTENLLLYIDINGNLHPDSATLVSDIDITFLKKDAPYIVGDVVQEGVLTAVVIPTKKAGGTTEMLAKALRKVPTDNYITTYPGQGLNGYTVEEAKTVLKKCKSAFYILPSIISNEKQEILGTVSWNLREMLAHAEETRKLMPVCVETKAIVSTIQRKYKGIKIQEGVVDYGARFYFYTSKTTVASLINTLNDLNETLVTMPLGYVTHGLNLEEAARYMRSLKVPATVSVSSPDAVTAYNGYLTSSSKTPEEHFIETISLAGSYKDWSYSGQSTQLGIEFLKRGDKSVYYTSNPTTFHLDGEVITFDNLKTLLSLREVRTIKVFTTVDNINLHTQVVDMSMTYGQQFGPTYLDGADVTKIKPHNSHEGKTFYVLPNDDTLRVEAFEYYHTTDPSFLGRYMSALNHTKKWKYPQVNGLTSIKWADNNCYLATALLTLQQIELKFNPPALQDAYYRARAGEAANFCALILAYCNKTVGELGDVRETMSYLFQHANLDSCKRVLNVVCKTCGQQQTTLKGVEAVMYMGTLSYEQFKKGVQIPCTCGKQATKYLVQQESPFVMMSAPPAQYELKHGTFTCASEYTGNYQCGHYKHITSKETLYCIDGALLTKSSEYKGPITDVFYKENSYTTTIKPVTYKLDGVVCTEIDPKLDNYYKKDNSYFTEQPIDLVPNQPYPNASFDNFKFVCDNIKFADDLNQLTGYKKPASRELKVTFFPDLNGDVVAIDYKHYTPSFKKGAKLLHKPIVWHVNNATNKATYKPNTWCIRCLWSTKPVETSNSFDVLKSEDAQGMDNLACEDLKPVSEEVVENPTIQKDVLECNVKTTEVVGDIILKPANNSLKITEEVGHTDLMAAYVDNSSLTIKKPNELSRVLGLKTLATHGLAAVNSVPWDTIANYAKPFLNKVVSTITNIVTRCLNRVCTNYMPYFFTLLLQLCTFTRSTNSRIKASMPTTIAKNTVKSVGKFCLEASFNYLKSPNFSKLINIIIWFLLLSVCLGSLIYSTAALGVLMSNLGMPSYCTGYREGYLNSTNVTIATYCTGSIPCSVCLSGLDSLDTYPSLETIQITISSFKWDLTAFGLVAEWFLAYILFTRFFYVLGLAAIMQLFFSYFAVHFISNSWLMWLIINLVQMAPISAMVRMYIFFASFYYVWKSYVHVVDGCNSSTCMMCYKRNRATRVECTTIVNGVRRSFYVYANGGKGFCKLHNWNCVNCDTFCAGSTFISDEVARDLSLQFKRPINPTDQSSYIVDSVTVKNGSIHLYFDKAGQKTYERHSLSHFVNLDNLRANNTKGSLPINVIVFDGKSKCEESSAKSASVYYSQLMCQPILLLDQALVSDVGDSAEVAVKMFDAYVNTFSSTFNVPMEKLKTLVATAEAELAKNVSLDNVLSTFISAARQGFVDSDVETKDVVECLKLSHQSDIEVTGDSCNNYMLTYNKVENMTPRDLGACIDCSARHINAQVAKSHNIALIWNVKDFMSLSEQLRKQIRSAAKKNNLPFKLTCATTRQVVNVVTTKIALKGG

SEQ ID NO: 16343 - protein, 1946 aa, Artificial Sequence
  SARS-CoV-2__MT451466.1__non-structural protein 3 (NSP3)
MAPTKVTFGDDTVIEVQGYKSVNITFELDERIDKVLNEKCSAYTVELGTEVNEFACVVTDAVIKTLQPVSELLTPLGIDLDEWSMATYYLFDESGEFKLASHMYCSFYPPDEDEEEGDCEEEEFEPSTQYEYGTEDDYQGKPLEFGATSAALQPEEEQEEDWLDDDSQQTVGQQDGSEDNQTTTIQTIVEVQPQLEMELTPVVQTIEVNSFSGYLKLTDNVYIKNADIVEEAKKVKPTVVVNAANVYLKHGGGVAGALNKATNNAMQVESDDYIATNGPLKVGGSCVLSGHNLAKHCLHVVGPNVNKGEDIQLLKSAYENFNQHEVLLAPLLSAGIFGADPIHSLRVCVDTVRTNVYLAVFDKNLYDKLVSSFLEMKSEKQVEQKIAEIPKEEVKPFITESKPSVEQRKQDDKKIKACVEEVTTTLEETKFLTENLLLYIDINGNLHPDSATLVSDIDITFLKKDAPYIVGDVVQEGVLTAVVIPTKKAGGTTEMLAKALRKVPTDNYITTYPGQGLNGYTVEEAKTVLKKCKSAFYILPSIISNEKQEILGTVSWNLREMLAHAEETRKLMPVCVETKAIVSTIQRKYKGIKIQEGVVDYGARFYFYTSKTTVASLINTLNDLNETLVTMPLGYVTHGLNLEEAARYMRFLKVPATVSVSSPDAVTAYNGYLTSSSKTPEEHFIETISLAGSYKDWSYSGQSTQLGIEFLKRGDKSVYYTSNPTTFHLDGEVITFDNLKTLLSLREVRTIKVFTTVDNINLHTQVVDMSMTYGQQFGPTYLDGADVTKIKPHNSHEGKTFYVLPNDDTLRVEAFEYYHTTDPSFLGRYMSALNHTKKWKYPQVNGLTSIKWADNNCYLATALLTLQQIELKFNPPALQDAYYRARAGEAANFCALILAYCNKTVGELGDVRETMSYLFQHANLDSCKRVLNVVCKTCGQQQTTLKGVEAVMYMGTLSYEQFKKGVQIPCTCGKQATKYLVQQESPFVMMSAPPAQYELKHGTFTCASEYTGNYQCGHYKHITSKETLYCIDGALLTKSSEYKGPITDVFYKENSYTTTIKPVTYKLDGVVCTEIDPKLDNYYKKDNSYFTEQPIDLVPNQPYPNASFDNFKFVCDNIKFADDLNQLTGYKKPASRELKVTFFPDLNGDVVAIDYKHYTPSFKKGAKLLHKPIVWHVNNATNKATYKPNTWCIRCLWSTKPVETSNSFDVLKSEDAQGMDNLACEDLKPVSEEVVENPTIQKDVLECNVKTTEVVGDIILKPANNSLKITEEVGHTDLMAAYVDNSSLTIKKPNELSRVLGLKTLATHGLAAVNSVPWDTIANYAKPFLNKVVSTTTNIVTRCLNRVCTNYMPYFFTLLLQLCTFTRSTNSRIKASMPTTIAKNTVKSVGKFCLEASFNYLKSPNFSKLINIIIWFLLLSVCLGSLIYSTAALGVLMSNLGMPSYCTGYREGYLNSTNVTIATYCTGSIPCSVCLSGLDSLDTYPSLETIQITISSFKWDLTAFGLVAEWFLAYILFTRFFYVLGLAAIMQLFFSYFAVHFISNSWLMWLIINLVQMAPISAMVRMYIFFASFYYVWKSYVHVVDGCNSSTCMMCYKRNRATRVECTTIVNGVRRSFYVYANGGKGFCKLHNWNCVNCDTFCAGSTFISDEVARDLSLQFKRPINPTDQSSYIVDSVTVKNGSIHLYFDKAGQKTYERHSLSHFVNLDNLRANNTKGSLPINVIVFDGKSKCEESSAKSASVYYSQLMCQPILLLDQALVSDVGDSAEVAVKMFDAYVNTFSSTFNVPMEKLKTLVATAEAELAKNVSLDNVLSTFISAARQGFVDSDVETKDVVECLKLSHQSDIEVTGDSCNNYMLTYNKVENMTPRDLGACIDCSARHINAQVAKSHNIALIWNVKDFMSLSEQLRKQIRSAAKKNNLPFKLTCATTRQVVNVVTTKIALKGG

SEQ ID NO: 16344 - protein, 1946 aa, Artificial Sequence
  SARS-CoV-2__MT451470.1__non-structural protein 3 (NSP3)
MAPTKVTFGDDTVIEVQGYKSVNITFELDERIDKVLNEKCSAYTVELGTEVNEFACVVADAVIKTLQPVSELLTPLGIDLDEWSMATYYLFDESGEFKLASHMYCSFYPPDEDEEEGDCEEEEFEPSTQYEYGTEDDYQGKPLEFGATSAALQPEEEQEEDWLDDDSQQTVGQQDGSEDNQTTTIQTIVEVQPQLEMELTPVVQTIEVNSFSGYLKLTDNVYIKNADIVEEAKKVKPTVVVNAANVYLKHGGGVAGALNKATNNAMQVESDDYIATNGPLKVGGSCVLSGHNLAKHCLHVVGPNVNKGEDIQLLKSAYENFNQHEVLLAPLLSAGIFGADPIHSLRVCVDTVRTNVYLAVFDKNLYDKLVSSFLEMKSEKQVEQKIAEIPKEEVKPFITESKPSVEQRKQDDKKIKACVEEVTTTLEETKFLTENLLLYIDINGNLHPDSATLVSDIDITFLKKDAPYIVGDVVQEGVLTAVVIPTKKAGGTTEMLAKALRKVPTDNYITTYPGQGLNGYTVEEAKTVLKKCKSAFYILPSIISNEKQEILGTVSWNLREMLAHAEETRKLMPVCVETKAIVSTIQRKYKGIKIQEGVVDYGARFYFYTSKTTVASLINTLNDLNETLVTMPLGYVTHGLNLEEAARYMRSLKVPATVSVSSPDAVTAYNGYLTSSSKTPEEHFIETISLAGSYKDWSYSGQSTQLGIEFLKRGDKSVYYTSNPTTFHLDGEVITFDNLKTLLSLREVRTIKVFTTVDNINLHTQVVDMSMTYGQQFGPTYLDGADVTKIKPHNSHEGKTFYVLPNDDTLRVEAFEYYHTTDPSFLGRYMSALNHTKKWKYPQVNGLTSIKWADNNCYLATALLTLQQIELKFNPPALQDAYYRARAGEAANFCALILAYCNKTVGELGDVRETMSYLFQHANLDSCKRVLNVVCKTCGQQQITLKGVEAVMYMGTLSYEQFKKGVQIPCTCGKQATKYLVQQESPFVMMSAPPAQYELKHGTFTCASEYTGNYQCGHYKHITSKETLYCIDGALLTKSSEYKGPITDVFYKENSYTTTIKPVTYKLDGVVCTEIDPKLDNYYKKDNSYFTEQPIDLVPNQPYPNASFDNFKFVCDNIKFADDLNQLTGYKKPASRELKVTFFPDLNGDVVAIDYKHYTPSFKKGAKLLHKPIVWHVNNATNKATYKPNTWCIRCLWSTKPVETSNSFDVLKSEDAQGMDNLACEDLKPVSEEVVENPTIQKDVLECNVKTTEVVGDIILKPANNSLKITEEVGHTDLMAAYVDNSSLTIKKPNELSRVLGLKTLATHGLAAVNSVPWDTIANYAKPFLNKVVSTTTNIVTRCLNRVCTNYMPYFFTLLLQLCTFTRSTNSRIKASMPTTIAKNTVKSVGKFCLEASFNYLKSPNFSKLINIIIWFLLLSVCLGSLIYSTAALGVLMSNLGMPSYCTGYREGYLNSTNVTIATYCTGSIPCSVCLSGLDSLDTYPSLETIQITISSFKWDLTAFGLVAEWFLAYILFTRFFYVLGLAAIMQLFFSYFAVHFISNSWLMWLIINLVQMAPISAMVRMYIFFASFYYVWKSYVHVVDGCNSSTCMMCYKRNRATRVECTTIVNGVRRSFYVYANGGKGFCKLHNWNCVNCDTFCAGSTFISDEVARDLSLQFKRPINPTDQSSYIVDSVTVKNGSIHLYFDKAGQKTYERHSLSHFVNLDNLRANNTKGSLPINVIVFDGKSKCEESSAKSASVYYSQLMCQPILLLDQALVSDVGDSAEVAVKMFDAYVNTFSSTFNVPMEKLKTLVATAEAELAKNVSLDNVLSTFISAARQGFVDSDVETKDVVECLKLSHQSDIEVTGDSCNNYMLTYNKVENMTPRDLGACIDCSARHINAQVAKSHNIALIWNVKDFMSLSEQLRKQIRSAAKKNNLPFKLTCATTRQVVNVVTTKIALKGG

SEQ ID NO: 16345 - protein, 1946 aa, Artificial Sequence
  SARS-CoV-2__MT451708.1__non-structural protein 3 (NSP3)
MAPTKVTFGDDTVIEVQGYKSVNITFELDERIDKVLNEKCSAYTVELGTEVNEFACVVADAVIKTLQPVSELLTPLGIDLDEWSMATYYLFDESGEFKLASHMYCSFYPPDEDEEEGDCEEEEFEPSTQYEYGTEDDYQGKPLEFGATSAALQPEEEQEEDWLDDDSQQTVGQQDGSEDNQITTIQTIVEVQPQLEMELTPVVQTIEVNSFSGYLKLTDNVYIKNADIVEEAKKVKPTVVVNAANVYLKHGGGVAGALNKATNNAMQVESDDYIATNGPLKVGGSCVLSGHNLAKHCLHVVGPNVNKGEDIQLLKSAYENFNQHEVLLAPLLSAGIFGADPIHSLRVCVDTVRTNVYLAVFDKNLYDKLVSSFLEMKSEKQVEQKIAEIPKEEVKPFITESKPSVEQRKQDDKKIKACVEEVTTTLEETKFLTENLLLYIDINGNLHPDSATLVSDIDITFLKKDAPYIVGDVVQEGVLTAVVIPTKKAGGTTEMLAKALRKVPTDNYITTYPGQGLNGYTVEEAKTVLKKCKSAFYILPSIISNEKQEILGTVSWNLREMLAHAEETRKLMPVCVETKAIVSTIQRKYKGIKIQEGVVDYGARFYFYTSKTTVASLINTLNDLNETLVTMPLGYVTHGLNLEEAARYMRSLKVPATVSVSSPDAVTAYNGYLTSSSKTPEEHFIETISLAGSYKDWSYSGQSTQLGIEFLKRGDKSVYYTSNPTTFHLDGEVITFDNLKTLLSLREVRTIKVFTTVDNINLHTQVVDMSMTYGQQFGPTYLDGADVTKIKPHNSHEGKTFYVLPNDDTLRVEAFEYYHTTDPSFLGRYMSALNHTKKWKYPQVNGLTSIKWADNNCYLATALLTLQQIELKFNPPALQDAYYRARAGEAANFCALILAYCNKTVGELGDVRETMSYLFQHANLDSCKRVLNVVCKTCGQQQTTLKGVEAVMYMGTLSYEQFKKGVQIPCTCGKQATKYLVQQESPFVMMSAPPAQYELKHGTFTCASEYTGNYQCGHYKHITSKETLYCIDGALLTKSSEYKGPITDVFYKENSYTTTIKPVTYKLDGVVCTEIDPKLDNYYKKDNSYFTEQPIDLVPNQPYPNASFDNFKFVCDNIKFADDLNQLTGYKKPASRELKVTFFPDLNGDVVAIDYKHYTPSFKKGAKLLHKPIVWHVNNATNKATYKPNTWCIRCLWSTKPVETSNSFDVLKSEDAQGMDNLACEDLKPVSEEVVENPTIQKDVLECNVKTTEVVGDIILKPANNSLKITEEVGHTDLMAAYVDNSSLTIKKPNELSRVLGLKTLATHGLAAVNSVPWDTIANYAKPFLNKVVSTTTNIVTRCLNRVCTNYMPYFFTLLLQLCTFTRSTNSRIKASMPTTIAKNTVKSVGKFCLEASFNYLKSPNFSKLINIIIWFLLLSVCLGSLIYSTAALGVLMSNLGMPSYCTGYREGYLNSTNVTIATYCTGSIPCSVCLSGLDSLDTYPSLETIQITISSFKWDLTAFGLVAEWFLAYILFTRFFYVLGLAAIMQLFFSYFAVHFISNSWLMWLIINLVQMAPISAMVRMYIFFASFYYVWKSYVHVVDGCNSSTCMMCYKRNRATRVECTTIVNGVRRSFYVYANGGKGFCKLHNWNCVNCDTFCAGSTFISDEVARDLSLQFKRPINPTDQSSYIVDSVTVKNGSIHLYFDKAGQKTYERHSLSHFVNLDNLRANNTKGSLPINVIVFDGKSKCEESSAKSASVYYSQLMCQPILLLDQALVSDVGDSAEVAVKMFDAYVNTFSSTFNVPMEKLKTLVATAEAELAKNVSLDNVLSTFISAARQGFVDSDVETKDVVECLKLSHQSDIEVTGDSCNNYMLTYNKVENMTPRDLGACIDCSARHINAQVAKSHNIALIWNVKDFMSLSEQLRKQIRSAAKKNNLPFKLTCATTRQVVNVVTTKIALKGG

SEQ ID NO: 16346 - protein, 1946 aa, Artificial Sequence
  SARS-CoV-2__MT452576.1__non-structural protein 3 (NSP3)
MAPTKVTFGDDTVIEVQGYKSVNITFELDERIDKVLNEKCSAYTVELGTEVNEFACVVADAVIKTLQPVSELLTPLGIDLDEWSMATYYLFDESGEFKLASHMYCSFYPPDEDEEEGDCEEEEFEPSTQYEYGTEDDYQGKPLEFGATSAALQPEEEQEEDWLDDDSQQTVGQQDGSEDNQTTTIQTIVEVQPQLEMELTPVVQTIEVNSFSGYLKLTDNVYIKNADIVEEAKKVKPTVVVNAANVYLKHGGGVAGALNKATNNAMQVESDDYIATNGPLKVGGSCVLSGHNLAKHCLHVVGPNVNKGEDIQLLKSAYENFNQHEVLLAPLLSAGIFGADPIHSLRVCVDTVRTNVYLAVFDKNLYDKLVSSFLEMKSEKQVEQKIAEIPKEEVKPFITESKPSVEQRKQDDKKIKACVEEVTTTLEETKFLTENLLLYIDINGNLHPDSATLVSDIDITFLKKDAPYIVGDVVQEGVLTAVVIPTKKAGGTTEMLAKALRKVPTDNYITTYPGQGLNGYTVDEAKTVLKKCKSAFYILPSIISNEKQEILGTVSWNLREMLAHAEETRKLMPVCVETKAIVSTIQRKYKGIKIQEGVVDYGARFYFYTSKTTVASLINTLNDLNETLVTMPLGYVTHGLNLEEAARYMRSLKVPATVSVSSPDAVTAYNGYLTSSSKTPEEHFIETISLAGSYKDWSYSGQSTQLGIEFLKRGDKSVYYTSNPTTFHLDGEVITFDNLKTLLSLREVRTIKVFTTVDNINLHTQVVDMSMTYGQQFGPTYLDGADVTKIKPHNSHEGKTFYVLPNDDTLRVEAFEYYHTTDPSFLGRYMSALNHTKKWKYPQVNGLTSIKWADNNCYLATALLTLQQIELKFNPPALQDAYYRARAGEAANFCALILAYCNKTVGELGDVRETMSYLFQHANLDSCKRVLNVVCKTCGQQQTTLKGVEAVMYMGTLSYEQFKKGVQIPCTCGKQATKYLVQQESPFVMMSAPPAQYELKHGTFTCASEYTGNYQCGHYKHITSKETLYCIDGALLTKSSEYKGPITDVFYKENSYTTTIKPVTYKLDGVVCTEIDPKLDNYYKKDNSYFTEQPIDLVPNQPYPNASFDNFKFVCDNIKFADDLNQLTGYKKPASRELKVTFFPDLNGDVVAIDYKHYTPSFKKGAKLLHKPIVWHVNNATNKATYKPNTWCIRCLWSTKPVETSNSFDVLKSEDAQGMDNLACEDLKPVSEEVVENPTIQKDVLECNVKTTEVVGDIILKPANNSLKITEEVGHTDLMAAYVDNSSLTIKKPNELSRVLGLKTLATHGLAAVNSVPWDTIANYAKPFLNKVVSTTTNIVTRCLNRVCTNYMPYFFTLLLQLCTFTRSTNSRIKASMPTTIAKNTVKSVGKFCLEASFNYLKSPNFSKLINIIIWFLLLSVCLGSLIYSTAALGVLMSNLGMPSYCTGYREGYLNSTNVTIATYCTGSIPCSVCLSGLDSLDTYPSLETIQITISSFKWDLTAFGLVAEWFLAYILFTRFFYVLGLAAIMQLFFSYFAVHFISNSWLMWLIINLVQMAPISAMVRMYIFFASFYYVWKSYVHVVDGCNSSTCMMCYKRNRATRVECTTIVNGVRRSFYVYANGGKGFCKLHNWNCVNCDTFCAGSTFISDEVARDLSLQFKRPINPTDQSSYIVDSVTVKNGSIHLYFDKAGQKTYERHSLSHFVNLDNLRANNTKGSLPINVIVFDGKSKCEESSAKSASVYYSQLMCQPILLLDQALVSDVGDSAEVAVKMFDAYVNTFSSTFNVPMEKLKTLVATAEAELAKNVSLDNVLSTFISAARQGFVDSDVETKDVVECLKLSHQSDIEVTGDSCNNYMLTYNKVENMTPRDLGACIDCSARHINAQVAKSHNIALIWNVKDFMSLSEQLRKQIRSAAKKNNLPFKLTCATTRQVVNVVTTKIALKGG

SEQ ID NO: 16347 - protein, 1946 aa, Artificial Sequence
  SARS-CoV-2__MT446312.1__non-structural protein 3 (NSP3)
MAPTKVTFGDDTVIEVQGYKSVNITFELDERIDKVLNEKCSAYTVELGTEVNEFACVVADAVIKTLQPVSELLTPLGIDLDEWSMATYYLFDESGEFKLASHMYCSFYPPDEDEEEGDCEEEEFEPSTQYEYGTEDDYQGKPLEFGATSAALQPEEEQEEDWLDDDSQQTVGQQDGSEDNQTTTIQTIVEVQPQLEMELTPVVQTIEVNSFSGYLKLTDNVYIKNADIVEEAKKVKPTVVVNAANVYLKHGGGVAGALNKATNNAMQVESDDYIATNGPLKVGGSCVLSGHNLAKHCLHVVGPNVNKGEDIQLLKSAYENFNQHEVLLAPLLSAGIFGADPIHSLRVCVDTVRTNVYLAVFDKNLYDKLVSSFLEMKSEKQVEQKIAEIPKEEVKPFITESKPSVEQRKQDDKKIKACVEEVTTTLEETKFLTENLLLYIDINGNLHPDSATLVSDIDITFLKKDAPYIVGDVVQEGVLTAVVIPTKKAGGTTEMLAKALRKVPTDNYITTYPGQGLNGYTVEEAKTVLKKCKSAFYILPSIISNEKQEILGTVSWNLREMLAHAEETRKLMPVCVETKAIVSTIQRKYKGIKIQEGVVDYGARFYFYTSKTTVASLINTLNDLNETLVTMPLGYVTHGLNLEEAARYMRSLKVPATVSVSSPDAVTAYNGYLTSSSKTPEEHFIETISLAGSYKDWSYSGQSTQLGIEFLKRGDKSVYYTSNPTTFHLDGEVITFDNLKTLLSLREVRTIKVFTTVDNINLHTQVVDMSMTYGQQFGPTYLDGADVTKIKPHNSHEGKTFYVLPNDDTLRVEAFEYYHTTDPSFLGRYMSALNHTKKWKYPQVNGLTSIKWADNNCYLATALLTLQQIELKFNPPALQDAYYRARAGEAANFCALILAYCNKTVGELGDVRETMSYLFQHANLDSCKRVLNVVCKTCGQQQTTLKGVEAVMYMGTLSYEQFKKGVQIPCTCGKQATKYLVQQESPFVMMSAPPAQYELKHGTFTCASEYTGNYQCGHYKHITSKETLYCIDGALLTKSSEYKGPITDVFYKENSYTTTIKPVTYKLDGVVCTEIDPKLDNYYKKDNSYFTEQPIDLVPNQPYPNASFDNFKFVCDNIKFADDLNQLTGYKKPASRELKVTFFPDLNGDVVAIDYKHYTPSFKKGAKLLHKPIVWHVNNATNKATYKPNTWCIRCLWSTKPVETSNSFDVLKSEDAQGMDNLACEDLKPVSEEVVENPTIQKDVLECNVKTTEVVGDIILKPANNSLKITEEVGHTDLMAAYVDNSSLTIKKPNELSRVLGLKTLATHGLAAVNSVPWDTIANYAKPFLNKVVSTTTNIVTRCLNRVCTNYMPYFFTLLLQLCTFTRITNSRIKASMPTTIAKNTVKSVGKFCLEASFNYLKSPNFSKLINIIIWFLLLSVCLGSLTYSTAALGVLMSNLGMPSYCTGYREGYLNSTNVTIATYCTGSIPCSVCLSGLDSLDTYPSLETIQITISSFKWDLTAFGLVAEWFLAYILFTRFFYVLGLAAIMQLFFSYFAVHFISNSWLMWLIINLVQMAPISAMVRMYIFFASFYYVWKSYVHVVDGCNSSTCMMCYKRNRATRVECTTIVNGVRRSFYVYANGGKGFCKLHNWNCVNCDTFCAGSTFISDEVARDLSLQFKRPINPTDQSSYIVDSVTVKNGSIHLYFDKAGQKTYERHSLSHFVNLDNLRANNTKGSLPINVIVFDGKSKCEESSAKSASVYYSQLMCQPILLLDQALVSDVGDSAEVAVKMFDAYVNTFSSTFNVPMEKLKTLVATAEAELAKNVSLDNVLSTFISAARQGFVDSDVETKDVVECLKLSHQSDIEVTGDSCNNYMLTYNKVENMTPRDLGACIDCSARHINAQVAKSHNIALIWNVKDFMSLSEQLRKQIRSAAKKNNLPFKLTCATTRQVVNVVTTKIALKGG

SEQ ID NO: 16348 - protein, 1946 aa, Artificial Sequence
  SARS-CoV-2__MT446357.1__non-structural protein 3 (NSP3)
MAPTKVTFGDDTVIEVQGYKSVNITFELDERIDKVLNEKCSAYTVELGTEVNEFACVVADAVIKTLQPVSELLTPLGIDLDEWSMATYYLFDESGEFKLASHMYCSFYPPDEDEEEGDCEEEEFEPSTQYEYGTEDDYQGKPLEFGATSAALQPEEEQEEDWLDDDSQQTVGQQDGSEDNQTTTIQTIVEVQPQLEMELTPVVQTIEVNSFSGYLKLTDNVYIKNADIVEEAKKVKPTVVVNAANVYLKHGGGVAGALNKATNNAMQVESDDYIATNGPLKVGGSCVLSGHNLAKHCLHVVGPNVNKGEDIQLLKSAYENFNQHEVLLAPLLSAGIFGADPIHSLRVCVDTVRTNVYLAVFDKNLYDKLVSSFLEMKSEKQVEQKIAEIPKEEVKPFITESKPSVEQRKQDDKKIKACVEEVTTTLEETKFLTENLLLYIDINGNLHPDSATLVSDIDITFLKKDAPYIVGDVVQEGVLTAVVIPTKKAGGTTEMLAKALREVPTDNYITTYPGQGLNGYTVEEAKTVLKKCKSAFYILPSIISNEKQEILGTVSWNLREMLAHAEETRKLMPVCVETKAIVSTIQRKYKGIKIQEGVVDYGARFYFYTSKTTVASLINTLNDLNETLVTMPLGYVTHGLNLEEAARYMRSLKVPATVSVSSPDAVTAYNGYLTSSSKTPEEHFIETISLAGSYKDWSYSGQSTQLGIEFLKRGDKSVYYTSNPTTFHLDGEVITFDNLKTLLSLREVRTIKVFTTVDNINLHTQVVDMSMTYGQQFGPTYLDGADVTKIKPHNSHEGKTFYVLPNDDTLRVEAFEYYHTTDPSFLGRYMSALNHTKKWKYPQVNGLTSIKWADNNCYLATALLTLQQIELKFNPPALQDAYYRARAGEAANFCALILAYCNKTVGELGDVRETMSYLFQHANLDSCKRVLNVVCKTCGQQQTTLKGVEAVMYMGTLSYEQFKKGVQIPCTCGKQATKYLVQQESPFVMMSAPPAQYELKHGTFTCASEYTGNYQCGHYKHITSKETLYCIDGALLTKSSEYKGPITDVFYKENSYTTTIKPVTYKLDGVVCTEIDPKLDNYYKKDNSYFTEQPIDLVPNQPYPNASFDNFKFVCDNIKFADDLNQLTGYKKPASRELKVTFFPDLNGDVVAIDYKHYTPSFKKGAKLLHKPIVWHVNNATNKATYKPNTWCIRCLWSTKPVETSNSFDVLKSEDAQGMDNLACEDLKPVSEEVVENPTIQKDVLECNVKTTEVVGDIILKPANNSLKITEEVGHTDLMAAYVDNSSLTIKKPNELSRVLGLKTLATHGLAAVNSVPWDTIANYAKPFLNKVVSTTTNIVTRCLNRVCTNYMPYFFTLLLQLCTFTRSTNSRIKASMPTTIAKNTVKSVGKFCLEASFNYLKSPNFSKLINIIIWFLLLSVCLGSLIYSTAALGVLMSNLGMPSYCTGYREGYLNSTNVTIATYCTGSIPCSVCLSGLDSLDTYPSLETIQITISSFKWDLTAFGLVAEWFLAYILFTRFFYVLGLAAIMQLFFSYFAVHFISNSWLMWLIINLVQMAPISAMVRMYIFFASFYYVWKSYVHVVDGCNSSTCMMCYKRNRATRVECTTIVNGVRRSFYVYANGGKGFCKLHNWNCVNCDTFCAGSTFISDEVARDLSLQFKRPINPTDQSSYIVDSVTVKNGSIHLYFDKAGQKTYERHSLSHFVNLDNLRANNTKGSLPINVIVFDGKSKCEESSAKSASVYYSQLMCQPILLLDQALVSDVGDSAEVAVKMFDAYVNTFSSTFNVPMEKLKTLVATAEAELAKNVSLDNVLSTFISAARQGFVDSDVETKDVVECLKLSHQSDIEVTGDSCNNYMLTYNKVENMTPRDLGACIDCSARHINAQVAKSHNIALIWNVKDFMSLSEQLRKQIRSAAKKNNLPFKLTCATTRQVVNVVTTKIALKGG

SEQ ID NO: 16349 - protein, 1946 aa, Artificial Sequence
  SARS-CoV-2__MT447165.1__non-structural protein 3 (NSP3)
MAPTKVTFGDDTVIEVQGYKSVNITFELDERIDKVLNEKCSAYTVELGTEVNEFACVVADAVIKTLQPVSELLTPLGIDLDEWSMATYYLFDESGEFKLASHMYCSFYPPDEDEEEGDCEEEEFEPSTQYEYGTEDDYQGKPLEFGATSAALQPEEEQEEDWLDDDSQQTVGQQDGSEDNQTTTIQTIVEVQPQLEMELTPVVQTIEVNSFSGYLKLTDNVYIKNADIVEEAKKVKPTVVVNAANVYLKHGGGVAGALNKATNNAMQVESDDYIATNGPLKVGGSCVLSGHNLAKHCLHVVGPNVNKGEDIQLLKSAYENFNQHEVLLAPLLSAGIFGADPIHSLRVCVDTVRTNVYLAVFDKNLYDKLVSSFLEMKSEKQVEQKIAEIPKEEVKPFITESKPSVEQRKQDDKKIKACVEEVTTTLEETKFLTENLLLYIDINGNLHPDSATLVSDIDITFLKKDAPYIVGDVVQEGVLTAVVIPTKKAGGTTEMLAKALRKVPTDNYITTYPGQGLNGYTVEEAKTVLKKCKSAFYILPSIISNEKQEILGTVSWNFREMLAHAEETRKLMPVCVETKAIVSTIQRKYKGIKIQEGVVDYGARFYFYTSKTTVASLINTLNDLNETLVTMPLGYVTHGLNLEEAARYMRSLKVPATVSVSSPDAVTAYNGYLTSSSKTPEEHFIETISLAGSYKDWSYSGQSTQLGIEFLKRGDKSVYYTSNPTTFHLDGEVITFDNLKTLLSLREVRTIKVFTTVDNINLHTQVVDMSMTYGQQFGPTYLDGADVTKIKPHNSHEGKTFYVLPNDDTLRVEAFEYYHTTDPSFLGRYMSALNHTKKWKYPQVNGLTSIKWADNNCYLATALLTLQQIELKFNPPALQDAYYRARAGEAANFCALILAYCNKTVGELGDVRETMSYLFQHANLDSCKRVLNVVCKTCGQQQTTLKGVEAVMYMGTLSYEQFKKGVQIPCTCGKQATKYLVQQESPFVMMSAPPAQYELKHGTFTCASEYTGNYQCGHYKHITSKETLYCIDGALLTKSSEYKGPITDVFYKENSYTTTIKPVTYKLDGVVCTEIDPKLDNYYKKDNSYFTEQPIDLVPNQPYPNASFDNFKFVCDNIKFADDLNQLTGYKKPASRELKVTFFPDLNGDVVAIDYKHYTPSFKKGAKLLHKPIVWHVNNATNKATYKPNTWCIRCLWSTKPVETSNSFDVLKSEDAQGMDNLACEDLKPVSEEVVENPTIQKDVLECNVKTTEVVGDIILKPANNSLKITEEVGHTDLMAAYVDNSSLTIKKPNELSRVLGLKTLATHGLAAVNSVPWDTIANYAKPFLNKVVSTTTNIVTRCLNRVCTNYMPYFFTLLLQLCTFTRSTNSRIKASMPTTIANNTVKSVGKFCLEASFNYLKSPNFSKLINIIIWFLLLSVCLGSLIYSTAALGVLMSNLGMPSYCTGYREGYLNSTNVTIATYCTGSIPCSVCLSGLDSLDTYPSLETIQITISSFKWDLTAFGLVAEWFLAYILFTRFFYVLGLAAIMQLFFSYFAVHFISNSWLMWLIINLVQMAPISAMVRMYIFFASFYYVWKSYVHVVDGCNSSTCMMCYKRNRATRVECTTIVNGVRRSFYVYANGGKGFCKLHNWNCVNCDTFCAGSTFISDEVARDLSLQFKRPINPTDQSSYIVDSVTVKNGSIHLYFDKAGQKTYERHSLSHFVNLDNLRANNTKGSLPINVIVFDGKSKCEESSAKSASVYYSQLMCQPILLLDQALVSDVGDSAEVAVKMFDAYVNTFSSTFNVPMEKLKTLVATAEAELAKNVSLDNVLSTFISAARQGFVDSDVETKDVVECLKLSHQSDIEVTGDSCNNYMLTYNKVENMTPRDLGACIDCSARHINAQVAKSHNIALIWNVKDFMSLSEQLRKQIRSAAKKNNLPFKLTCATTRQVVNVVTTKIALKGG

SEQ ID NO: 16350 - protein, 1946 aa, Artificial Sequence
  SARS-CoV-2__MT447171.1__non-structural protein 3 (NSP3)
MAPTKVTFGDDTVIEVQGYKSVNITFELDERIDKVLNEKCSAYTVELGTEVNEFACVVADAVIKTLQPVSELLTPLGIDLDEWSMATYYLFDESGEFKLASHMYCSFYPPDEDEEEGDCEEEEFEPSTQYEYGTEDDYQGKPLEFGATSAALQPEEEQEEDWLDDDSQQTVGQQDGSEDNQTTTIQTIVEVQPQLEMELTPVVQTIEVNSFSGYLKLTDNVYIKNADIVEEAKKVKPTVVVNAANVYLKHGGGVAGALNKATNNAMQVESDDYIATNGPLKVGGSCVLSGHNLAKHCLHVVGPNVNKGEDIQLLKSAYENFNQHEVLLAPLLSAGIFGADPIHSLRVCVDIVRTNVYLAVFDKNLYDKLVSSFLEMKSEKQVEQKIAEIPKEEVKPFITESKPSVEQRKQDDKKIKACVEEVTTTLEETKFLTENLLLYIDINGNLHPDSATLVSDIDITFLKKDAPYIVGDVVQEGVLTAVVIPTKKAGGTTEMLAKALRKVPTDNYITTYPGQGLNGYTVEEAKTVLKKCKSAFYILPSIISNEKQEILGTVSWNFREMLAHAEETRKLMPVCVETKAIVSTIQRKYKGIKIQEGVVDYGARFYFYTSKTTVASLINTLNDLNETLVTMPLGYVTHGLNLEEAARYMRSLKVPATVSVSSPDAVTAYNGYLTSSSKTPEEHFIETISLAGSYKDWSYSGQSTQLGIEFLKRGDKSVYYTSNPTTFHLDGEVITFDNLKTLLSLREVRTIKVFTTVDNINLHTQVVDMSMTYGQQFGPTYLDGADVTKIKPHNSHEGKTFYVLPNDDTLRVEAFEYYHTTDPSFLGRYMSALNHTKKWKYPQVNGLTSIKWADNNCYLATALLTLQQIELKFNPPALQDAYYRARAGEAANFCALILAYCNKTVGELGDVRETMSYLFQHANLDSCKRVLNVVCKTCGQQQTTLKGVEAVMYMGTLSYEQFKKGVQIPCTCGKQATKYLVQQESPFVMMSAPPAQYELKHGTFTCASEYTGNYQCGHYKHITSKETLYCIDGALLTKSSEYKGPITDVFYKENSYTTTIKPVTYKLDGVVCTEIDPKLDNYYKKDNSYFTEQPIDLVPNQPYPNASFDNFKFVCDNIKFADDLNQLTGYKKPASRELKVTFFPDLNGDVVAIDYKHYTPSFKKGAKLLHKPIVWHVNNATNKATYKPNTWCIRCLWSTKPVETSNSFDVLKSEDAQGMDNLACEDLKPVSEEVVENPTIQKDVLECNVKTTEVVGDIILKPANNSLKITEEVGHTDLMAAYVDNSSLTIKKPNELSRVLGLKTLATHGLAAVNSVPWDTIANYAKPFLNKVVSTTTNIVTRCLNRVCTNYMPYFFTLLLQLCTFTRSTNSRIKASMPTTIAKNTVKSVGKFCLEASFNYLKSPNFSKLINIIIWFLLLSVCLGSLIYSTAALGVLMSNLGMPSYCTGYREGYLNSTNVTIATYCTGSIPCSVCLSGLDSLDTYPSLETIQITISSFKWDLTAFGLVAEWFLAYILFTRFFYVLGLAAIMQLFFSYFAVHFISNSWLMWLIINLVQMAPISAMVRMYIFFASFYYVWKSYVHVVDGCNSSTCMMCYKRNRATRVECTTIVNGVRRSFYVYANGGKGFCKLHNWNCVNCDTFCAGSTFISDEVARDLSLQFKRPINPTDQSSYIVDSVTVKNGSIHLYFDKAGQKTYERHSLSHFVNLDNLRANNTKGSLPINVIVFDGKSKCEESSAKSASVYYSQLMCQPILLLDQALVSDVGDSAEVAVKMFDAYVNTFSSTFNVPMEKLKTLVATAEAELAKNVSLDNVLSTFISAARQGFVDSDVETKDVVECLKLSHQSDIEVTGDSCNNYMLTYNKVENMTPRDLGACIDCSARHINAQVAKSHNIALIWNVKDFMSLSEQLRKQIRSAAKKNNLPFKLTCATTRQVVNVVTTKIALKGG

SEQ ID NO: 16351 - protein, 1946 aa, Artificial Sequence
  SARS-CoV-2__MT439297.1__non-structural protein 3 (NSP3)
MAPTKVTFGDDTVIEVQGYKSVNITFELDERIDKVLNEKCSAYTVELGTEVNEFACVVADAVIKTLQPVSELLTPLGIDLDEWSMATYYLFDESGEFKLASHMYCSFYPPDEDEEEGDCEEEEFEPSTQYEYGTEDDYQGKPLEFGATSAALQPEEEQEEDWLDDDSQQTVGQQDGSEDNQTTTIQTIVEVQPQLEMELTPVVQTIEVNSFSGYLKLTDNVYIKNADIVEEAKKVKPTVVVNAANVYLKHGGGVAGALNKATNNAMQVESDDYIATNGPLKVGGSCVLSGHNLAKHCLHVVGPNVNKGEDIQLLKSAYENFNQHEVLLAPLLSAGIFGADPIHSLRVCVDTVRTNVYLAVFDKNLYDKLVSSFLEMKSEKQVEQKIAEIPKEEVKPFITESKPSVEQRKQDDKKIKACVEEVTTTLEETKFLTENLLLYIDINGNLHPDSATLVSDIDITFLKKDAPYIVGDVVQEGVLTAVVIPTKKAGGTTEMLAKALRKVPTDNYITTYPGQGLNGYTVEEAKTVLKKCKSAFYILPSIISNEKQEILGTVSWNLREMLAHAEETRKLMPVCVETKAIVSTIQRKYKGIKIQEGVVDYGARFYFYTSKTTVASLINTLNDLNETLVTMPLGYVTHGLNLEEAARYMRSLKVPATVSVSSPDAVTAYNGYLTSSSKTPEEHFIETISLAGSYKDWSYSGQSTQLGIEFLKRGDKSVYYTSNPTTFHLDGEVITFDNLKTLLSLREVRTIKVFTTVDNINLHTQVVDMSMTYGQQFGPTYLDGADVTKIKPHNSHEGKTFYVLPNDDTLRVEAFEYYHTTDPSFLGRYMSALNHTKKWKYPQVNGLTSIKWADNNCYLATALLTLQQIELKFNPPALQDAYYRARAGEAANFCALILAYCNKTVGELGDVRETMSYLFQHANLDSCKRVLNVVCKTCGQQQTTLKGVEAVMYMGTLSYEQFKKGVQIPCTCGKQATKYLVQQESPFVMMSAPPAQYELKHGTFTCASEYTGNYQCGHYKHITSKETLYCIDGALLTKSSEYKGPITDVFYKENSYTTTIKPVTYKLDGVVCTEIDPKLDNYYKKDNSYFTEQPIDLVPNQPYPNASFDNFKFVCDNIKFADDLNQLTGYKKPASRELKVTFFPDLNGDVVAIDYKHYTPSFKKGAKLLHKPIVWHVNNATNKATYKPNTWCIRCLWSTKPVETSNSFDVLKSEDAQGMDNLACEDLKPVSEEVVENPTIQKDVLECNVKTTEVVGDIILKPANNSLKITEEVGHTDLMAAYVDNSSLTIKKPNELSRVLGLKTLATHGLAAVNSVPWDTIANYAKPFLNKVVSTTTNIVTRCLNRVCTNYMPYFFTLLLQLCTFTRSTNSRIKASMPTTIAKNTVKSVGKFCLEAAFNYLKSPNFSKLINIIIWFLLLSVCLGSLIYSTAALGVLMSNLGMPSYCTGYREGYLNSTNVTIATYCTGSIPCSVCLSGLDSLDTYPSLETIQITISSFKWDLTAFGLVAEWFLAYILFTRFFYVLGLAAIMQLFFSYFAVHFISNSWLMWLIINLVQMAPISAMVRMYIFFASFYYVWKSYVHVVDGCNSSTCMMCYKRNRATRVECTTIVNGVRRSFYVYANGGKGFCKLHNWNCVNCDTFCAGSTFISDEVARDLSLQFKRPINPTDQSSYIVDSVTVKNGSIHLYFDKAGQKTYERHSLSHFVNLDNLRANNTKGSLPINVIVFDGKSKCEESSAKSASVYYSQLMCQPILLLDQALVSDVGDSAEVAVKMFDAYVNTFSSTFNVPMEKLKTLVATAEAELAKNVSLDNVLSTFISAARQGFVDSDVETKDVVECLKLSHQSDIEVTGDSCNNYMLTYNKVENMTPRDLGACIDCSARHINAQVAKSHNIALIWNVKDFMSLSEQLRKQIRSAAKKNNLPFKLTCATTRQVVNVVTTKIALKGG

SEQ ID NO: 16352 - protein, 1946 aa, Artificial Sequence
  SARS-CoV-2__MT434786.1__non-structural protein 3 (NSP3)
MAPTKVTFGDDTVIEVQGYKSVNITFELDERIDKVLNEKCSAYTVELGTEVNEFACVVADAVIKTLQPVSELLTPLGIDLDEWSMATYYLFDESGEFKLASHMYCSFYPPDEDEEEGDCEEEEFEPSTQYEYGTEDDYQGKPLEFGATSAALQPEEEQEEDWLDDDSQQTVGQQDGSEDNQTTTIQTIVEVQPQLEMELTPVVQTIEVNSFSGYLKLTDNVYIKNADIVEEAKKVKPTVVVNAANVYLKHGGGVAGALNKATNNAMQVESDDYIATNGPLKVGGSCVLSGHNLAKHCLHVVGPNVNKGEDIQLLKSAYENFNQHEVLLAPLLSAGIFGADPIHSLRVCVDTVRTNVYLAVFDKNLYDKLVSSFLEMKSEKQVEQKIAEIPKEEVKPFITESKPSVEQRKQDDKKIKACVEEVTTTLEETKFLTENLLLYIDINGNLHPDSATLVSDIDITFLKKDAPYIVGDVVQEGVLTAVVIPTKKAGGTTEMLAKALRKVPTDNYITTYPGQGLNGYTVEEAKTVLKKCKSAFYILPSIISNEKQEILGTVSWNLREMLAHAEETRKLMPVCVETKAIVSTIQRKYKGIKIQEGVVDYGARFYFYTSKTTVASLINTLNDLNETLVTMPLGYVTHGLNLEEAARYMRSLKVPATVSVSSPDAVTAYNGYLTSSSKTPEEHFIETISLAGSYKDWSYSGQSTQLGIEFLKRGDKSVYYTSNPTTFHLDGEVITFDNLKTLLSLREVRTIKVFTTVDNINLHTQVVDMSMTYGQQFGPTYLDGADVTKIKPHNSHEGKTFYVLPNDDTLRVEAFEYYHTTDPSFLGRYMSALNHTKKWKYPQVNGLTSIKWADNNCYLATALLTLQQIELKFNPPALQDAYYRARAGEAANFCALILAYCNKTVGELGDVRETMSYLFQHANLDSCKRVLNVVCKTCGQQQTTLKGVEAVMYMGTLSYEQFKKGVQIPCTCGKQATKYLVQQESPFVMMSAPPAQYELKHGTFTCASEYTGNYQCGHYKHITSKETLYCIDGALLTKSSEYKGPITDVFYKENSYTTTIKPVTYKLDGVVCTEIDPKLDNYYKKDNSYFTEQPIDLVPNQPYPNASFDNFKFVCDNIKFADDLNQLTGYKKPASRELKVTFFPDLNGDVVAIDYKHYTPSFKKGAKLLHKPIVWHVNNATNKATYKPNTWCIRCLWSTKPVETSNSFDVLKSEDAQGMDNLACEDLKPVSEEVVENPTIQKDVLECNVKTTEVVGDIILKPANNSLKITEEVGHTDLMAAYVDNSSLTIKKPNELSRVLGLKTLATRGLAAVNSVPWDTIANYAKPFLNKVVSTTTNIVTRCLNRVCTNYMPYFFTLLLQLCTFTRSTNSRIKASMPTTIAKNTVKSVGKFCLEASFNYLKSPNFSKLINIIIWFLLLSVCLGSLIYSTAALGVLMSNLGMPSYCTGYREGYLNSTNVTIATYCTGSIPCSVCLSGLDSLDTYPSLETIQITISSFKWDLTAFGLVAEWFLAYILFTRFFYVLGLAAIMQLFFSYFAVHFISNSWLMWLIINLVQMAPISAMVRMYIFFASFYYVWKSYVHVVDGCNSSTCMMCYKRNRATRVECTTIVNGVRRSFYVYANGGKGFCKLHNWNCVNCDTFCAGSTFISDEVARDLSLQFKRPINPTDQSSYIVDSVTVKNGSIHLYFDKAGQKTYERHSLSHFVNLDNLRANNTKGSLPINVIVFDGKSKCEESSAKSASVYYSQLMCQPILLLDQALVSDVGDSAEVAVKMFDAYVNTFSSTFNVPMEKLKTLVATAEAELAKNVSLDNVLSTFISAARQGFVDSDVETKDVVECLKLSHQSDIEVTGDSCNNYMLTYNKVENMTPRDLGACIDCSARHINAQVAKSHNIALIWNVKDFMSLSEQLRKQIRSAAKKNNLPFKLTCATTRQVVNVVTTKIALKGG

SEQ ID NO: 16353 - protein, 1946 aa, Artificial Sequence
  SARS-CoV-2__MT365032.1__non-structural protein 3 (NSP3)
MAPTKVTFGDDTVIEVQGYKSVNITFELDERIDKVLNEKCSAYTVELGTEVNEFACVVADAVIKTLQPVSELLTPLGIDLDEWSMATYYLFDESGEFKLASHMYCSFYPPDEDEEEGDCEEEEFEPSTQYEYGTEDDYQGKPLEFGATSAALQPEEEQEEDWLDDDSQQTVGQQDGSEDNQTTTIQTIVEVQPQLEMELTPVVQTIEVNSFSGYLKLTDNVYIKNADIVEEAKKVKPTVVVNAANVYLKHGGGVAGALNKATNNAMQVESDDYIATNGPLKVGGSCVLSGHNLAKHCLHVVGPNVNKGEDIQLLKSAYENFNQHEVLLAPLLSAGIFGADPIHSLRVCVDTVRTNVYLAVFDKNLYDKLVSSFLEMKSEKQVEQKIAEIPKEEVKPFITESKPSVEQRKQDDKKIKACVEEVTTTLEETKFLTENLLLYIDINGNLHPDSATLVSDIDITFLKKDAPYIVGDVVQEGVLTVVVIPTKKAGGTTEMLAKALRKVPTDNYITTYPGQGLNGYTVEEAKTVLKKCKSAFYILPSIISNEKQEILGTVSWNLREMLAHAEETRKLMPVCVETKAIVSTIQRKYKGIKIQEGVVDYGARFYFYTSKTTVASLINTLNDLNETLVTMPLGYVTHGLNLEEAARYMRSLKVPATVSVSSPDAVTAYNGYLTSSSKTPEEHFIETISLAGSYKDWSYSGQSTQLGIEFLKRGDKSVYYTSNPTTFHLDGEVITFDNLKTLLSLREVRTIKVFTTVDNINLHTQVVDMSMTYGQQFGPTYLDGADVTKIKPHNSHEGKTFYVLPNDDTLRVEAFEYYHTTDPSFLGRYMSALNHTKKWKYPQVNGLTSIKWADNNCYLATALLTLQQIELKFNPPALQDAYYRARAGEAANFCALILAYCNKTVGELGDVRETMSYLFQHANLDSCKRVLNVVCKTCGQQQTTLKGVEAVMYMGTLSYEQFKKGVQIPCTCGKQATKYLVQQESPFVMMSAPPAQYELKHGTFTCASEYTGNYQCGHYKHITSKETLYCIDGALLTKSSEYKGPITDVFYKENSYTTTIKPVTYKLDGVVCTEIDPKLDNYYKKDNSYFTEQPIDLVPNQPYPNASFDNFKFVCDNIKFADDLNQLTGYKKPASRELKVTFFPDLNGDVVAIDYKHYTPSFKKGAKLLHKPIVWHVNNATNKATYKPNTWCIRCLWSTKPVETSNSFDVLKSEDAQGMDNLACEDLKPVSEEVVENPTIQKDVLECNVKTTEVVGDIILKPANNSLKITEEVGHTDLMAAYVDNSSLTIKKPNELSRVLGLKTLATHGLAAVNSVPWDTIANYAKPFLNKVVSTTTNIVTRCLNRVCTNYMPYFFTLLLQLCTFTRSTNSRIKASMPTTIAKNTVKSVGKFCLEASFNYLKSPNFSKLINIIIWFLLLSVCLGSLIYSTAALGVLMSNLGMPSYCTGYREGYLNSTNVTIATYCTGSIPCSVCLSGLDSLDTYPSLETIQITISSFKWDLTAFGLVAEWFLAYILFTRFFYVLGLAAIMQLFFSYFAVHFISNSWLMWLIINLVQMAPISAMVRMYIFFASFYYVWKSYVHVVDGCNSSTCMMCYKRNRATRVECTTIVNGVRRSFYVYANGGKGFCKLHNWNCVNCDTFCAGSTFISDEVARDLSLQFKRPINPTDQSSYIVDSVTVKNGSIHLYFDKAGQKTYERHSLSHFVNLDNLRANNTKGSLPINVIVFDGKSKCEESSAKSASVYYSQLMCQPILLLDQALVSDVGDSAEVAVKMFDAYVNTFSSTFNVPMEKLKTLVATAEAELAKNVSLDNVLSTFISAARQGFVDSDVETKDVVECLKLSHQSDIEVTGDSCNNYMLTYNKVENMTPRDLGACIDCSARHINAQVAKSHNIALIWNVKDFMSLSEQLRKQIRSAAKKNNLPFKLTCATTRQVVNVVTTKIALKGG

SEQ ID NO: 16354 - protein, 1946 aa, Artificial Sequence
  SARS-CoV-2__MT428551.1__non-structural protein 3 (NSP3)
MAPTKVTFGDDTVIEVQGYKSVNITFELDERIDKVLNEKCSAYTVELGTEVNEFACVVADAVIKTLQPVSELLTPLGIDLDEWSMATYYLFDESGEFKLASHMYCSFYPPDEDEEEGDCEEEEFEPSTQYEYGTEDDYQGKPLEFGATSAALQPEEEQEEDWLDDDSQQTVGQQDGSEDNQTTTIQTIVEVQPQLEMELTPVVQTKVNSFSGYLKLTDNVYIKNADIVEEAKKVKPTVVVNAANVYLKHGGGVAGALNKATNNAMQVESDDYIATNGPLKVGGSCVLSGHNLAKHCLHVVGPNVNKGEDIQLLKSAYENFNQHEVLLAPLLSAGIFGADPIHSLRVCVDTVRTNVYLAVFDKNLYDKLVSSFLEMKSEKQVEQKIAEIPKEEVKPFITESKPSVEQRKQDDKKIKACVEEVTTTLEETKFLTENLLLYIDINGNLHPDSATLVSDIDITFLKKDAPYIVGDVVQEGVLTAVVIPTKKAGGTTEMLAKALRKVPTDNYITTYPGQGLNGYTVEEAKTVLKKCKSAFYILPSIISNEKQEILGTVSWNLREMLAHAEETRKLMPVCVETKAIVSTIQRKYKGIKIQEGVVDYGARFYFYTSKTTVASLINTLNDLNETLVTMPLGYVTHGLNLEEAARYMRSLKVPATVSVSSPDAVTAYNGYLTSSSKTPEEHFIETISLAGSYKDWSYSGQSTQLGIEFLKRGDKSVYYTSNPTTFHLDGEVITFDNLKTLLSLREVRTIKVFTTVDNINLHTQVVDMSMTYGQQFGPTYLDGADVTKIKPHNSHEGKTFYVLPNDDTLRVEAFEYYHTTDPSFLGRYMSALNHTKKWKYPQVNGLTSIKWADNNCYLATALLTLQQIELKFNPPALQDAYYRARAGEAANFCALILAYCNKTVGELGDVRETMSYLFQHANLDSCKRVLNVVCKTCGQQQTTLKGVEAVMYMGTLSYEQFKKGVQIPCTCGKQATKYLVQQESPFVMMSAPPAQYELKHGTFTCASEYTGNYQCGHYKHITSKETLYCIDGALLTKSSEYKGPITDVFYKENSYTTTIKPVTYKLDGVVCTEIDPKLDNYYKKDNSYFTEQPIDLVPNQPYPNASFDNFKFVCDNIKFADDLNQLTGYKKPASRELKVTFFPDLNGDVVAIDYKHYTPSFKKGAKLLHKPIVWHVNNATNKATYKPNTWCIRCLWSTKPVETSNSFDVLKSEDAQGMDNLACEDLKPVSEEVVENPTIQKDVLECNVKTTEVVGDIILKPANNSLKITEEVGHTDLMAAYVDNSSLTIKKPNELSRVLGLKTLATHGLAAVNSVPWDTIANYAKPFLNKVVSTTTNIVTRCLNRVCTNYMPYFFTLLLQLCTFTRSTNSRIKASMPTTIAKNTVKSVGKFCLEASFNYLKSPNFSKLINIIIWFLLLSVCLGSLIYSTAALGVLMSNLGMPSYCTGYREGYLNSTNVTIATYCTGSIPCSVCLSGLDSLDTYPSLETIQITISSFKWDLTAFGLVAEWFLAYILFTRFFYVLGLAAIMQLFFSYFAVHFISNSWLMWLIINLVQMAPISAMVRMYIFFASFYYVWKSYVHVVDGCNSSTCMMCYKRNRATRVECTTIVNGVRRSFYVYANGGKGFCKLHNWNCVNCDTFCAGSTFISDEVARDLSLQFKRPINPTDQSSYIVDSVTVKNGSIHLYFDKAGQKTYERHSLSHFVNLDNLRANNTKGSLPINVIVFDGKSKCEESSAKSASVYYSQLMCQPILLLDQALVSDVGDSAEVAVKMFDAYVNTFSSTFNVPMEKLKTLVATAEAELAKNVSLDNVLSTFISAARQGFVDSDVETKDVVECLKLSHQSDIEVTGDSCNNYMLTYNKVENMTPRDLGACIDCSARHINAQVAKSHNIALIWNVKDFMSLSEQLRKQIRSAAKKNNLPFKLTCATTRQVVNVVTTKIALKGGK

SEQ ID NO: 16355 - protein, 1946 aa, Artificial Sequence
  SARS-CoV-2__MT419842.1__non-structural protein 3 (NSP3)
MAPTKVTFGDDTVIEVQGYKSVNITFELDERIDKVLNEKCSAYTVELGTEVNEFACVVADAVIKTLQPVSELLTPLGIDLDEWSMATYYLFDESGEFKLASHMYCSFYPPDEDEEEGDCEEEEFEPSTQYEYGTEDDYQGKPLEFGATSAALQPEEEQEEDWLDDDSQQTVGQQDGSEDNQTTTIQTIVEVQPQLEMELTPVVQTIEVNSFSGYLKLTDNVYIKNADIVEEAKKVKPTVVVNAANVYLKHGGGVAGALNKATNNAMQVESDDYIATNGPLKVGGSCVLSGHNLAKHCLHVVGPNVNKGEDIQLLKSAYENFNQHEVLLAPLLSAGIFGADPIHSLRVCVDTVRTNVYLAVFDKNLYDKLVSSFLEMKSEKQVEQKIAEIPKEEVKPFITESKPSVEQRKQDDKKIKACVEEVTTTLEETKFLTENLLLYIDINGNLHPDSATLVSDIDITFLKKDAPYIVGDVVQEGVLTAVVIPTKKAGGTTEMLAKALRKVPTDNYITTYPGQGLNGYTVEEAKTVLKKCKSAFYILPSIISNEKQEILGTVSWNLREMLAHAEETRKLMPVCVETKAIVSTIQRKYKGIKIQEGVVDYGARFYFYTSKTTVASLINTLNDLNETLVTMPLGYVTHGLNLEEAARYMRSLKVPATVSVSSPDAVTAYNGYLTSSSKTPEEHFIETISLAGSYKDWSYSGQSTQLGIEFLKRGDKSVYYTSNPTTFHLDGEVITFDNLKTLLSLREVRTIKVFTTVDNINLHTQVVDMSMTYGQQFGPTYLDGADVTKIKPHNSHEGKTFYVLPNDDTLRVEAFEYYHTTDPSFLGRYMSALNHTKKWKYPQVNGLTSIKWADNNCYLATALLTLQQIELKFNPPALQDAYYRARAGEAANFCALILAYCNKTVGELGDVRETMSYLFQHANLDSCKRVLNVVCKTCGQQQTTLKGVEAVMYMGTLSYEQFKKGVQIPCTCGKQATKYLVQQESPFVMMSAPPAQYELKHGTFTCASEYTGNYQCGHYKHITSKETLYCIDGALLTKSSEYKGPITDVFYKENSYTTTIKPVTYKLDGVVCTEIDPKLDNYYKKDNSYFTEQPIDLVPNQPYPNASFDNFKFVCDNIKFADDLNQLTGYKKPASRELKVTFFPDLNGDVVAIDYKHYTPSFKKGAKLLHKPIVWHVNNATNKATYKPNTWCIRCLWSTKPVETSNSFDVLKSEDAQGMDNLACEDLKPVSEEVVENPTIQKDVLECNVKTTEVVGDIILKPANNSLKITEEVGHTDLMAAYVDNSSLTIKKPNELSRVLGLKTLATHGLAAVNSVPWDTIANYAKPFLNKVVSTTTNIVTRCLNRVCTNYMPYFFTLLLQLCTFTRSTNSRIKASMPTTIAKNTVKSVGKFCLEASFNYLKSPNFSKLINIIIWFLLLSVCLGSLIYSTAALGVLMSNLGMPSYCTGYREGYLNSTNVTIATYCTGSIPCSVCLSGLDSLDTYPSLETIQITISSFKWDLTAFGLVAEWFLAYILFTRFFYVLGLAAIMQLFFSYFAVHFISNSWLMWLIINLVQMAPISAMVRMYIFFASFYYVWKSYVHVVDGCNSSTCMMCYKRNRATRVECTTIVNGVRRSFYVYANGGKGFCKLHNWNCVNCDTFCAGSTFISDEVARDLSLQFKRPINPTDQSSYIVDSVTVKNGSIHLYFDKAGQKTYERHFLSHFVNLDNLRANNTKGSLPINVIVFDGKSKCEESSAKSASVYYSQLMCQPILLLDQALVSDVGDSAEVAVKMFDAYVNTFSSTFNVPMEKLKTLVATAEAELAKNVSLDNVLSTFISAARQGFVDSDVETKDVVECLKLSHQSDIEVTGDSCNNYMLTYNKVENMTPRDLGACIDCSARHINAQVAKSHNIALIWNVKDFMSLSEQLRKQIRSAAKKNNLPFKLTCATTRQVVNVVTTKIALKGG

SEQ ID NO: 16356 - protein, 1946 aa, Artificial Sequence
  SARS-CoV-2__MT412134.1__non-structural protein 3 (NSP3)
MAPTKVTFGDDTVIEVQGYKSVNITFELDERIDKVLNEKCSAYTVELGTEVNEFACVVADAVIKTLQPVSELLTPLGIDLDEWSMATYYLFDESGEFKLASHMYCSFYPPDEDEEEGDCEEEEFEPSTQYEYGTEDDYQGKPLEFGATSAALQPEEEQEEDWLDDDSQQTVGQQDGSEDNQTTTIQTIVEVQPQLEMELTPVVQTIEVNSFSGYLKLTDNVYIKNADIVEEAKKVKPTVVVNAANVYLKHGGGVAGALNKATNNAMQVESDDYIATNGPLKVGGSCVLSGHNLAKHCLHVVGPNVNKGEDIQLLKSAYENFNQHEVLLAPLLSAGIFGADPIHSLRVCVDTVRTNVYLAVFDKNLYDKLVSSFLEMKSEKQVEQKIAEIPKEEVKPFITESKPSVEQRKQDDKKIKACVEEVTTTLEETKFLTENLLLYIDINGNLHPDSATLVSDIDITFLKKDAPYIVGDVVQEGVLTAVVIPTKKAGGTTEMLAKALRKVPTDNYITTYPGQGLNGYTVEEAKTVLKKCKSAFYILPSIISNEKQEILGTVSWNLREMLAHAEETRKLMPVCVETKAIVSTIQRKYKGIKIQEGVVDYGARFYFYTSKTTVASLINTLNDLNETLVTMPLGYVTHGLNLEEAARYMRSLKVPATVSVSSPDAVTAYNGYLTSSSKTPEEHFIETISLAGSYKDWSYSGQSTQLGIEFLKRGDKSVYYTSNPTTFHLDGEVITFDNLKTLLSLREVRTIKVFTTVDNINLHTQVVDMSMTYGQQFGPTYFDGADVTKIKPHNSHEGKTFYVLPNDDTLRVEAFEYYHTTDPSFLGRYMSALNHTKKWKYPQVNGLTSIKWADNNCYLATALLTLQQIELKFNPPALQDAYYRARAGEAANFCALILAYCNKTVGELGDVRETMSYLFQHANLDSCKRVLNVVCKTCGQQQTTLKGVEAVMYMGTLSYEQFKKGVQIPCTCGKQATKYLVQQESPFVMMSAPPAQYELKHGTFTCASEYTGNYQCGHYKHITSKETLYCIDGALLTKSSEYKGPITDVFYKENSYTTTIKPVTYKLDGVVCTEIDPKLDNYYKKDNSYFTEQPIDLVPNQPYPNASFDNFKFVCDNIKFADDLNQLTGYKKPASRELKVTFFPDLNGDVVAIDYKHYTPSFKKGAKLLHKPIVWHVNNATNKATYKPNTWCIRCLWSTKPVETSNSFDVLKSEDAQGMDNLACEDLKPVSEEVVENPTIQKDVLECNVKTTEVVGDIILKPANNSLKITEEVGHTDLMAAYVDNSSLTIKKPNELSRVLGLKTLATHGLAAVNSVPWDTIANYAKPFLNKVVSTTTNIVTRCLNRVCTNYMPYFFTLLLQLCTFTRSTNSRIKASMPTTIAKNTVKSVGKFCLEASFNYLKSPNFSKLINIIIWFLLLSVCLGSLIYSTAALGVLMSNLGMPSYCTGYREGYLNSTNVTIATYCTGSIPCSVCLSGLDSLDTYPSLETIQITISSFKWDLTAFGLVAEWFLAYILFTRFFYVLGLAAIMQLFFSYFAVHFISNSWLMWLIINLVQMAPISAMVRMYIFFASFYYVWKSYVHVVDGCNSSTCMMCYKRNRATRVECTTIVNGVRRSFYVYANGGKGFCKLHNWNCVNCDTFCAGSTFISDEVARDLSLQFKRPINPTDQSSYIVDSVTVKNGSIHLYFDKAGQKTYERHSLSHFVNLDNLRANNTKGSLPINVIVFDGKSKCEESSAKSASVYYSQLMCQPILLLDQALVSDVGDSAEVAVKMFDAYVNTFSSTFNVPMEKLKTLVATAEAELAKNVSLDNVLSTFISAARQGFVDSDVETKDVVECLKLSHQSDIEVTGDSCNNYMLTYNKVENMTPRDLGACIDCSARHINAQVAKSHNIALIWNVKDFMSLSEQLRKQIRSAAKKNNLPFKLTCATTRQVVNVVTTKIALKGG

SEQ ID NO: 16357 - protein, 1946 aa, Artificial Sequence
  SARS-CoV-2__MT412226.1__non-structural protein 3 (NSP3)
MAPTKVTFGDDTVIEVQGYKSVNITFELDERIDKVLNEKCSAYTVELGTEVNEFACVVADAVIKTLQPVSELLTPLGIDLDEWSMATYYLFDESGEFKLASHMYCSFYPPDEDEEEGDCEEEEFEPSTQYEYGTEDDYQGKPLEFGATSAALQPEEEQEEDWLDDDSQQTVGQQDGSEDNQTTTIQTIVEVQPQLEMELTPVVQTIEVNSFSGYLKLTDNVYIKNADIVEEAKKVKPTVVVNAANVYLKHGGGVAGALNKATNNAMQVESDDYIATNGPLKVGGSCVLSGHNLAKHCLHVVGPNVNKGEDIQLLKSAYENFNQHEVLLAPLLSAGIFGADPIHSLRVCVDTVRTNVYLAVFDKNLYDKLVSSFLEMKSEKQVEQKIAEIPKEEVKPFITESKPSVEQRKQDDKKIKACVEEVTTTLEETKFLTENLLLYIDINGNLHPDSATLVSDIDITFLKKDAPYIVGDVVQEGVLTAVVIPTKKAGGTTEMLAKALRKVPTDNYITTYPGQGLNGYTVEEAKTVLKKCKSAFYILPSIISNEKQEILGTVSWNLREMLAHAEETRKLMPVCVETKAIVSTIQRKYKGIKIQEGVVDYGARFYFYTSKTTVASLINTLNDLNETLVTMPLGYVTHGLNLEEAARYMRSLKVPATVSVSSPDAVTAYNGYLTSSSKTPEEHFIETISLAGSYKDWSYSGQSTQLGIEFLKRGDKSVYYTSNPTTFHLDGEVITFDNLKTLLSLREVRTIKVFTTVDNINLHTQVVDMSMTYGQQFGPTYLDGADVTKIKPHNSHEGKTFYVLPNDDTLRVEAFEYYHTTDPSFLGRYMSALNHTKKWKYPQVNGLTSIKWADNNCYLATALLTLQQIELKFNPPALQDAYYRARAGEAANFCALILAYCNKTVGELGDVRETMSYLFQHANLDSCKRVLNVVCKTCGQQQTTLKGVEAVMYMGTLSYEQFKKGVQIPCTCGKQATKYLVQQESPFVMMSAPPAQYELKHGTFTCASEYTGNYQCGHYKHITSKETLYCIDGALLTKSSEYKGPITDVFYKENSYTTTIKPVTYKLDGVVCTEIDPKLDNYYKKDNSYFTEQPIDLVPNQPYPNASFDNFKFVCDNIKFADDLNQLTGYKKPASRELKVTFFPDLNGDVVAIDYKHYTPSFKKGAKLLHKPIVWHVNNATNKATYKPNTWCIRCLWSTKPVETSNSFDVLKSEDAQGMDNLACEDLKPVSEEVVENPTIQKDVLECNVKTTEVVGDIILKPANNSLKITEEVGHTDLMAAYVDNSSLTIKKPNELSRVLGLKTLATHGLAAVNSVPWDTIANYAKPFLNKVVSTTTTIVTRCLNRVCTNYMPYFFTLLLQLCTFTRSTNSRIKASMPTTIAKNTVKSVGKFCLEASFNYLKSPNFSKLINIIIWFLLLSVCLGSLIYSTAALGVLMSNLGMPSYCTGYREGYLNSTNVTIATYCTGSIPCSVCLSGLDSLDTYPSLETIQITISSFKWDLTAFGLVAEWFLAYILFTRFFYVLGLAAIMQLFFSYFAVHFISNSWLMWLIINLVQMAPISAMVRMYIFFASFYYVWKSYVHVVDGCNSSTCMMCYKRNRATRVECTTIVNGVRRSFYVYANGGKGFCKLHNWNCVNCDTFCAGSTFISDEVARDLSLQFKRPINPTDQSSYIVDSVTVKNGSIHLYFDKAGQKTYERHSLSHFVNLDNLRANNTKGSLPINVIVFDGKSKCEESSAKSASVYYSQLMCQPILLLDQALVSDVGDSAEVAVKMFDAYVNTFSSTFNVPMEKLKTLVATAEAELAKNVSLDNVLSTFISAARQGFVDSDVETKDVVECLKLSHQSDIEVTGDSCNNYMLTYNKVENMTPRDLGACIDCSARHINAQVAKSHNIALIWNVKDFMSLSEQLRKQIRSAAKKNNLPFKLTCATTRQVVNVVTTKIALKGG

SEQ ID NO: 16358 - protein, 1946 aa, Artificial Sequence
  SARS-CoV-2__MT412324.1__non-structural protein 3 (NSP3)
MAPTKVTFGDDTVIEVQGYKSVNITFELDERIDKVLNEKCSAYTVELGTEVNEFACVVADAVIKTLQPVSELLTPLGIDLDEWSMATYYLFDESGEFKLASHMYCSFYPPDEDEEEGDCEEEEFEPSTQYEYGTEDDYQGKPLEFGATSAALQPEEEQEEDWLDDDSQQTVGQQDGSEDNQTTTIQTIVEVQPQLEMELTPVVQTIEVNSFSGYLKLTDNVYIKNADIVEEAKKVKPTVVVNAANVYLKHGGGVAGALNKATNNAMQVESDDYIATNGPLKVGGSCVLSGHNLAKHCLHVVGPNVNKGEDIQLLKSAYENFNQHEVLLAPLLSAGIFGADPIHSLRVCVDTVRTNVYLAVFDKNLYDKLVSSFLEMKSEKQVEQKIAEIPKEEVKPFITESKPSVEQRKQDDKKIKACVEEVTTTLEETKFLTENLLLYIDINGNLHPDSATLVSDIDITFLKKDAPYIVGDVVQEGVLTAVVIPTKKAGGTTEMLAKALRKVPTDNYITTYPGQGLNGYTVEEAKTVLKKCKSAFYILPSIISNEKQEILGTVSWNLREMLAHAEETRKLMPVCVETKAIVSTIQRKYKGIKIQEGVVDYGARFYFYTSKTTVASLINTLNDLNETLVTMPLGYVTHGLNLEEAARYMRSLKVPATVSVSSPDAVTAYNGYLTSSSKTPEEHFIETISLAGSYKDWSYSGQSTQLGIEFLKRGDKSVYYTSNPTTFHLDGEVITFDNLKTLLSLREVRTIKVFTTVDNINLHTQVVDMSMTYGQQFGPTYLDGADVTKIKPHNSHEGKTFYVLPNDDTLRVEAFEYYHTTDPSFLGRYMSALNHTKKWKYAQVNGLTSIKWADNNCYLATALLTLQQIELKFNPPALQDAYYRARAGEAANFCALILAYCNKTVGELGDVRETMSYLFQHANLDSCKRVLNVVCKTCGQQQTTLKGVEAVMYMGTLSYEQFKKGVQIPCTCGKQATKYLVQQESPFVMMSAPPAQYELKHGTFTCASEYTGNYQCGHYKHITSKETLYCIDGALLTKSSEYKGPITDVFYKENSYTTTIKPVTYKLDGVVCTEIDPKLDNYYKKDNSYFTEQPIDLVPNQPYPNASFDNFKFVCDNIKFADDLNQLTGYKKPASRELKVTFFPDLNGDVVAIDYKHYTPSFKKGAKLLHKPIVWHVNNATNKATYKPNTWCIRCLWSTKPVETSNSFDVLKSEDAQGMDNLACEDLKPVSEEVVENPTIQKDVLECNVKTTEVVGDIILKPANNSLKITEEVGHTDLMAAYVDNSSLTIKKPNELSRVLGLKTLATHGLAAVNSVPWDTIANYAKPFLNKVVSTTTNIVTRCLNRVCTNYMPYFFTLLLQLCTFTRSTNSRIKASMPTTIAKNTVKSVGKFCLEASFNYLKSPNFSKLINIIIWFLLLSVCLGSLIYSTAALGVLMSNLGMPSYCTGYREGYLNSTNVTIATYCTGSIPCSVCLSGLDSLDTYPSLETIQITISSFKWDLTAFGLVAEWFLAYILFTRFFYVLGLAAIMQLFFSYFAVHFISNSWLMWLIINLVQMAPISAMVRMYIFFASFYYVWKSYVHVVDGCNSSTCMMCYKRNRATRVECTTIVNGVRRSFYVYANGGKGFCKLHNWNCVNCDTFCAGSTFISDEVARDLSLQFKRPINPTDQSSYIVDSVTVKNGSIHLYFDKAGQKTYERHSLSHFVNLDNLRANNTKGSLPINVIVFDGKSKCEESSAKSASVYYSQLMCQPILLLDQALVSDVGDSAEVAVKMFDAYVNTFSSTFNVPMEKLKTLVATAEAELAKNVSLDNVLSTFISAARQGFVDSDVETKDVVECLKLSHQSDIEVTGDSCNNYMLTYNKVENMTPRDLGACIDCSARHINAQVAKSHNIALIWNVKDFMSLSEQLRKQIRSAAKKNNLPFKLTCATTRQVVNVVTTKIALKGG

SEQ ID NO: 16359 - protein, 1946 aa, Artificial Sequence
  SARS-CoV-2__MT412325.1__non-structural protein 3 (NSP3)
MAPTKVTFGDDTVIEVQGYKSVNITFELDERIDKVLNEKCSAYTVELGTEVNEFACVVADAVIKTLQPVSELLTPLGIDLDEWSMATYYLFDESGEFKLASHMYCSFYPPDEDEEEGDCEEEEFEPSTQYEYGTEDDYQGKPLEFGATSAALQPEEEQEEDWLDDDSQQTVGQQDGSEDNQTTTIQTIVEVQPQLEMELTPVVQTIEVNSFSGYLKLTDNVYIKNADIVEEAKKVKPTVVVNAANVYLKHGGGVAGALNKATNNAMQVESDDYIATNGPLKVGGSCVLSGHNLAKHCLHVVGPNVNKGEDIQLLKSAYENFNQHEVLLAPLLSAGIFGADPIHSLRVCVDTVRTNVYLAVFDKNLYDKLVSSFLEMKSEKQVEQKIAEIPKEEVKPFITESKPSVEQRKQDDKKIKACVEEVTTTLEETKFLTENLLLYIDINGNLHPDSATLVSDIDITFLKKDAPYIVGDVVQEGVLTAVVIPTKKAGGTTEMLAKALRKVPTDNYITTYPGQGLNGYTVEEAKTVLKKCKSAFYILPSIISNEKQEILGTVSWNLREMLAHAEETRKLMPVCVETKAIVSTIQRKYKGIKIQEGVVDYGARFYFYTSKTTVASLINTLNDLNETLVTMPLGYVTHGLNLEEAARYMRSLKVPATVSVSSPDAVTAYNGYLTSSSKTPEEHFIETISLAGSYKDWSYSGQSTQLGIEFLKRGDKSVYYTSNPTTFHLDGEVITFDNLKTLLSLREVRTIKVFTTVDNINLHTQVVDMSMTYGQQFGPTYLDGADVTKIKPHNSHEGKTFYVLPNDDTLRVEAFEYYHTTDPSFLGRYMSALNHTKKWKYPQVNGLTSIKWADNNCYLATALLTLQQIELKFNPPALQDAYYRARAGEAANFCALILAYCNKTVGELGDVRETMSYLFQHAKLDSCKRVLNVVCKTCGQQQTTLKGVEAVMYMGTLSYEQFKKGVQIPCTCGKQATKYLVQQESPFVMMSAPPAQYELKHGTFTCASEYTGNYQCGHYKHITSKETLYCIDGALLTKSSEYKGPITDVFYKENSYTTTIKPVTYKLDGVVCTEIDPKLDNYYKKDNSYFTEQPIDLVPNQPYPNASFDNFKFVCDNIKFADDLNQLTGYKKPASRELKVTFFPDLNGDVVAIDYKHYTPSFKKGAKLLHKPIVWHVNNATNKATYKPNTWCIRCLWSTKPVETSNSFDVLKSEDAQGMDNLACEDLKPVSEEVVENPTIQKDVLECNVKTTEVVGDIILKPANNSLKITEEVGHTDLMAAYVDNSSLTIKKPNELSRVLGLKTLATHGLAAVNSVPWDTIANYAKPFLNKVVSTTTNIVTRCLNRVCTNYMPYFFTLLLQLCTFTRSTNSRIKASMPTTIAKNTVKSVGKFCLEASFNYLKSPNFSKLINIIIWFLLLSVCLGSLIYSTAALGVLMSNLGMPSYCTGYREGYLNSTNVTIATYCTGSIPCSVCLSGLDSLDTYPSLETIQITISSFKWDLTAFGLVAEWFLAYILFTRFFYVLGLAAIMQLFFSYFAVHFISNSWLMWLIINLVQMAPISAMVRMYIFFASFYYVWKSYVHVVDGCNSSTCMMCYKRNRATRVECTTIVNGVRRSFYVYANGGKGFCKLHNWNCVNCDTFCAGSTFISDEVARDLSLQFKRPINPTDQSSYIVDSVTVKNGSIHLYFDKAGQKTYERHSLSHFVNLDNLRANNTKGSLPINVIVFDGKSKCEESSAKSASVYYSQLMCQPILLLDQALVSDVGDSAEVAVKMFDAYVNTFSSTFNVPMEKLKTLVATAEAELAKNVSLDNVLSTFISAARQGFVDSDVETKDVVECLKLSHQSDIEVTGDSCNNYMLTYNKVENMTPRDLGACIDCSARHINAQVAKSHNIALIWNVKDFMSLSEQLRKQIRSAAKKNNLPFKLTCATTRQVVNVVTTKIALKGG

SEQ ID NO: 16360 - protein, 1946 aa, Artificial Sequence
  SARS-CoV-2__MT415896.1__non-structural protein 3 (NSP3)
MAPTKVTFGDDTVIEVQGYKSVNITFELDERIDKVLNEKCSAYTVELGTEVNEFACVVADAVIKTLQPVSELLTPLGIDLDEWSMATYYLFDESGEFKLASHMYCSFYPPDEDEEEGDCEEEEFEPSTQYEYGTEDDYQGKPLEFGATSAALQLEEEQEEDWLDDDSQQTVGQQDGSEDNQTTTIQTIVEVQPQLEMELTPVVQTIEVNSFSGYLKLTDNVYIKNADIVEEAKKVKPTVVVNAANVYLKHGGGVAGALNKATNNAMQVESDDYIATNGPLKVGGSCVLSGHNLAKHCLHVVGPNVNKGEDIQLLKSAYENFNQHEVLLAPLLSAGIFGADPIHSLRVCVDTVRTNVYLAVFDKNLYDKLVSSFLEMKSEKQVEQKIAEIPKEEVKPFITESKPSVEQRKQDDKKIKACVEEVTTTLEETKFLTENLLLYIDINGNLHPDSATLVSDIDITFLKKDAPYIVGDVVQEGVLTAVVIPTKKAGGTTEMLAKALRKVPTDNYITTYPGQGLNGYTVEEAKTVLKKCKSAFYILPSIISNEKQEILGTVSWNLREMLAHAEETRKLMPVCVETKAIVSTIQRKYKGIKIQEGVVDYGARFYFYTSKTTVASLINTLNDLNETLVTMPLGYVTHGLNLEEAARYMRSLKVPATVSVSSPDAVTAYNGYLTSSSKTPEEHFIETISLAGSYKDWSYSGQSTQLGIEFLKRGDKSVYYTSNPTTFHLDGEVITFDNLKTLLSLREVRTIKVFTTVDNINLHTQVVDMSMTYGQQFGPTYLDGADVTKIKPHNSHEGKTFYVLPNDDTLRVEAFEYYHTTDPSFLGRYMSALNHTKKWKYPQVNGLTSIKWADNNCYLATALLTLQQIELKFNSPALQDAYYRARAGEAANFCALILAYCNKTVGELGDVRETMSYLFQHANLDSCKRVLNVVCKTCGQQQTTLKGVEAVMYMGTLSYEQFKKGVQIPCTCGKQATKYLVQQESPFVMMSAPPAQYELKHGTFTCASEYTGNYQCGHYKHITSKETLYCIDGALLTKSSEYKGPITDVFYKENSYTTTIKPVTYKLDGVVCTEIDPKLDNYYKKDNSYFTEQPIDLVPNQPYPNASFDNFKFVCDNIKFADDLNQLTGYKKPASRELKVTFFPDLNGDVVAIDYKHYTPSFKKGAKLLHKPIVWHVNNATNKATYKPNTWCIRCLWSTKPVETSNSFDVLKSEDAQGMDNLACEDLKPVSEEVVENPTIQKDVLECNVKTTEVVGDIILKPANNSLKITEEVGHTDLMAAYVDNSSLTIKKPNELSRVLGLKTLATHGLAAVNSVPWDTIANYAKPFLNKVVSTTTNIVTRCLNRVCTNYMPYFFTLLLQLCTFTRSTNSRIKASMPTTIAKNTVKSVGKFCLEASFNYLKSPNFSKLINIIIWFLLLSVCLGSLIYSTAALGVLMSNLGMPSYCTGYREGYLNSTNVTIATYCTGSIPCSVCLSGLDSLDTYPSLETIQITISSFKWDLTAFGLVAEWFLAYILFTRFFYVLGLAAIMQLFFSYFAVHFISNSWLMWLIINLVQMAPISAMVRMYIFFASFYYVWKSYVHVVDGCNSSTCMMCYKRNRATRVECTTIVNGVRRSFYVYANGGKGFCKLHNWNCVNCDTFCAGSTFISDEVARDLSLQFKRPINPTDQSSYIVDSVTVKNGSIHLYFDKAGQKTYERHSLSHFVNLDNLRANNTKGSLPINVIVFDGKSKCEESSAKSASVYYSQLMCQPILLLDQALVSDVGDSAEVAVKMFDAYVNTFSSTFNVPMEKLKTLVATAEAELAKNVSLDNVLSTFISAARQGFVDSDVETKDVVECLKLSHQSDIEVTGDSCNNYMLTYNKVENMTPRDLGACIDCSARHINAQVAKSHNIALIWNVKDFMSLSEQLRKQIRSAAKKNNLPFKLTCATTRQVVNVVTTKIALKGG

SEQ ID NO: 16361 - protein, 1946 aa, Artificial Sequence
  SARS-CoV-2__MT385436.1__non-structural protein 3 (NSP3)
MAPTKVTFGDDTVIEVQGYKSVNITFELDERIDKVLNEKCSAYTVELGTEVNEFACVVTDAVIKTLQPVSELLTPLGIDLDEWSMATYYLFDESGEFKLASHMYCSFYPPDEDEEEGDCEEEEFEPSTQYEYGTEDDYQGKPLEFGATSAALQPEEEQEEDWLDDDSQQTVGQQDGSEDNQTTTIQTIVEVQPQLEMELTPVVQTIEVNSFSGYLKLTDNVYIKNADIVEEAKKVKPTVVVNAANVYLKHGGGVAGALNKATNNAMQVESDDYIATNGPLKVGGSCVLSGHNLAKHCLHVVGPNVNKGEDIQLLKSAYENFNQHEVLLAPLLSAGIFGADPIHSLRVCVDTVRTNVYLAVFDKNLYDKLVSSFLEMKSEKQVEQKIAEIPKEEVKPFITESKPSVEQRKQDDKKIKACVEEVTTTLEETKFLTENLLLYIDINGNLHPDSATLVSDIDITFLKKDAPYIVGDVVQEGVLTAVVIPTKKAGGTTEMLAKALRKVPTDNYITTYPGQGLNGYTVEEAKTVLKKCKSAFYILPSIISNEKQEILGTVSWNLREMLAHAEETRKLMPVCVETKAIVSTIQRKYKGIKIQEGVVDYGARFYFYTSKTTVASLINTLNDLNETLVTMPLGYVTHGLNLEEAARYMRSLKVPATVSVSSPDAVTAYNGYLTSSSKTPEEHFIETISLAGSYKDWSYSGQSTQLGIEFLKRGDKSVYYTSNPTTFHLDGEVITFDNLKTLLSLREVRTIKVFTTVDNINLHTQVVDMSMTYGQQFGPTYLDGADVTKIKPHNSHEGKTFYVLPNDDTLRVEAFEYYHTTDPSFLGRYMSALNHTKKWKYPQVNGLTSIKWADNNCYLATALLTLQQIELKFNPPALQDAYYRARAGEAANFCALILAYCNKTVGELGDVRETMSYLFQHANLDSCKRVLNVVCKTCGQQQTTLKGVEAVMYMGTLSYEQFKKGVQIPCTCGKQATKYLVQQESPFVMMSAPPAQYELKHGTFTCASEYTGNYQCGHYKHITSKETLYCIDGALLTKSSEYKGPITDVFYKENSYTTTIKPVTYKLDGVVCTEIDPKLDNYYKKDNSYFTEQPIDLVPNQPYPNASFDNFKFVCDNIKFADDLNQLTGYKKPASRELKVTFFPDLNGDVVAIDYKHYTPSFKKGAKLLHKPIVWHVNNATNKATYKPNTWCIRCLWSTKPVETSNSFDVLKSEDAQGMDNLACEDLKPVSEEVVENPTIQKDVLECNVKTTEVVGDIILKPANNSLKITEEVGHTDLMAAYVDNSSLTIKKPNELSRVLGLKTLATHGLAAVNSVPWDTIANYAKPFLNKVVSTTTNIVTRCLNRVCTNYMPYFFTLLLQLCTFTRSTNSRIKASMPTTIAKNTVKSVGKFCLEASFNYLKSPNFSKLVNIIIWFLLLSVCLGSLIYSTAALGVLMSNLGMPSYCTGYREGYLNSTNVTIATYCTGSIPCSVCLSGLDSLDTYPSLETIQITISSFKWDLTAFGLVAEWFLAYILFTRFFYVLGLAAIMQLFFSYFAVHFISNSWLMWLIINLVQMAPISAMVRMYIFFASFYYVWKSYVHVVDGCNSSTCMMCYKRNRATRVECTTIVNGVRRSFYVYANGGKGFCKLHNWNCVNCDTFCAGSTFISDEVARDLSLQFKRPINPTDQSSYIVDSVTVKNGSIHLYFDKAGQKTYERHSLSHFVNLDNLRANNTKGSLPINVIVFDGKSKCEESSAKSASVYYSQLMCQPILLLDQALVSDVGDSAEVAVKMFDAYVNTFSSTFNVPMEKLKTLVATAEAELAKNVSLDNVLSTFISAARQGFVDSDVETKDVVECLKLSHQSDIEVTGDSCNNYMLTYNKVENMTPRDLGACIDCSARHINAQVAKSHNIALIWNVKDFMSLSEQLRKQIRSAAKKNNLPFKLTCATTRQVVNVVTTKIALKGG

SEQ ID NO: 16362 - protein, 1946 aa, Artificial Sequence
  SARS-CoV-2__MT385454.1__non-structural protein 3 (NSP3)
MAPTKVTFGDDTVIEVQGYKSVNITFELDERIDKVLNEKCSAYTVELGTEVNEFACVVADAVIKTLQPVSELLTPLGIDLDEWSMATYYLFDESGEFKLASHMYCSFYPPDEDEEEGDCEEEEFEPSTQYEYGTEDDYQGKPLEFGATSAALQPEEEQEEDWLDDDSQQTVGQQDGSEDNQTTTIQTIVEVQPQLEMELTPVVQTIEVNSFSGYLKLTDNVYIKNADIVEEAKKVKPTVVVNAANVYLKHGGGVAGALNKATNNAMQVESDDYIATNGPLKVGGSCVLSGHNLAKHCLHVVGPNVNKGEDIQLLKSAYENFNQHEVLLAPLLSAGIFGADPIHSLRVCVDTVRTNVYLAVFDKNLYDKLVSSFLEMKSEKQVEQKIAEIPKEEVKPFITESKPSVEQDDKKIKACVEEVTTTLEETKFLTENLLLYIDINGNLHPDSATLVSDIDITFLKKDAPYIVGDVVQEGVLTAVVIPTKKAGGTTEMLAKALRKVPTDNYITTYPGQGLNGYTVEEAKTVLKKCKSAFYILPSIISNEKQEILGTVSWNLREMLAHAEETRKLMPVCVETKAIVSTIQRKYKGIKIQEGVVDYGARFYFYTSKTTVASLINTLNDLNETLVTMPLGYVTHGLNLEEAARYMRSLKVPATVSVSSPDAVTAYNGYLTSSSKTPEEHFIETISLAGSYKDWSYSGQSTQLGIEFLKRGDKSVYYTSNPTTFHLDGEVITFDNLKTLLSLREVRTIKVFTTVDNINLHTQVVDMSMTYGQQFGPTYLDGADVTKIKPHNSHEGKTFYVLPNDDTLRVEAFEYYHTTDPSFLGRYMSALNHTKKWKYPQVNGLTSIKWADNNCYLATALLTLQQIELKFNPPALQDAYYRARAGEAANFCALILAYCNKTVGELGDVRETMSYLFQHANLDSCKRVLNVVCKTCGQQQTTLKGVEAVMYMGTLSYEQFKKGVQIPCTCGKQATKYLVQQESPFVMMSAPPAQYELKHGTFTCASEYTGNYQCGHYKHITSKETLYCIDGALLTKSSEYKGPITDVFYKENSYTTTIKPVTYKLDGVVCTEIDPKLDNYYKKDNSYFTEQPIDLVPNQPYPNASFDNFKFVCDNIKFADDLNQLTGYKKPASRELKVTFFPDLNGDVVAIDYKHYTPSFKKGAKLLHKPIVWHVNNATNKATYKPNTWCIRCLWSTKPVETSNSFDVLKSEDAQGMDNLACEDLKPVSEEVVENPTIQKDVLECNVKTTEVVGDIILKPANNSLKITEEVGHTDLMAAYVDNSSLTIKKPNELSRVLGLKTLATHGLAAVNSVPWDTIANYAKPFLNKVVSTTTNIVTRCLNRVCTNYMPYFFTLLLQLCTFTRSTNSRIKASMPTTIAKNTVKSVGKFCLEASFNYLKSPNFSKLINIIIWFLLLSVCLGSLIYSTAALGVLMSNLGMPSYCTGYREGYLNSTNVTIATYCTGSIPCSVCLSGLDSLDTYPSLETIQITISSFKWDLTAFGLVAEWFLAYILFTRFFYVLGLAAIMQLFFSYFAVHFISNSWLMWLIINLVQMAPISAMVRMYIFFASFYYVWKSYVHVVDGCNSSTCMMCYKRNRATRVECTTIVNGVRRSFYVYANGGKGFCKLHNWNCVNCDTFCAGSTFISDEVARDLSLQFKRPINPTDQSSYIVDSVTVKNGSIHLYFDKAGQKTYERHSLSHFVNLDNLRANNTKGSLPINVIVFDGKSKCEESSAKSASVYYSQLMCQPILLLDQALVSDVGDSAEVAVKMFDAYVNTFSSTFNVPMEKLKTLVATAEAELAKNVSLDNVLSTFISAARQGFVDSDVETKDVVECLKLSHQSDIEVTGDSCNNYMLTYNKVENMTPRDLGACIDCSARHINAQVAKSHNIALIWNVKDFMSLSEQLRKQIRSAAKKNNLPFKLTCATTRQVVNVVTTKIALKGGKIV

SEQ ID NO: 16363 - protein, 1946 aa, Artificial Sequence
  SARS-CoV-2__MT385461.1__non-structural protein 3 (NSP3)
MAPTKVTFGDDTVIEVQGYKSVNITFELDERIDKVLNEKCSAYTVELGTEVNEFACVVADAVIKTLQPVSELLTPLGIDLDEWSMATYYLFDESGEFKLASHMYCSFYPPDEDEEEGDCEEEEFEPSTQYEYGTEDDYQGKPLEFGATSAALQPEEEQEEDWLDDDSQQTVGQQDGSEDNQTTTIQTIVEVQPQLEMELTPVVQTIEVNSFSGYLKLTDNVYIKNADIVEEAKKVKPTVVVNAANVYLKHGGGVAGALNKATNNAMQVESDDYIATNGPLKVGGSCVLSGHNLAKHCLHVVGPNVNKGEDIQLLKSAYENFNQHEVLLAPLLSAGIFGADPIHSLRVCVDTVRTNVYLAVFDKNLYDKLVSSFLEMKSEKQVEQKIAEIPKEEVKPFITESKPSVEQRKQDDKKIKACVEEVTTTLEETKFLTENLLLYIDINGNLHPDSATLVSDIDITFLKKDAPYIVGDVVQEGVLTAVVIPTKKAGGTTEMLAKALRKVPTDNYITTYPGQGLNGYTVEEAKTVLKKCKSAFYILPSIISNEKQEILGTVSWNLREMLAHAEETRKLMPVCVETKAIVSTIQRKYKGIKIQEGVVDYGARFYFYTSKTTVASLINTLNDLNETLVTMPLGYVTHGLNLEEAARYMRSLKVPATVSVSSPDAVTAYNGYLTSSSKTPEEHFIETISLAGSYKDWSYSGQSTQLGIEFLKRGDKSVYYTSNPTTFHLDGEVITFDNLKTLLSLREVRTIKVFTTVDNINLHTQVVDMSMTYGQQFGPTYLDGADVTKIKPHNSHEGKTFYVLPNDDTLRVEAFEYYHTTDPSFLGRYMSALNHTKKWKYPQVNGLTSIKWADNNCYLATALLTLQQIELKFNPPALQDAYYRARAGEAANFCALILAYCNKTVGELGDVRETMSYLFQHANLDSCKRVLNVVCKTCGQQQTTLKGVEAVMYMGTLSYEQFKKGVQIPCTCGKQATKYLVQQESPFVMMSAPPAQYELKHGTFTCASEYTGNYQCGHYKHITSKETLYCIDGALLTKSSEYKGPITDVFYKENSYTTTIKPVTYKLDGVVCTEIDPKLDNYYKKDNSYFTEQPIDLVPNQPYPNASFDNFKFVCDNIKFADDLNQLTGYKKPASRELKVTFFPDLNGDVVAIDYKHYTPSFKKGAKLLHKPIVWHVNNATNKATYKPNTWCIRCLWSTKPVETSNSFDVLKSEDAQGMDNLACEDLKPVSEEVVENPTIQKDVLECNVKTTEVVGDIILKPANNSLKITEEVGHTDLMAAYVDNSSLTIKKPNELSRVLGLKTLATHGLAAVNSVPWDTIANYAKPFLNKVVSTTTNIVTRCLNRVCTNYMPYFFTLLLQLCTFTRSTNSRIKASMPTTIAKNTVKSVGKFCLEASFNYLKSPNFSKLINIIIWFLLLSVCLGSLIYSTAALGVLMSNLGMPSYCTGYREGYLNSTNVTIATYCTGSIPCSVCLSGLDSLDTYPSLETIQITISSFKWDLTAFGLVAEWFLAYILFTRFFYVLGLAAIMQLFFSYFAVHFISNSWLMWLIINLVQMAPISAMVRMYIFFASFYYVWKSYVHVVDGCNSSTCMMCYKRNRATRVECTTIVNGVRRSFYVYANGGKGFCKLHNWNCVNCDTFCAGSTFISDEVARDLSLQFKRPINPTDQSSYIVDSVTVKNGSIHLYFDKAGQKTYERHSLSHFVNLDNLRANNTKGSLPINVIVFDGESKCEESSAKSASVYYSQLMCQPILLLDQALVSDVGDSAEVAVKMFDAYVNTFSSTFNVPMEKLKTLVATAEAELAKNVSLDNVLSTFISAARQGFVDSDVETKDVVECLKLSHQSDIEVTGDSCNNYMLTYNKVENMTPRDLGACIDCSARHINAQVAKSHNIALIWNVKDFMSLSEQLRKQIRSAAKKNNLPFKLTCATTRQVVNVVTTKIALKGG

SEQ ID NO: 16364 - protein, 1946 aa, Artificial Sequence
  SARS-CoV-2__MT385465.1__non-structural protein 3 (NSP3)
MAPTKVTFGDDTVIEVQGYKSVNITFELDERIDKVLNEKCSAYTVELGTEVNEFACVVADAVIKTLQPVSELLTPLGIDLDEWSMATYYLFDESGEFKLASHMYCSFYPPDEDEEEGDCEEEEFEPSTQYEYGTEDDYQGKPLEFGATSAALQPEEEQEEDWLDDDSQQTVGQQDGSEDNQTTTIQTIVEVQPQLEMELTPVVQTIEVNSFSGYLKLTDNVYIKNADIVEEAKKVKPTVVVNAANVYLKHGGGVAGALNKATNNAMQVESDDYIATNGPLKVGGSCVLSGHNLAKHCLHVVGPNVNKGEDIQLLKSAYENFNQHEVLLAPLLSAGIFGADPIHSLRVCVDTVRTNVYLAVFDKNLYDKLVSSFLEMKSEKQVEQKIAEIPKEEVKPFITESKPSVEQRKQDDKKIKACVEEVTTTLEETKFLTENLLLYIDINGNLHPDSATLVSDIDITFLKKDAPYIVGDVVQEGVLTAVVIPTKKAGGTTEMLAKALRKVPTDNYITTYPGQGLNGYTVEEAKTVLKKCKSAFYILPSIISNEKQEILGTVSWNLREMLAHAEETRKLMPVCVETKAIVSTIQRKYKGIKIQEGVVDYGARFYFYTSKTTVASLINTLNDLNETLVTMPLGYVTHGLNLEEAARYMRSLKVPATVSVSSPDAVTAYNGYLTSSSKTPEEHFIETISLAGSYKDWSYSGQSTQLGIEFLKRGDKSVYYTSNPTTFHLDGEVITFDNLKTLLSLREVRTIKVFTTVDNINLHTQVVDMSMTYGQQFGPTYLDGADVTKIKPHNSHEGKTFYVLPNDDTLRVEAFEYYHTTDPSFLGRYMSALNHTKKWKYPQVNGLTSIKWADNNCYLATALLTLQQIELKFNPPALQDAYYRARAGEAANFCALILAYCNKTVGELGDVRETMSYLFQHANLDSCKRVLNVVCKTCGQQQTTLKGVEAVMYMGTLSYEQFKKGVQIPCTCGKQATKYLVQQESPFVMMSAPPAQYELKHGTFTCASEYTGNYQCGHYKHITSKETLYCIDGALLTKSSEYKGPITDVFYKENSYTTTIKPVTYKLDGVVCTEIDPKLDNYYKKDNSYFTEQPIDLVPNQPYPNASFDNFKFVCDNIKFADDLNQLTGYKKPASRELKVTFFPDLNGDVVAIDYKHYTPSFKKGAKLLHKPIVWHVNNATNKATYKPNTWCIRCLWSTKPVETSNSFDVLKSEDAQGMDNLACEDLKPVSEEVVENPTIQKDVLECNVKTTEVVGDIILKPANNSLKITEEVGHTDLMAAYVDNSSLTIKKPNELSRVLGLKTLATHGLAAVNSVPWDTIANYAKPFLNKVVSTTTNIVTRCLNRVCTNYMPYFFTLLLQLCTFTRSTNSRIKASMPTTIAKNTVKSVGKFCLEASFNYLKSPNFSKLINIIIWFLLLSVCLGSLIYSTAALGVLMSNLGMPSYCTGYREGYLNFTNVTIATYCTGSIPCSVCLSGLDSLDTYPSLETIQITISSFKWDLTAFGLVAEWFLAYILFTRFFYVLGLAAIMQLFFSYFAVHFISNSWLMWLIINLVQMAPISAMVRMYIFFASFYYVWKSYVHVVDGCNSSTCMMCYKRNRATRVECTTIVNGVRRSFYVYANGGKGFCKLHNWNCVNCDTFCAGSTFISDEVARDLSLQFKRPINPTDQSSYIVDSVTVKNGSIHLYFDKAGQKTYERHSLSHFVNLDNLRANNTKGSLPINVIVFDGKSKCEESSAKSASVYYSQLMCQPILLLDQALVSDVGDSAEVAVKMFDAYVNTFSSTFNVPMEKLKTLVATAEAELAKNVSLDNVLSTFISAARQGFVDSDVETKDVVECLKLSHQSDIEVTGDSCNNYMLTYNKVENMTPRDLGACIDCSARHINAQVAKSHNIALIWNVKDFMSLSEQLRKQIRSAAKKNNLPFKLTCATTRQVVNVVTTKIALKGG

SEQ ID NO: 16365 - protein, 1946 aa, Artificial Sequence
  SARS-CoV-2__MT385471.1__non-structural protein 3 (NSP3)
MAPTKVTFGDDTVIEVQGYKSVNITFELDERIDKVLNEKCSAYTVELGTEVNEFACVVADAVIKTLQPVSELLTPLGIDLDEWSMATYYLFDESGEFKLASHMYCSFYPPDEDEEEGDCEEEEFEPSTQYEYGTEDDYQGKPLEFGATSAALQPEEEQEEDWLDDDSQQTVGQQDGSEDNQTTTIQTIVEVQPQLEMELTPVVQTIEVNSFSGYLKLTDNVYIKNADIVEEAKKVKPTVVVNAANVYLKHGGGVAGALNKATNNAMQVESDDYIATNGPLKVGGSCVLSGHNLAKHCLHVVGPNVNKGEDIQLLKSAYENFNQHEVLLAPLLSAGIFGADPIHSLRVCVDTVRTNVYLAVFDKNLYDKLVSSFLEMKSEKQVEQKIAEIPKEEVKPFITESKPSVEQRKQDDKKIKACVEEVTTTLEETKFLTENLLLYIDINGNLHPDSATLVSDIDITFLKKDAPYIVGDVVQEGVLTAVVIPTKKAGGTTEMLAKALRKVPTDNYITTYPGQGLNGYTVEEAKTVLKKCKSAFYILPSIISNEKQEILGTVSWNLREMLAHAEETRKLMPVCVETKAIVSTIQRKYKGIKIQEGVVDYGARFYFYTSKTTVASLINTLNDLNETLVTMPLGYVTHGLNLEEAARYMRSLKVPATVSVSSPDAVTAYNGYLTSSSKTPEEHFIETISLAGSYKDWSYSGQSTQLGIEFLKRGDKSVYYTSNPTTFHLDGEVITFDNLKTLLSLREVRTIKVFTTVDNINLHTQVVDMSMTYGQQFGPTYLDGADVTKIKPHNSHEGKTFYVLPNDDTLRVEAFEYYHTTDPSFLGRYMSALNHTKKWKYPQVNGLTSIKWADNNCYLATALLTLQQIELKFNPPALQDAYYRARAGEAANFCALILAYCNKTVGELGDVRETMSYLFQHANLDSCKRVLNVVCKTCGQQQTTLKGVEAVMYMGTLSYEQFKKGVQIPCTCGKQATKYLVQQESPFVMMSAPPAQYELKHGTFTCASEYTGNYQCGHYKHITSKETLYCIDGALLTKSSEYKGPITDVFYKENSYTTTIKPVTYKLDGVVCTEIDPKLDNYYKKDNSYFTEQPIDLVPNQPYPNASFDNFKFVCDNIKFADDLNQLTGYKKPASRELKVTFFPDLNGDVVAIDYKHYTPSFKKGAKLLHKPIVWHVNNATNKATYKPNTWCIRCLWSTKPVETSNSFDVLKSEDAQGMDNLACEDLKPVSEEVVENPTIQKDVLECNVKTTEVVGDIILKPANNSLKITEEVGHTDLMAAYVDNSSLTIKKPNELSRVLGLKTLATHGLAAVNSVPWDTIANYAKPFLNKVVSTTTNIVTRCLNRVCTNYMPYFFTLLLQLCTFTRSTNSRIKASMPTTIAKNTVKSVGKFCLEASFNYLKSPNFSKLINIIIWFLLLSVCLGSLIYSTAALGVLMSNLGMPSYCTGYREGYLNSTNVTIATYCTGSIPCSVCLSGLDSLDTYPSLETIQITISSFKWDLTAFGLVAEWFLAYILFTRFFYILGLAAIMQLFFSYFAVHFISNSWLMWLIINLVQMAPISAMVRMYIFFASFYYVWKSYVHVVDGCNSSTCMMCYKRNRATRVECTTIVNGVRRSFYVYANGGKGFCKLHNWNCVNCDTFCAGSTFISDEVARDLSLQFKRPINPTDQSSYIVDSVTVKNGSIHLYFDKAGQKTYERHSLSHFVNLDNLRANNTKGSLPINVIVFDGKSKCEESSAKSASVYYSQLMCQPILLLDQALVSDVGDSAEVAVKMFDAYVNTFSSTFNVPMEKLKTLVATAEAELAKNVSLDNVLSTFISAARQGFVDSDVETKDVVECLKLSHQSDIEVTGDSCNNYMLTYNKVENMTPRDLGACIDCSARHINAQVAKSHNIALIWNVKDFMSLSEQLRKQIRSAAKKNNLPFKLTCATTRQVVNVVTTKIALKGG

SEQ ID NO: 16366 - protein, 1946 aa, Artificial Sequence
  SARS-CoV-2__MT375458.1__non-structural protein 3 (NSP3)
MAPTKVTFGDDTVIEVQGYKSVNITFELDERIDKVLNEKCSAYTVELGTEVNEFACVVADAVIKTLQPVSELLTPLGIDLDEWSMATYYLFDESGEFKLASHMYCSFYPPDEDEEEGDCEEEEFEPSTQYEYGTEDDYQGKPLEFGATSAALQPEEEQEEDWLDDDSQQTVGQQDGSEDNQTTTIQTIVEVQPQLEMELTPVVQTIEVNSFSGYLKLTDNVYIKNADIVEEAKKVKPTVVVNAANVYLKHGGGVAGALNKATNNAMQVESDDYIATNGPLKVGGSCVLSGHNLAKHCLHVVGPNVNKGEDIQLLKSAYENFNQHEVLLAPLLSAGIFGADPIHSLRVCVDTVRTNVYLAVFDKNLYDKLVSSFLEMKSEKQVEQKIAEIPKEEVKPFITESKPSVEQRKQDDKKIKACVEEVTTTLEETKFLTENLLLYIDINGNLHPDSATLVSDIDITFLKKDAPYIVGDVVQEGVLTAVVIPTKKAGGTTEMLAKALRKVPTDNYITTYPGQGLNGYTVEEAKTVLKKCKSAFYILPSIISNEKQEILGTVSWNLREMLAHAEETRKLMPVCVETKAIVSTIQRKYKGIKIQEGVVDYGARFYFYTSKTTVASLINTLNDLNETLVTMPLGYVTHGLNLEEAARYMRSLKVPATVSVSSPDAVTAYNGYLTSSSKTPEEHFIETISLAGSYKDWSYSGQSTQLGIEFLKRGDKSVYYTSNPTTFHLDGEVITFDNLKTLLSLREVRTIKVFTTVDNINLHTQVVDMSMTYGQQFGPTYLDGADVTKIKPHNSHEGKTFYVLPNDDTLRVEAFEYYHTTDPSFLGRYMSALNHTKKWKYPQVNGLTSIKWADNNCYLATALLTLQQIELKFNPPALQDAYYRARAGEAANFCALILAYCNKTVGELGDVRETMSYLFQHANLDSCKRVLNVVCKTCGQQQTTLKGVEAVMYMGTLSYEQFKKGVQIPCTCGKQATKYLVQQESPFVMMSAQPAQYELKHGTFTCASEYTGNYQCGHYKHITSKETLYCIDGALLTKSSEYKGPITDVFYKENSYTTTIKPVTYKLDGVVCTEIDPKLDNYYKKDNSYFTEQPIDLVPNQPYPNASFDNFKFVCDNIKFADDLNQLTGYKKPASRELKVTFFPDLNGDVVAIDYKHYTPSFKKGAKLLHKPIVWHVNNATNKATYKPNTWCIRCLWSTKPVETSNSFDVLKSEDAQGMDNLACEDLKPVSEEVVENPTIQKDVLECNVKTTEVVGDIILKPANNSLKITEEVGHTDLMAAYVDNSSLTIKKPNELSRVLGLKTLATHGLAAVNSVPWDTIANYAKPFLNKVVSTTTNIVTRCLNRVCTNYMPYFFTLLLQLCTFTRSTNSRIKASMPTTIAKNTVKSVGKFCLEASFNYLKSPNFSKLINIIIWFLLLSVCLGSLIYSTAALGVLMSNLGMPSYCTGYREGYLNSTNVTIATYCTGSIPCSVCLSGLDSLDTYPSLETIQITISSFKWDLTAFGLVAEWFLAYILFTRFFYVLGLAAIMQLFFSYFAVHFISNSWLMWLIINLVQMAPISAMVRMYIFFASFYYVWKSYVHVVDGCNSSTCMMCYKRNRATRVECTTIVNGVRRSFYVYANGGKGFCKLHNWNCVNCDTFCAGSTFISDEVARDLSLQFKRPINPTDQSSYIVDSVTVKNGSIHLYFDKAGQKTYERHSLSHFVNLDNLRANNTKGSLPINVIVFDGKSKCEESSAKSASVYYSQLMCQPILLLDQALVSDVGDSAEVAVKMFDAYVNTFSSTFNVPMEKLKTLVATAEAELAKNVSLDNVLSTFISAARQGFVDSDVETKDVVECLKLSHQSDIEVTGDSCNNYMLTYNKVENMTPRDLGACIDCSARHINAQVAKSHNIALIWNVKDFMSLSEQLRKQIRSAAKKNNLPFKLTCATTRQVVNVVTTKIALKGG

SEQ ID NO: 16367 - protein, 1946 aa, Artificial Sequence
  SARS-CoV-2__MT252702.1__non-structural protein 3 (NSP3)
MAPTKVTFGDDTVIEVQGYKSVNITFELDERIDKVLNEKCSAYTVELGTEVNEFACVVADAVIKTLQPVSELLTPLGIDLDEWSMATYYLFDESGEFKLASHMYCSFYPPDEDEEEGDCEEEEFEPSTQYEYGTEDDYQGKPLEFGATSAALQPEEEQEEDWLDDDSQQTVGQQDGSEDNQTTTIQTIVEVQPQLEMELTPVVQTIEVNSFSGYLKLTDNVYIKNADIVEEAKKVKPTVVVNAANVYLKHGGGVAGALNKATNNAMQVESDDYIATNGPLKVGGSCVLSGHNLAKHCLHVVGPNVNKGEDIQLLKSAYENFNQHEVLLAPLLSAGIFGADPIHSLRVCVDTVRTNVYLAVFDKNLYDKLVSSFLEMKSEKQVEQKIAEIPKEEVKPFITESKPSVEQRKQDDKKIKACVEEVTTTLEETKFLTENLLLYIDINGNLHPDSATLVSDIDITFLKKDAPYIVGDVVQEGVLTAVVIPTKKAGGTTEMLAKALRKVPTDNYITTYPGQGLNGYTVEEAKTVLKKCKSAFYILPSIISNEKQEILGTVSWNLREMLAHAEETRKLMPVCVETKAIVSTIQRKYKGIKIQEGVVDYGARFYFYTSKTTVASLINTLNDLNETLVTMPLGYVTHGLNLEEAARYMRSLKVPATVSVSSPDAVTAYNGYLTSSSKTPEEHFIETISLAGSYKDWSYSGQSTQLGIEFLKRGDKSVYYTSNPTTFHLDGEVITFDNLKTLLSLREVRTIKVFTTVDNINLHTQVVDMSMTYGQQFGPTYLDGADVTKIKPHNSHEGKTFYVLPNDDTLRVEAFEYYHTTDPSFLGRYMSALNHTKKWKYPQVNGLTSIKWADNNCYLATALLTLQQIELKFNPPALQDAYYRARAGEAANFCALILAYCNKTVGELGDVRETMSYLFQHANLDSCKRVLNVVCKTCGQQQTTLKGVEAVMYMGTLSYEQFKKGVQIPCTCGKQATKYLVQQESPFVMMSAPPAQYELKHGTFTCASEYTGNYQCGHYKHITSKETLYCIDGALLTKSSEYKGPITDVFYKENSYTTTIKPVTYKLDGVVCTEIDPKLDNYYKKDNSYFTEQPIDLVPNQPYPNASFDNFKFVCDNIKFADDLNQLTGYKKPASRELKVTFFPDLNGDVVAIDYKHYTPSFKKGAKLLHKPIVWHVNNATNKATYKPNTWCIRCLWSTKPVETSNSFDVLKSEDAQGMDNLACEDLKPVSEEVVENPTIQKDVLECNVKTTEVVGDIILKPANNSLKITEEVGHTDLMAAYVDNSSLTIKKPNELSRVLGLKTLATHGLAAVNSVPWDTIANYAKPFLNKVVSTTTNIVTRCLNRVCTNYMPYFFTLLLQLCTFTRSTNSRIKASMPTTIAKNTVKSVGKFCLEASFNYLKSPNFSKLINIIIWFLLLSVCLGSLIYSTAALGVLMSNLGMPSYCTGYREGYLDSTNVTIATYCTGSIPCSVCLSGLDSLDTYPSLETIQITISSFKWDLTAFGLVAEWFLAYILFTRFFYVLGLAAIMQLFFSYFAVHFISNSWLMWLIINLVQMAPISAMVRMYIFFASFYYVWKSYVHVVDGCNSSTCMMCYKRNRATRVECTTIVNGVRRSFYVYANGGKGFCKLHNWNCVNCDTFCAGSTFISDEVARDLSLQFKRPINPTDQSSYIVDSVTVKNGSIHLYFDKAGQKTYERHSLSHFVNLDNLRANNTKGSLPINVIVFDGKSKCEESSAKSASVYYSQLMCQPILLLDQALVSDVGDSAEVAVKMFDAYVNTFSSTFNVPMEKLKTLVATAEAELAKNVSLDNVLSTFISAARQGFVDSDVETKDVVECLKLSHQSDIEVTGDSCNNYMLTYNKVENMTPRDLGACIDCSARHINAQVAKSHNIALIWNVKDFMSLSEQLRKQIRSAAKKNNLPFKLTCATTRQVVNVVTTKIALKGG

SEQ ID NO: 16368 - protein, 1946 aa, Artificial Sequence
  SARS-CoV-2__MT252708.1__non-structural protein 3 (NSP3)
MAPTKVTFGDDTVIEVQGYKSVNITFELDERIDKVLNEKCSAYTVELGTEVNEFACVVADAVIKTLQPVSELLTPLGIDLDEWSMATYYLFDESGEFKLASHMYCSFYPPDEDEEEGDCEEEEFEPSTQYEYGTEDDYQGKPLEFGATSAALQPEEEQEEDWLDDDSQQTVGQQDGSEDNQTTTIQTIVEVQPQLEMELTPVVQTIEVNSFSGYLKLTDNVYIKNADIVEEAKKVKPTVVVNAANVYLKHGGGVAGALNKATNNAMQVESDDYIATNGPLKVGGSCVLSGHNFAKHCLHVVGPNVNKGEDIQLLKSAYENFNQHEVLLAPLLSAGIFGADPIHSLRVCVDTVRTNVYLAVFDKNLYDKLVSSFLEMKSEKQVEQKIAEIPKEEVKPFITESKPSVEQRKQDDKKIKACVEEVTTTLEETKFLTENLLLYIDINGNLHPDSATLVSDIDITFLKKDAPYIVGDVVQEGVLTAVVIPTKKAGGTTEMLAKALRKVPTDNYITTYPGQGLNGYTVEEAKTVLKKCKSAFYILPSIISNEKQEILGTVSWNLREMLAHAEETRKLMPVCVETKAIVSTIQRKYKGIKIQEGVVDYGARFYFYTSKTTVASLINTLNDLNETLVTMPLGYVTHGLNLEEAARYMRSLKVPVTVSVSSPDAVTAYNGYLTSSSKTPEEHFIETTSLAGSYKDWSYSGQSTQLGIEFLKRGDKSVYYTSNPTTFHLDGEVITFDNLKTLLSLREVRTIKVFTTVDNINLHTQVVDMSMTYGQQFGPTYLDGADVTKIKPHNSHEGKTFYVLPNDDTLRVEAFEYYHTTDPSFLGRYMSALNHTKKWKYPQVNGLTSIKWADNNCYLATALLTLQQIELKFNPPALQDAYYRARAGEAANFCALILAYCNKTVGELGDVRETMSYLFQHANLDSCKRVLNVVCKTCGQQQTTLKGVEAVMYMGTLSYEQFKKGVQIPCTCGKQATKYLVQQESPFVMMSAPPAQYELKHGTFTCASEYTGNYQCGHYKHITSKETLYCIDGALLTKSSEYKGPITDVFYKENSYTTTIKPVTYKLDGVVCTEIDPKLDNYYKKDNSYFTEQPIDLVPNQPYPNASFDNFKFVCDNIKFADDLNQLTGYKKPASRELKVTFFPDLNGDVVAIDYKHYTPSFKKGAKLLHKPIVWHVNNATNKATYKPNTWCIRCLWSTKPVETSNSFDVLKSEDAQGMDNLACEDLKPVSEEVVENPTIQKDVLECNVKTTEVVGDIILKPANNSLKITEEVGHTDLMAAYVDNSSLTIKKPNELSRVLGLKTLATHGLAAVNSVPWDTIANYAKPFLNKVVSTTTNIVTRCLNRVCTNYMPYFFTLLLQLCTFTRSTNSRIKASMPTTIAKNTVKSVGKFCLEASFNYLKSPNFSKLINIIIWFLLLSVCLGSLIYSTAALGVLMSNLGMPSYCTGYREGYLNSTNVTIATYCTGSIPCSVCLSGLDSLDTYPSLETIQITISSFKWDLTAFGLVAEWFLAYILFTRFFYVLGLAAIMQLFFSYFAVHFISNSWLMWLIINLVQMAPISAMVRMYIFFASFYYVWKSYVHVVDGCNSSTCMMCYKRNRATRVECTTIVNGVRRSFYVYANGGKGFCKLHNWNCVNCDTFCAGSTFISDEVARDLSLQFKRPINPTDQSSYIVDSVTVKNGSIHLYFDKAGQKTYERHSLSHFVNLDNLRANNTKGSLPINVIVFDGKSKCEESSAKSASVYYSQLMCQPILLLDQALVSDVGDSAEVAVKMFDAYVNTFSSTFNVPMEKLKTLVATAEAELAKNVSLDNVLSTFISAARQGFVDSDVETKDVVECLKLSHQSDIEVTGDSCNNYMLTYNKVENMTPRDLGACIDCSARHINAQVAKSHNIALIWNVKDFMSLSEQLRKQIRSAAKKNNLPFKLTCATTRQVVNVVTTKIALKGG

SEQ ID NO: 16369 - protein, 1946 aa, Artificial Sequence
  SARS-CoV-2__MT252749.1__non-structural protein 3 (NSP3)
MAPTKVTFGDDTVIEVQGYKSVNITFELDERIDKVLNEKCSAYTVELGTEVNEFACVVADAVIKTLQPVSELLTPLGIDLDEWSMATYYLFDESGEFKLASHMYCSFYPPDEDEEEGDCEEEEFEPSTQYEYGTEDDYQGKPLEFGATSAALQPEEEQEEDWLDDDSQQTVGQQDGSEDNQTTTIQTIVEVQPQLEMELTPVVQTIEVNSFSGYLKLTDNVYIKNADIVEEAKKVKPTVVVNAANVYLKHGGGVAGALNKATNNAMQVESDDYIATNGPLKVGGSCVLSGHNLAKHCLHVVGPNVNEGEDIQLLKSAYENFNQHEVLLAPLLSAGIFGADPIHSLRVCVDTVRTNVYLAVFDKNLYDKLVSSFLEMKSEKQVEQKIAEIPKEEVKPFITESKPSVEQRKQDDKKIKACVEEVTTTLEETKFLTENLLLYIDINGNLHPDSATLVSDIDITFLKKDAPYIVGDVVQEGVLTAVVIPTKKAGGTTEMLAKALRKVPTDNYITTYPGQGLNGYTVEEAKTVLKKCKSAFYILPSIISNEKQEILGTVSWNLREMLAHAEETRKLMPVCVETKAIVSTIQRKYKGIKIQEGVVDYGARFYFYTSKTTVASLINTLNDLNETLVTMPLGYVTHGLNLEEAARYMRSLKVPATVSVSSPDAVTAYNGYLTSSSKTPEEHFIETISLAGSYKDWSYSGQSTQLGIEFLKRGDKSVYYTSNPTTFHLDGEVITFDNLKTLLSLREVRTIKVFTTVDNINLHTQVVDMSMTYGQQFGPTYLDGADVTKIKPHNSHEGKTFYVLPNDDTLRVEAFEYYHTTDPSFLGRYMSALNHTKKWKYPQVNGLTSIKWADNNCYLATALLTLQQIELKFNPPALQDAYYRARAGEAANFCALILAYCNKTVGELGDVRETMSYLFQHANLDSCKRVLNVVCKTCGQQQTTLKGVEAVMYMGTLSYEQFKKGVQIPCTCGKQATKYLVQQESPFVMMSAPPAQYELKHGTFTCASEYTGNYQCGHYKHITSKETLYCIDGALLTKSSEYKGPITDVFYKENSYTTTIKPVTYKLDGVVCTEIDPKLDNYYKKDNSYFTEQPIDLVPNQPYPNASFDNFKFVCDNIKFADDLNQLTGYKKPASRELKVTFFPDLNGDVVAIDYKHYTPSFKKGAKLLHKPIVWHVNNATNKATYKPNTWCIRCLWSTKPVETSNSFDVLKSEDAQGMDNLACEDLKPVSEEVVENPTIQKDVLECNVKTTEVVGDIILKPANNSLKITEEVGHTDLMAAYVDNSSLTIKKPNELSRVLGLKTLATHGLAAVNSVPWDTIANYAKPFLNKVVSTTTNIVTRCLNRVCTNYMPYFFTLLLQLCTFTRSTNSRIKASMPTTIAKNTVKSVGKFCLEASFNYLKSPNFSKLINIIIWFLLLSVCLGSLIYSTAALGVLMSNLGMPSYCTGYREGYLNSTNVTIATYCTGSIPCSVCLSGLDSLDTYPSLETIQITISSFKWDLTAFGLVAEWFLAYILFTRFFYVLGLAAIMQLFFSYFAVHFISNSWLMWLIINLVQMAPISAMVRMYIFFASFYYVWKSYVHVVDGCNSSTCMMCYKRNRATRVECTTIVNGVRRSFYVYANGGKGFCKLHNWNCVNCDTFCAGSTFISDEVARDLSLQFKRPINPTDQSSYIVDSVTVKNGSIHLYFDKAGQKTYERHSLSHFVNLDNLRANNTKGSLPINVIVFDGKSKCEESSAKSASVYYSQLMCQPILLLDQALVSDVGDSAEVAVKMFDAYVNTFSSTFNVPMEKLKTLVATAEAELAKNVSLDNVLSTFISAARQGFVDSDVETKDVVECLKLSHQSDIEVTGDSCNNYMLTYNKVENMTPRDLGACIDCSARHINAQVAKSHNIALIWNVKDFMSLSEQLRKQIRSAAKKNNLPFKLTCATTRQVVNVVTTKIALKGG

SEQ ID NO: 16370 - protein, 1946 aa, Artificial Sequence
  SARS-CoV-2__MT371049.1__non-structural protein 3 (NSP3)
MAPTKVTFGDDTVIEVQGYKSVNITFELDERIDKVLNEKCSAYTVELGTEVNEFACVVADAVIKTLQPVSELLTPLGIDLDEWSMATYYLFDESGEFKLASHMYCSFYPPDEDEEEGDCEEEEFEPSTQYEYGTEDDYQGKPLEFGATSAALQPEEEQEEDWLDDDSQQTVGQQDGSEDNQTTTIQTIVEVQPQLEMELTPVVQTIEVNSFSGYLKLTDNVYIKNADIVEEAKKVKPTVVVNAANVYLKHGGGVAGALNKATNNAMQVESDDYIATNGPLKVGGSCVLSGHNLAKHCLHVVGPNVNKGEDIQLLKSAYENFNQHEVLLAPLLSAGIFGADPIHSLRVCVDTVRTNVYLAVFDKNLYDKLVSSFLEMKSEKQVEQKIAEIPKEEVKPFITESKPSVEQRKQDDKKIKACVEEVTTTLEETKFLTENLLLYIDINGNLHPDSATLVSDIDITFLKKDAPYIVGDVVQEGVLTAVVIPTKKAGGTTEILAKALRKVPTDNYITTYPGQGLNGYTVEEAKTVLKKCKSAFYILPSIISNEKQEILGTVSWNLREMLAHAEETRKLMPVCVETKAIVSTIQRKYKGIKIQEGVVDYGARFYFYTSKTTVASLINTLNDLNETLVTMPLGYVTHGLNLEEAARYMRSLKVPATVSVSSPDAVTAYNGYLTSSSKTPEEHFIETISLAGSYKDWSYSGQSTQLGIEFLKRGDKSVYYTSNPTTFHLDGEVITFDNLKTLLSLREVRTIKVFTTVDNINLHTQVVDMSMTYGQQFGPTYLDGADVTKIKPHNSHEGKTFYVLPNDDTLRVEAFEYYHTTDPSFLGRYMSALNHTKKWKYPQVNGLTSIKWADNNCYLATALLTLQQIELKFNPPALQDAYYRARAGEAANFCALILAYCNKTVGELGDVRETMSYLFQHANLDSCKRVLNVVCKTCGQQQTTLKGVEAVMYMGTLSYEQFKKGVQIPCTCGKQATKYLVQQESPFVMMSAPPAQYELKHGTFTCASEYTGNYQCGHYKHITSKETLYCIDGALLTKSSEYKGPITDVFYKENSYTTTIKPVTYKLDGVVCTEIDPKLDNYYKKDNSYFTEQPIDLVPNQPYPNASFDNFKFVCDNIKFADDLNQLTGYKKPASRELKVTFFPDLNGDVVAIDYKHYTPSFKKGAKLLHKPIVWHVNNATNKATYKPNTWCIRCLWSTKPVETSNSFDVLKSEDAQGMDNLACEDLKPVSEEVVENPTIQKDVLECNVKTTEVVGDIILKPANNSLKITEEVGHTDLMAAYVDNSSLTIKKPNELSRVLGLKTLATHGLAAVNSVPWDTIANYAKPFLNKVVSTTTNIVTRCLNRVCTNYMPYFFTLLLQLCTFTRSTNSRIKASMPTTIAKNTVKSVGKFCLEASFNYLKSPNFSKLINIIIWFLLLSVCLGSLIYSTAALGVLMSNLGMPSYCTGYREGYLNSTNVTIATYCTGSIPCSVCLSGLDSLDTYPSLETIQITISSFKWDLTAFGLVAEWFLAYILFTRFFYVLGLAAIMQLFFSYFAVHFISNSWLMWLIINLVQMAPISAMVRMYIFFASFYYVWKSYVHVVDGCNSSTCMMCYKRNRATRVECTTIVNGVRRSFYVYANGGKGFCKLHNWNCVNCDTFCAGSTFISDEVARDLSLQFKRPINPTDQSSYIVDSVTVKNGSIHLYFDKAGQKTYERHSLSHFVNLDNLRANNTKGSLPINVIVFDGKSKCEESSAKSASVYYSQLMCQPILLLDQALVSDVGDSAEVAVKMFDAYVNTFSSTFNVPMEKLKTLVATAEAELAKNVSLDNVLSTFISAARQGFVDSDVETKDVVECLKLSHQSDIEVTGDSCNNYMLTYNKVENMTPRDLGACIDCSARHINAQVAKSHNIALIWNVKDFMSLSEQLRKQIRSAAKKNNLPFKLTCATTRQVVNVVTTKIALKGG

SEQ ID NO: 16371 - protein, 1946 aa, Artificial Sequence
  SARS-CoV-2__MT370859.1__non-structural protein 3 (NSP3)
MAPTKVTFGDDTVIEVQGYKSVNITFELDERIDKVLNEKCSAYTVELGTEVNEFACVVADAVIKTLQPVSELLTPLGIDLDEWSMATYYLFDESGEFKLASHMYCSFYPPDEDEEEGDCEEEEFEPSTQYEYGTEDDYQGKPLEFGATSAALQPEEEQEEDWLDDDSQQTVGQQDGSEDNQTTTIQTIVEVQPQLEMELTPVVQTIEVNSFSGYLKLTDNVYIKNADIVEEAKKVKPTVVVNAANVYLKHGGGVAGALNKATNNAMQVESDDYIATNGPLKVGGSCVLSGHNLAKHCLHVVGPNVNKGEDIQLLKSAYENFNQHEVLLAPLLSAGIFGADPIHSLRVCVDTVRTNVYLAVFDKNLYDKLVSSFLEMKSEKQVEQKIAEIPKEEVKPFITESKPSVEQRKQDDKKIKACVEEVTTTLEETKFLTENLLLYIDINGNLHPDSATLVSDIDITFLKKDAPYIVGDVVQEGVLTAVVIPTKKAGGTTEMLAKALRKVPTDNYITTYPGQGLNGYTVEEAKTVLKKCKSAFYILPSIISNEKQEILGTVSWNLREMLAHAEETRKLMPVCVETKAIVSTIQRKYKGIKIQEGVVDYGARFYFYTSKTTVASLINTLNDLNETLVTMPLGYVTHGLNLEEAARYMRSLKVPATVSVSSPDAVTAYNGYLTSSSKTPEEHFIETISLAGSYKDWSYSGQSTQLGIEFLKRGDKSVYYTSNPTTFHLDGEVITFDNLKTLLSLREVRTIKVFTTVDNINLHTQVVDMSMTYGQQFGPTYLDGADVTKIKPHNSHEGKTFYVLPNDDTLRVEAFEYYHTTDPSFLGRYMSALNHTKKWKYPQVNGLTSIKWADNNCYLATALLTLQQIELKFNPPALQDAYYRARAGEAANFCALILAYCNKTVGELGDVRETMSYLFQHANLDSCKRVLNVVCKTCGQQQTTLKGVEAVMYMGTLSYEQFKKGVQIPCTCGKQATKYLVQQESPFVMMSAPPAQYELKHGTFTCASEYTGNYQCGHYKHITSKETLYCIDGALLTKSSEYKGPITDVFYKENSYTTTIKPVTYKLDGVVCTEIDPKLDNYYKKDNSYFTEQPIDLVPNQPYPNASFDNFKFVCDNIKFADDLNQLTGYKKPASRELKVTFFPDLNGDVVAIDYKHYTPSFKKGAKLLHKPIVWHVNNATNKATYKPNTWCIRCLWSTKPVETSNSFDVLKSEDAQGMDNLACEDLKPVSEEVVENPTIQKDVLECNVKTTEVVGDIILKPANNSLKITEEVGHTDLMAAYVDNSSLTIKKPNELSRVLGLKTLATHGLAAVNSVPWDTIANYAKPFLNKVVSTTTNIVTRCLNRVCTNYMPYFFTLLLQLCTFTRSTNSRIKASMPTTIAKNTVKSVGKFCLEASFNYLKSPNFSKLINIIIWFLLLSVCLGSLIYSTAALGVLMSNLGMPSYCTGYREGYLNSTNVTIATYCTGSIPCSVCLSGLDSLDTYPSLETIQITISSFKWDLTAFGLVAEWFLAYILFTRFFYVLGLAAIMQLFFSYFAVHFISNSWLMWLIINLVQMAPISAMVRMYIFFASFYYVWKSYVHVVDGCNSSTCMMCYKRNRATRVECTTIVNGVRRSFYVYANGGKGFCKLHNWNCVNCDTFCAGSTFISDEVARDLSLQFKRPINPTDQSSYIVDSVTVKNGSIRLYFDKAGQKTYERHSLSHFVNLDNLRANNTKGSLPINVIVFDGKSKCEESSAKSASVYYSQLMCQPILLLDQALVSDVGDSAEVAVKMFDAYVNTFSSTFNVPMEKLKTLVATAEAELAKNVSLDNVLSTFISAARQGFVDSDVETKDVVECLKLSHQSDIEVTGDSCNNYMLTYNKVENMTPRDLGACIDCSARHINAQVAKSHNIALIWNVKDFMSLSEQLRKQIRSAAKKNNLPFKLTCATTRQVVNVVTTKIALKGG

SEQ ID NO: 16372 - protein, 1946 aa, Artificial Sequence
  SARS-CoV-2__MT370862.1__non-structural protein 3 (NSP3)
MAPTKVTFGDDTVIEVQGYKSVNITFELDERIDKVLNEKCSAYTVELGTEVNEFACVVADAVIKTLQPVSELLTPLGIDLDEWSMATYYLFDESGEFKLASHMYCSFYPPDEDEEEGDCEEEEFEPSTQYEYGTEDDYQGKPLEFGATSAALQPEEEQEEDWLDDDSQQTVGQQDGSEDNQTTTIQTIVEVQPQLEMELTPVVQTIEVNSFSGYLKLTDNVYIKNADIVEEAKKVKPTVVVNAANVYLKHGGGVAGALNKATNNAMQVESDDYIATNGPLKVGGSCVLSGHNLAKHCLHVVGPNVNKGEDIQLLKSAYENFNQHEVLLAPLLSAGIFGADPIHSLRVCVDTVRTNVYLAVFDKNLYDKLVSSFLEMKSEKQVEQKIAEIPKEEVKPFITESKPSVEQRKQDDKKIKACVEEVTTTLEETKFLTENLLLYIDINGNLHPDSATLVSDIDITFLKKDAPYIVGDVVQEGVLTAVVIPTKKAGGTTEMLAKALRKVPTDNYITTYPGQGLNGYTVEEAKTVLKKCKSAFYILPSIISNEKQEILGTVSWNLREMLAHAEETRKLMPVCVETKAIVSTIQRKYKGIKIQEGVVDYGARFYFYTSKTTVASLINTLNDLNETLVTMPLGYVTHGLNLEEAARYMRSLKVPATVSVSSPDAVTAYNGYLTSSSKTPEEHFIETISLAGSYKDWSYSGQSTQLGIEFLKRGDKSVYYTSNPTTFHLDGEVITFDNLKTLLSLREVRTIKVFTTVDNINLHTQVVDMSMTYGQQFGPTYLDGADVTKIKPHNSHEGKTFYVLPNDDTLRVEAFEYYHTTDPSFLGRYMSALNHTKKWKYPQVNGLTSIKWADNNCYLATALLTLQQIELKFNPPALQDAYYRARAGEAANFCALILAYCNKTVGELGDVRETMSYLFQHANLDSCKRVLNVVCKTCGQQQTTLKGVEAVMYMGTLSYEQFKKGVQIPCTCGKQATKYLVQQESPFVMMSAPPAQYELKHGTFTCASEYTGNYQCGHYKHITSKETLYCIDGALLTKSSEYKGPITDVFYKENSYTTTIKPVTYKLDGVVCTEIDPKLDNYYKKDNSYFTEQPIDLVPNQPYPNASFDNFKFVCDNIKFADDLNQLTGYKKPASRELKVTFFPDLNGDVVAIDYKHYTPSFKKGAKLLHKPIVWHVNNATNKATYKPNTWCIRCLWSTKPVGTSNSFDVLKSEDAQGMDNLACEDLKPVSEEVVENPTIQKDVLECNVKTTEVVGDIILKPANNSLKITEEVGHTDLMAAYVDNSSLTIKKPNELSRVLGLKTLATHGLAAVNSVPWDTIANYAKPFLNKVVSTTTNIVTRCLNRVCTNYMPYFFTLLLQLCTFTRSTNSRIKASMPTTIAKNTVKSVGKFCLEASFNYLKSPNFSKLINIIIWFLLLSVCLGSLIYSTAALGVLMSNLGMPSYCTGYREGYLNSTNVTIATYCTGSIPCSVCLSGLDSLDTYPSLETIQITISSFKWDLTAFGLVAEWFLAYILFTRFFYVLGLAAIMQLFFSYFAVHFISNSWLMWLIINLVQMAPISAMVRMYIFFASFYYVWKSYVHVVDGCNSSTCMMCYKRNRATRVECTTIVNGVRRSFYVYANGGKGFCKLHNWNCVNCDTFCAGSTFISDEVARDLSLQFKRPINPTDQSSYIVDSVTVKNGSIHLYFDKAGQKTYERHSLSHFVNLDNLRANNTKGSLPINVIVFDGKSKCEESSAKSASVYYSQLMCQPILLLDQALVSDVGDSAEVAVKMFDAYVNTFSSTFNVPMEKLKTLVATAEAELAKNVSLDNVLSTFISAARQGFVDSDVETKDVVECLKLSHQSDIEVTGDSCNNYMLTYNKVENMTPRDLGACIDCSARHINAQVAKSHNIALIWNVKDFMSLSEQLRKQIRSAAKKNNLPFKLTCATTRQVVNVVTTKIALKGG

SEQ ID NO: 16373 - protein, 1946 aa, Artificial Sequence
  SARS-CoV-2__MT370908.1__non-structural protein 3 (NSP3)
MAPTKVTFGDDTVIEVQGYKSVNITFELDERIDKVLNEKCSAYTVELGTEVNEFACVVADAVIKTLQPVSELLTPLGIDLDEWSMATYYLFDESGEFKLASHMYCSFYPPDEDEEEGDCEEEEFEPSTQYEYGTEDDYQGKPLEFGATSAVLQPEEEQEEDWLDDDSQQTVGQQDGSEDNQTTTIQTIVEVQPQLEMELTPVVQTIEVNSFSGYLKLTDNVYIKNADIVEEAKKVKPTVVVNAANVYLKHGGGVAGALNKATNNAMQVESDDYIATNGPLKVGGSCVLSGHNLAKHCLHVVGPNVNKGEDIQLLKSAYENFNQHEVLLAPLLSAGIFGADPIHSLRVCVDTVRTNVYLAVFDKNLYDKLVSSFLEMKSEKQVEQKIAEIPKEEVKPFITESKPSVEQRKQDDKKIKACVEEVTTTLEETKFLTENLLLYIDINGNLHPDSATLVSDIDITFLKKDAPYIVGDVVQEGVLTAVVIPTKKAGGTTEMLAKALRKVPTDNYITTYPGQGLNGYTVEEAKTVLKKCKSAFYILPSIISNEKQEILGTVSWNLREMLAHAEETRKLMPVCVETKAIVSTIQRKYKGIKIQEGVVDYGARFYFYTSKTTVASLINTLNDLNETLVTMPLGYVTHGLNLEEAARYMRSLKVPATVSVSSPDAVTAYNGYLTSSSKTPEEHFIETISLAGSYKDWSYSGQSTQLGIEFLKRGDKSVYYTSNPTTFHLDGEVITFDNLKTLLSLREVRTIKVFTTVDNINLHTQVVDMSMTYGQQFGPTYLDGADVTKIKPHNSHEGKTFYVLPNDDTLRVEAFEYYHTTDPSFLGRYMSALNHTKKWKYPQVNGLTSIKWADNNCYLATALLTLQQIELKFNPPALQDAYYRARAGEAANFCALILAYCNKTVGELGDVRETMSYLFQHANLDSCKRVLNVVCKTCGQQQTTLKGVEAVMYMGTLSYEQFKKGVQIPCTCGKQATKYLVQQESPFVMMSAPPAQYELKHGTFTCASEYTGNYQCGHYKHITSKETLYCIDGALLTKSSEYKGPITDVFYKENSYTTTIKPVTYKLDGVVCTEIDPKLDNYYKKDNSYFTEQPIDLVPNQPYPNASFDNFKFVCDNIKFADDLNQLTGYKKPASRELKVTFFPDLNGDVVAIDYKHYTPSFKKGAKLLHKPIVWHVNNATNKATYKPNTWCIRCLWSTKPVETSNSFDVLKSEDAQGMDNLACEDLKPVSEEVVENPTIQKDVLECNVKTTEVVGDIILKPANNSLKITEEVGHTDLMAAYVDNSSLTIKKPNELSRVLGLKTLATHGLAAVNSVPWDTIANYAKPFLNKVVSTTTNIVTRCLNRVCTNYMPYFFTLLLQLCTFTRSTNSRIKASMPTTIAKNTVKSVGKFCLEASFNYLKSPNFSKLINIIIWFLLLSVCLGSLIYSTAALGVLMSNLGMPSYCTGYREGYLNSTNVTIATYCTGSIPCSVCLSGLDSLDTYPSLETIQITISSFKWDLTAFGLVAEWFLAYILFTRFFYVLGLAAIMQLFFSYFAVHFISNSWLMWLIINLVQMAPISAMVRMYIFFASFYYVWKSYVHVVDGCNSSTCMMCYKRNRATRVECTTIVNGVRRSFYVYANGGKGFCKLHNWNCVNCDTFCAGSTFISDEVARDLSLQFKRPINPTDQSSYIVDSVTVKNGSIHLYFDKAGQKTYERHSLSHFVNLDNLRANNTKGSLPINVIVFDGKSKCEESSAKSASVYYSQLMCQPILLLDQALVSDVGDSAEVAVKMFDAYVNTFSSTFNVPMEKLKTLVATAEAELAKNVSLDNVLSTFISAARQGFVDSDVETKDVVECLKLSHQSDIEVTGDSCNNYMLTYNKVENMTPRDLGACIDCSARHINAQVAKSHNIALIWNVKDFMSLSEQLRKQIRSAAKKNNLPFKLTCATTRQVVNVVTTKIALKGG

SEQ ID NO: 16374 - protein, 1946 aa, Artificial Sequence
  SARS-CoV-2__MT370953.1__non-structural protein 3 (NSP3)
MAPTKVTFGDDTVIEVQGYKSVNITFELDERIDKVLNEKCSAYTVELGTEVNEFACVVADAVIKTLQPVSELLTPLGIDLDEWSMATYYLFDESGEFKLASHMYCSFYPPDEDEEEGDCEEEEFEPSTQYEYGTEDDYQGKPLEFGATSAALQPEEEQEEDWLDDDSQQTVGQQDGSEDNQTTTIQTIVEVQPQLEMELTPVVQTIEVNSFSGYLKLTDNVYIKNADIVEEAKKVKPTVVVNAANVYLKHGGGVAGALNKATNNAMQVESDDYIATNGPLKVGGSCVLSGHNLAKHCLHVVGPNVNKGEDIQLLKSAYENFNQHEVLLAPLLSAGIFGADPIHSLRVCVDTVRTNVYLAVFDKNLYDKLVSSFLEMKSEKQVEQKIAEIPKEEVKPFITESKPSVEQRKQDDKKIKACVEEVTTTLEETKFLTENLLLYIDINGNLHPDSATLVSDIDITFLKKDAPYIVGDVVQEGVLTAVVIPTKKAGGTTEMLAKALRKVPTDNYITTYPGQGLNGYTVEEAKTVLKKCKSAFYILPSIISNEKQEILGTVSWNLREMLAHAEETRKLMPVCVETKAIVSTIQRKYKGIKIQEGVVDYGARFYFYTCKTTVASLINTLNDLNETLVTMPLGYVTHGLNLEEAARYMRSLKVPATVSVSSPDAVTAYNGYLTSSSKTPEEHFIETISLAGSYKDWSYSGQSTQLGIEFLKRGDKSVYYTSNPTTFHLDGEVITFDNLKTLLSLREVRTIKVFTTVDNINLHTQVVDMSMTYGQQFGPTYLDGADVTKIKPHNSHEGKTFYVLPNDDTLRVEAFEYYHTTDPSFLGRYMSALNHTKKWKYPQVNGLTSIKWADNNCYLATALLTLQQIELKFNPPALQDAYYRARAGEAANFCALILAYCNKTVGELGDVRETMSYLFQHANLDSCKRVLNVVCKTCGQQQTTLKGVEAVMYMGTLSYEQFKKGVQIPCTCGKQATKYLVQQESPFVMMSAPPAQYELKHGTFTCASEYTGNYQCGHYKHITSKETLYCIDGALLTKSSEYKGPITDVFYKENSYTTTIKPVTYKLDGVVCTEIDPKLDNYYKKDNSYFTEQPIDLVPNQPYPNASFDNFKFVCDNIKFADDLNQLTGYKKPASRELKVTFFPDLNGDVVAIDYKHYTPSFKKGAKLLHKPIVWHVNNATNKATYKPNTWCIRCLWSTKPVETSNSFDVLKSEDAQGMDNLACEDLKPVSEEVVENPTIQKDVLECNVKTTEVVGDIILKPANNSLKITEEVGHTDLMAAYVDNSSLTIKKPNELSRVLGLKTLATHGLAAVNSVPWDTIANYAKPFLNKVVSTTTNIVTRCLNRVCTNYMPYFFTLLLQLCTFTRSTNSRIKASMPTTIAKNTVKSVGKFCLEASFNYLKSPNFSKLINIIIWFLLLSVCLGSLIYSTAALGVLMSNLGMPSYCTGYREGYLNSTNVTIATYCTGSIPCSVCLSGLDSLDTYPSLETIQITISSFKWDLTAFGLVAEWFLAYILFTRFFYVLGLAAIMQLFFSYFAVHFISNSWLMWLIINLVQMAPISAMVRMYIFFASFYYVWKSYVHVVDGCNSSTCMMCYKRNRATRVECTTIVNGVRRSFYVYANGGKGFCKLHNWNCVNCDTFCAGSTFISDEVARDLSLQFKRPINPTDQSSYIVDSVTVKNGSIHLYFDKAGQKTYERHSLSHFVNLDNLRANNTKGSLPINVIVFDGKSKCEESSAKSASVYYSQLMCQPILLLDQALVSDVGDSAEVAVKMFDAYVNTFSSTFNVPMEKLKTLVATAEAELAKNVSLDNVLSTFISAARQGFVDSDVETKDVVECLKLSHQSDIEVTGDSCNNYMLTYNKVENMTPRDLGACIDCSARHINAQVAKSHNIALIWNVKDFMSLSEQLRKQIRSAAKKNNLPFKLTCATTRQVVNVVTTKIALKGG

SEQ ID NO: 16375 - protein, 1946 aa, Artificial Sequence
  SARS-CoV-2__MT370987.1__non-structural protein 3 (NSP3)
MAPTKVTFGDDTVIEVQGYKSVNITFELDERIDKVLNEKCSAYTVELGTEVNEFACVVADAVIKTLQPVSELLTPLGIDLDEWSMATYYLFDESGEFKLASHMYCSFYPPDEDEEEGDCEEEEFEPSTQYEYGTEDDYQGKPLEFGATSAALQPEEEQEEDWLDDDSQQTVGQQDGSEDNQTTTIQTIVEVQPQLEMELTPVVQTIEVNSFSGYLKLTDNVYIKNADIVEEAKKVKPTVVVNAANVYLKHGGGVAGALNKATNNAMQVESDDYIATNGPLKVGGSCVLSGHNLAKHCLHVVGPNVNKGEDIQLLKSAYENFNQHEVLLAPLLSAGIFGADPIHSLRVCVDTVRTNVYLAVFDKNLYDKLVSSFLEMKSEKQVEQKIAEIPKEEVKPFITESKPSVEQRKQDDKKIKACVEEVTTTLEETKFLTENLLLYIDINGNLHPDSATLVSDIDITFLKKDAPYIVGDVVQEGVLTAVVIPTKKAGGTTEMLAKALRKVPTDNYITTYPGQGLNGYTVEEAKTVLKKCKSAFYILPSIISNEKQEILGTVSWNLREMLAHAEETRKLMPVCVETKAIVSTIQRKYKGIKIQEGVVDYGARFYFYTSKTTVASLINTLNDLNETLVTMPLGYVTHGLNLEEAARYMRSLKVPATVSVSSPDAVTAYNGYLTSSSKTPEEHFIETISLAGSYKDWSYSGQSTQLGIEFLKRGDKSVYYTSNPTTFHLDGEVITFDNLKTLLSLREVRTIKVFTTVDNINLHTQVVDMSMTYGQQFGPTYLDGADVTKIKPHNSHEGKTFYVLPNDDTLRVEAFEYYHTTDPSFLGRYMSALNHTKKWKYPQVNGLTSIKWADNNCYLATALLTLQQIELKFNPPALQDAYYRARAGEAANFCALILAYCNKTVGELGDVRETMSYLFQHANLDSCKRVLNVVCKTCGQQQTTLKGVEAVMYMGTLSYEQFKKGVQIPCTCGKQATKYLVQQESPFVMMSAPPAQYELKHGTFTCASEYTGNYQCGHYKHITSKETLYCIDGALLTKSSEYKGPITDVFYKENSYTTTIKPVTYKLDGVVCTEIDPKLDNYYKKDNSYFTEQPIDLVPNQPYPNASFDNFKFVCDNIKFADDLNQLTGYKKPASRELKVTFFPDLNGDVVAIDYKHYTPSFKKGAKLLHKPIVWHVNNATNKATYKPNTWCIRCLWSTKPVETSNSFDVLKSEDAQGMDNLACEDLKPVSEEVVENPTIQKDVLECNVKTTEVVGDIILKPANNSLKITEEVGHTDLMAAYVDNSSLTIKKPNELSRVLGLKTLATHGLAAVNSVPWDTIANYAKPFLNKVVSTTTNIVTRCLNRVCTNYMPYFFTLLLQLCTFTRSTNSRIKASMPTTIAKNTVKSVGKFCLEASFNYLKSPNFSKLINIIIWFLLLSVCLGSLIYSTAALGVLMSNLGMPSYCTGYREGYLNSTNVTIATYCTGSIPCSVCLSGLDSLDTYPSLETIQITISSFKWDLTAFGLVAEWFLAYILFTRFFYVLGLAAIMQLFFSYFAVHFISNSWLMWLIINLVQMAPISAMVRMYIFFASFYYVWKSYVHVVDGCNSSTCMMCYKRNRATRVECTTIVNGVRRSFYVYANGGKGFCKLHNWNCVNCDTFCAGSTFISDEVARDLSLQFKRPINPIDQSSYIVDSVTVKNGSIHLYFDKAGQKTYERHSLSHFVNLDNLRANNTKGSLPINVIVFDGKSKCEESSAKSASVYYSQLMCQPILLLDQALVSDVGDSAEVAVKMFDAYVNTFSSTFNVPMEKLKTLVATAEAELAKNVSLDNVLSTFISAARQGFVDSDVETKDVVECLKLSHQSDIEVTGDSCNNYMLTYNKVENMTPRDLGACIDCSARHINAQVAKSHNIALIWNVKDFMSLSEQLRKQIRSAAKKNNLPFKLTCATTRQVVNVVTTKIALKGG

SEQ ID NO: 16376 - protein, 1946 aa, Artificial Sequence
  SARS-CoV-2__MT371002.1__non-structural protein 3 (NSP3)
MAPTKVTFGDDTVIEVQGYKSVNITFELDERIDKVLNEKCSAYTVELGTEVNEFACVVADAVIKTLQPVSELLTPLGIDLDEWSMATYYLFDESGEFKLASHMYCSFYPPDEDEEEGDCEEEEFEPSTQYEYGTEDDYQGKPLEFGATSAALQPEEEQEEDWLDDDSQQTVGQQDGSEDNQTTTIQTIVEVQPQLEMELTPVVQTIEVNSFSGYLKLTDNVYIKNADIVEEAKKVKPTVVVNAANVYLKHGGGVAGALNKATNNAMQVESDDYIATNGPLKVGGSCVLSGHNLAKHCLHVVGPNVNKGEDIQLLKSAYENFNQHEVLLAPLLSAGIFGADPIHSLRVCVDTVRTNVYLAVFDKNLYDKLVSSFLEMKSEKQVEQKIAEIPKEEVKPFITESKPSVEQRKQDDKKIKACVEEVTTTLEETKFLTENLLLYIDINGNLHPDSATLVSDIDITFLKKDAPYIVGDVVQEGVLTAVVIPTKKAGGTTEMLAKALRKVPTDNYITTYPGQGLNGYTVEEAKTVLKKCKSAFYILPSIISNEKQEILGTVSWNLREMLAHAEETRKLMPVCVETKAIVSTIQRKYKGIKIQEGVVDYGARFYFYTSKTTVASLINILNDLNETLVTMPLGYVTHGLNLEEAARYMRSLKVPATVSVSSPDAVTAYNGYLTSSSKTPEEHFIETISLAGSYKDWSYSGQSTQLGIEFLKRGDKSVYYTSNPTTFHLDGEVITFDNLKTLLSLREVRTIKVFTTVDNINLHTQVVDMSMTYGQQFGPTYLDGADVTKIKPHNSHEGKTFYVLPNDDTLRVEAFEYYHTTDPSFLGRYMSALNHTKKWKYPQVNGLTSIKWADNNCYLATALLTLQQIELKFNPPALQDAYYRARAGEAANFCALILAYCNKTVGELGDVRETMSYLFQHANLDSCKRVLNVVCKTCGQQQTTLKGVEAVMYMGTLSYEQFKKGVQIPCTCGKQATKYLVQQESPFVMMSAPPAQYELKHGTFTCASEYTGNYQCGHYKHITSKETLYCIDGALLTKSSEYKGPITDVFYKENSYTTTIKPVTYKLDGVVCTEIDPKLDNYYKKDNSYFTEQPIDLVPNQPYPNASFDNFKFVCDNIKFADDLNQLTGYKKPASRELKVTFFPDLNGDVVAIDYKHYTPSFKKGAKLLHKPIVWHVNNATNKATYKPNTWCIRCLWSTKPVETSNSFDVLKSEDAQGMDNLACEDLKPVSEEVVENPTIQKDVLECNVKTTEVVGDIILKPANNSLKITEEVGHTDLMAAYVDNSSLTIKKPNELSRVLGLKTLATHGLAAVNSVPWDTIANYAKPFLNKVVSTTTNIVTRCLNRVCTNYMPYFFTLLLQLCTFTRSTNSRIKASMPTTIAKNTVKSVGKFCLEASFNYLKSPNFSKLINIIIWFLLLSVCLGSLIYSTAALGVLMSNLGMPSYCTGYREGYLNSTNVTIATYCTGSIPCSVCLSGLDSLDTYPSLETIQITISSFKWDLTAFGLVAEWFLAYILFTRFFYVLGLAAIMQLFFSYFAVHFISNSWLMWLIINLVQMAPISAMVRMYIFFASFYYVWKSYVHVVDGCNSSTCMMCYKRNRATRVECTTIVNGVRRSFYVYANGGKGFCKLHNWNCVNCDTFCAGSTFISDEVARDLSLQFKRPINPTDQSSYIVDSVTVKNGSIHLYFDKAGQKTYERHSLSHFVNLDNLRANNTKGSLPINVIVFDGKSKCEESSAKSASVYYSQLMCQPILLLDQALVSDVGDSAEVAVKMFDAYVNTFSSTFNVPMEKLKTLVATAEAELAKNVSLDNVLSTFISAARQGFVDSDVETKDVVECLKLSHQSDIEVTGDSCNNYMLTYNKVENMTPRDLGACIDCSARHINAQVAKSHNIALIWNVKDFMSLSEQLRKQIRSAAKKNNLPFKLTCATTRQVVNVVTTKIALKGG

SEQ ID NO: 16377 - protein, 1946 aa, Artificial Sequence
  SARS-CoV-2__MT358672.1__non-structural protein 3 (NSP3)
MAPTKVTFGDDTVIEVQGYKSVNITFELDERIDKVLNEKCSAYTVELGTEVNEFACVVADAVIKTLQPVSELLTPLGIDLDEWSMATYYLFDESGEFKLASHMYCSFYPPDEDEEEGDCEEEEFEPSTQYEYGTEDDYQGKPLEFGATSAALQPEEEQEEDWLDDDSQQTVGQQDGSEDNQTTTIQTIVEVQPQLEMELTPVVQTIEVNSFSGYLKLTDNVYIKNADIVEEAKKVKPTVVVNAANVYLKHGGGVAGALNKATNNAMQVESDDYIATNGPLKVGGSCVLSGHNLAKHCLHVVGPNVNKGEDIQLLKSAYENFNQHEVLLAPLLSAGIFGADPIHSLRVCVDTVRTNVYLAVFDKNLYDKLVSSFLEMKSEKQVEQKIAEIPKEEVKPFITESKPSVEQRKQDDKKIKACVEEVTTTLEETKFLTENLLLYIDINGNLHPDSATLVSDIDITFLKKDAPYIVGDVVQEGVLTAVVIPTKKAGGTTEMLAKALRKVPTDNYITTYPGQGLNGYTVEEAKTVLKKCKSAFYILPSIISNEKQEILGTVSWNLREMLAHAEETRKLMPVCVETKAIVSTIQRKYKGIKIQEGVVDYGARFYFYTSKTTVASLINTLNDLNETLVTMPLGYVTHGLNLEEAARYMRSLKVPATVSVSSPDAVTAYNGYLTSSSKTPEEHFIETISLAGSYKDWSYSGQSTQLGIEFLKRGDKSVYYTSNPTTFHLDGEVITFDNLKTLLSLREVRTIKVFTTVDNINLHTQVVDMSMTYGQQFGPTYLDGADVTKIKPHNSHEGKTFYVLPNDDTLRVEAFEHYHTTDPSFLGRYMSALNHTKKWKYPQVNGLTSIKWADNNCYLATALLTLQQIELKFNPPALQDAYYRARAGEAANFCALILAYCNKTVGELGDVRETMSYLFQHANLDSCKRVLNVVCKTCGQQQTTLKGVEAVMYMGTLSYEQFKKGVQIPCTCGKQATKYLVQQESPFVMMSAPPAQYELKHGTFTCASEYTGNYQCGHYKHITSKETLYCIDGALLTKSSEYKGPITDVFYKENSYTTTIKPVTYKLDGVVCTEIDPKLDNYYKKDNSYFTEQPIDLVPNQPYPNASFDNFKFVCDNIKFADDLNQLTGYKKPASRELKVTFFPDLNGDVVAIDYKHYTPSFKKGAKLLHKPIVWHVNNATNKATYKPNTWCIRCLWSTKPVETSNSFDVLKSEDAQGMDNLACEDLKPVSEEVVENPTIQKDVLECNVKTTEVVGDIILKPANNSLKITEEVGHTDLMAAYVDNSSLTIKKPNELSRVLGLKTLATHGLAAVNSVPWDTIANYAKPFLNKVVSTTTNIVTRCLNRVCTNYMPYIFTLLLQLCTFTRSTNSRIKASMPTTIAKNTVKSVGKFCLEASFNYLKSPNFSKLINIIIWFLLLSVCLGSLIYSTAALGVLMSNLGMPSYCTGYREGYLNSTNVTIATYCTGSIPCSVCLSGLDSLDTYPSLETIQITISSFKWDLTAFGLVAEWFLAYILFTRFFYVLGLAAIMQLFFSYFAVHFISNSWLMWLIINLVQMAPISAMVRMYIFFASFYYVWKSYVHVVDGCNSSTCMMCYKRNRATRVECTTIVNGVRRSFYVYANGGKGFCKLHNWNCVNCDTFCAGSTFISDEVARDLSLQFKRPINPTDQSSYIVDSVTVKNGSIHLYFDKAGQKTYERHSLSHFVNLDNLRANNTKGSLPINVIVFDGKSKCEESSAKSASVYYSQLMCQPILLLDQALVSDVGDSAEVAVKMFDAYVNTFSSTFNVPMEKLKTLVATAEAELAKNVSLDNVLSTFISAARQGFVDSDVETKDVVECLKLSHQSDIEVTGDSCNNYMLTYNKVENMTPRDLGACIDCSARHINAQVAKSHNIALIWNVKDFMSLSEQLRKQIRSAAKKNNLPFKLTCATTRQVVNVVTTKIALKGG

SEQ ID NO: 16378 - protein, 1946 aa, Artificial Sequence
  SARS-CoV-2__MT358724.1__non-structural protein 3 (NSP3)
MAPTKVTFGDDTVIEVQGYKSVNITFELDERIDKVLNEKCSAYTVELGTEVNEFACVVADAVIKTLQPVSELLTPLGIDLDEWSMATYYLFDESGEFKLASHMYCSFYPPDEDEEEGDCEEEEFEPSTQYEYGTEDDYQGKPLEFGATSAALQPEEEQEEDWLDDDSQQTVGQQDGSEDNQTTTIQTIVEVQPQLEMELTPVVQTIEVNSFSGYLKLTDNVYIKNADIVEEAKKVKPTVVVNAANVYLKHGGGVAGALNKATNNAMQVESDDYIATNGPLKVGGSCVLSGHNLAKHCLHVVGPNVNKGEDIQLLKSAYENFNQHEVLLAPLLSAGIFGADPIHSLRVCVDTVRTNVYLAVFDKNLYDKLVSSFLEMKSEKQVEQKIAEIPKEEVKPFITESKPSVEQRKQDDKKIKACVEEVTTTLEETKFLTENLLLYIDINGNLHPDSATLVSDIDITFLKKDAPYIVGDVVQEGVLTAVVIPTKKAGGTTEMLAKALRKVPTDNYITTYPGQGLNGYTVEEAKTVLKKCKSAFYILPSIISNEKQEILGTVSWNLREMLAHAEETRKLMPVCVETKAIVSTIQRKYKGIKIQEGVVDYGARFYFYTSKTTVASLINTLNDLNETLVTMPLGYVTHGLNLEEAARYMRSLKVPATVSVSSPDAVTAYNGYLTSSSKTPEEHFIETISLAGSYKDWSYSGQSTQLGIEFLKRGDKSVYYTSNPTTFHLDGEVITFDNLKTLLSLREVRTIKVFTTVDNINLHTQVVDMSMTYGQQFGPTYLDGADVTKIKPHNSHEGKTFYVLPNDDTLRVEAFEYYHTTDPSFLGRYMSALNHTKKWKYPQVNGLTSIKWADNNCYLATALLTLQQIELKFNPPALQDAYYRARAGEAANFCALILAYCNKTVGELGDVRETMSYLFQHANLDSCKRVLNVVCKTCGQQQTTLKGVEAVMYMGTLSYEQFKKGVQIPCTCGKQATKYLVQQESPFVMMSAPPAQYELKHGTFTCASEYTGNYQCGHYKHITSKETLYCIDGALLTKSSEYKGPITDVFYKENSYTTTIKPVTYKLDGVVCTEIDPKLDNYYKKDNSYFTEQPIDLVPNQPYPNASFDNFKFVCDNIKFADDLNQLTGYKKPASRELKVTFFPDLNGDVVAIDYKHYTPSFKKGAKLLHKPIVWHVNNATNKATYKPNTWCIRCLWSTKPVETSNSFDVLKSEDAQGMDNLACEDLKPVSEEVMENPTIQKDVLECNVKTTEVVGDIILKPANNSLKITEEVGHTDLMAAYVDNSSLTIKKPNELSRVLGLKTLATHGLAAVNSVPWDTIANYAKPFLNKVVSTTTNIVTRCLNRVCTNYMPYFFTLLLQLCTFTRSTNSRIKASMPTTIAKNTVKSVGKFCLEASFNYLKSPNFSKLINIIIWFLLLSVCLGSLIYSTAALGVLMSNLGMPSYCTGYREGYLNSTNVTIATYCTGSIPCSVCLSGLDSLDTYPSLETIQITISSFKWDLTAFGLVAEWFLAYILFTRFFYVLGLAAIMQLFFSYFAVHFISNSWLMWLIINLVQMAPISAMVRMYIFFASFYYVWKSYVHVVDGCNSSTCMMCYKRNRATRVECTTIVNGVRRSFYVYANGGKGFCKLHNWNCVNCDTFCAGSTFISDEVARDLSLQFKRPINPTDQSSYIVDSVTVKNGSIHLYFDKAGQKTYERHSLSHFVNLDNLRANNTKGSLPINVIVFDGKSKCEESSAKSASVYYSQLMCQPILLLDQALVSDVGDSAEVAVKMFDAYVNTFSSTFNVPMEKLKTLVATAEAELAKNVSLDNVLSTFISAARQGFVDSDVETKDVVECLKLSHQSDIEVTGDSCNNYMLTYNKVENMTPRDLGACIDCSARHINAQVAKSHNIALIWNVKDFMSLSEQLRKQIRSAAKKNNLPFKLTCATTRQVVNVVTTKIALKGG

SEQ ID NO: 16379 - protein, 1946 aa, Artificial Sequence
  SARS-CoV-2__MT114416.1__non-structural protein 3 (NSP3)
MAPTKVTFGDDTVIEVQGYKSVNITFELDERIDKVLNEKCSAYTVELGTEVNEFACVVADAVIKTLQPVSELLTPLGIDLDEWSMATYYLFDESGEFKLASHMYCSFYPPDEDEEEGDCEEEEFEPSTQYEYGTEDDYQGKPLEFGATSAALQPEEEQEEDWLDDDSQQTVGQQDGSEDNQTTTIQTIVEVQPQLEMELTPVVQTIEVNSFSGYLKLTDNVYIKNADIVEEAKKVKPTVVVNAANVYLKHGGGVAGALNKATNNAMQVESDDYIATNGPLKVGGSCVLSGHNLAKHCLHVVGPNVNKGEDIQLLKSAYENFNQHEVLLAPLLSAGIFGADPIHSLRVCVDTVRTNVYLAVFDKNLYDKLVSSFLEMKSEKQVEQKIAEIPKEEVKPFITESKPSVEQRKQDDKKIKACVEEVTTTLEETKFLTENLLLYIDINGNLHPDSATLVSDIDITFLKKDAPYIVGDVVQEGVLTAVVIPTKKAGGTTEMLAKALRKVPTDNYITTYPGQGLNGYTVEEAKTVLKKCKSAFYILPSIISNEKQEILGTVSWNLREMLAHAEETRKLMPVCVETKAIVSTIQRKYKGIKIQEGVVDYGARFYFYTSKTTVASLINTLNDLNETLVTMPLGYVTHGLNLEEAARYMRSLKVPATVSVSSPDAVTAYNGYLTSSSKTPEEHFIETISLAGSYKDWSYSGQSTQLGIEFLKRGDKSVYYTSNPTTFHLDGEVITFDNLKTLLSLREVRTIKVFTTVDNINLHTQVVDMSMTYGQQFGPTYLDGADVTKIKPHNSHEGKTFYVLPNDDTLRVEAFEYYHTTDPSFLGRYMSALNHTKKWKYPQVNGLTSIKWADNNCYLATALLTLQQIELKFNPPALQDAYYRARAGEAANFCALILAYCNKTVGELGDVRETMSYLFQHANLDSCKRVLNVVCKTCGQQQTTLKGVEAVMYMGTLSYEQFKKGVQIPCTCGKQATKYLVQQESPFVMMSAPPAQYELKHGTFTCASEYTGNYQCGHYKHITSKETLYCIDGALLTKSSEYKGPITDVFYKENSYTTTIKPVTYKLDGVVCTEIDPKLDNYYKKDNSYFTEQPIDLVPNQPYPNASFDNFKFVCDNIKFADDLNQLTGYKKPASRELKVTFFPDLNGDVVAIDYKHYTPSFKKGAKLLHKPIVWHVNNATNKATYKPNTWCIRCLWSTKPVETSNSFDVLKSEDAQGMDNLACEDLKPVSEEVVENPTIQKDVLECNVKTTEVVGDIILKLANNSLKITEEVGHTDLMAAYVDNSSLTIKKPNELSRVLGLKTLATHGLAAVNSVPWDTIANYAKPFLNKVVSTTTNIVTRCLNRVCTNYMPYFFTLLLQLCTFTRSTNSRIKASMPTTIAKNTVKSVGKFCLEASFNYLKSPNFSKLINIIIWFLLLSVCLGSLIYSTAALGVLMSNLGMPSYCTGYREGYLNSTNVTIATYCTGSIPCSVCLSGLDSLDTYPSLETIQITISSFKWDLTAFGLVAEWFLAYILFTRFFYVLGLAAIMQLFFSYFAVHFISNSWLMWLIINLVQMAPISAMVRMYIFFASFYYVWKSYVHVVDGCNSSTCMMCYKRNRATRVECTTIVNGVRRSFYVYANGGKGFCKLHNWNCVNCDTFCAGSTFISDEVARDLSLQFKRPINPTDQSSYIVDSVTVKNGSIHLYFDKAGQKTYERHSLSHFVNLDNLRANNTKGSLPINVIVFDGKSKCEESSAKSASVYYSQLMCQPILLLDQALVSDVGDSAEVAVKMFDAYVNTFSSTFNVPMEKLKTLVATAEAELAKNVSLDNVLSTFISAARQGFVDSDVETKDVVECLKLSHQSDIEVTGDSCNNYMLTYNKVENMTPRDLGACIDCSARHINAQVAKSHNIALIWNVKDFMSLSEQLRKQIRSAAKKNNLPFKLTCATTRQVVNVVTTKIALKGG

SEQ ID NO: 16380 - protein, 1946 aa, Artificial Sequence
  SARS-CoV-2__MT350247.1__non-structural protein 3 (NSP3)
MAPTKVTFGDDTVIEVQGYKSVNITFELDERIDKVLNEKCSAYTVELGTEVNEFACVVADAVIKTLQPVSELLTPLGIDLDEWSMATYYLFDESGEFKLASHMYCSFYPPDEDEEEGDCEEEEFEPSTQYEYGTEDDYQGKPLEFGATSAALQPEEEQEEDWLDDDSQQTVGQQDGSEDNQTTTIQTIVEVQPQLEMELTPVVQTIEVNSFSGYLKLTDNVYIKNADIVEEAKKVKPTVVVNAANVYLKHGGGVAGALNKATNNAMQVESDDYIATNGPLKVGGSCVLSGHNLAKHCLHVVGPNVNKGEDIQLLKSAYENFNQHEVLLAPLLSAGIFGADPIHSLRVCVDTVRTNVYLAVFDKNLYDKLVSSFLEMKSEKQVEQKIAEIPKEEVKPFITESKSSVEQRKQDDKKIKACVEEVTTTLEETKFLTENLLLYIDINGNLHPDSATLVSDIDITFLKKDAPYIVGDVVQEGVLTAVVIPTKKAGGTTEMLAKALRKVPTDNYITTYPGQGLNGYTVEEAKTVLKKCKSAFYILPSIISNEKQEILGTVSWNLREMLAHAEETRKLMPVCVETKAIVSTIQRKYKGIKIQEGVVDYGTRFYFYTSKTTVASLINTLNDLNETLVTMPLGYVTHGLNLEEAARYMRSLKVPATVSVSSPDAVTAYNGYLTSSSKTPEEHFIETISLAGSYKDWSYSGQSTQLGIEFLKRGDKSVYYTSNPTTFHLDGEVITFDNLKTLLSLREVRTIKVFTTVDNINLHTQVVDMSMTYGQQFGPTYLDGADVTKIKPHNSHEGKTFYVLPNDDTLRVEAFEYYHTTDPSFLGRYMSALNHTKKWKYPQVNGLTSIKWADNNCYLATALLTLQQIELKFNPPALQDAYYRARAGEAANFCALILAYCNKTVGELGDVRETMSYLFQHANLDSCKRVLNVVCKTCGQQQTTLKGVEAVMYMGTLSYEQFKKGVQIPCTCGKQATKYLVQQESPFVMMSAPPAQYELKHGTFTCASEYTGNYQCGHYKHITSKETLYCIDGALLTKSSEYKGPITDVFYKENSYTTTIKPVTYKLDGVVCTEIDPKLDNYYKKDNSYFTEQPIDLVPNQPYPNASFDNFKFVCDNIKFADDLNQLTGYKKPASRELKVTFFPDLNGDVVAIDYKHYTPSFKKGAKLLHKPIVWHVNNATNKATYKPNTWCIRCLWSTKPVETSNSFDVLKSEDAQGMDNLACEDLKPVSEEVVENPTIQKDVLECNVKTTEVVGDIILKPANNSLKITEEVGHTDLMAAYVDNSSLTIKKPNELSRVLGLKTLATHGLAAVNSVPWDTIANYAKPFLNKVVSTTTNIVTRCLNRVCTNYMPYFFTLLLQLCTFTRSTNSRIKASMPTTIAKNTVKSVGKFCLEASFNYLKSPNFSKLINIIIWFLLLSVCLGSLIYSTAALGVLMSNLGMPSYCTGYREGYLNSTNVTIATYCTGSIPCSVCLSGLDSLDTYPSLETIQITISSFKWDLTAFGLVAEWFLAYILFTRFFYVLGLAAIMQLFFSYFAVHFISNSWLMWLIINLVQMAPISAMVRMYIFFASFYYVWKSYVHVVDGCNSSTCMMCYKRNRATRVECTTIVNGVRRSFYVYANGGKGFCKLHNWNCVNCDTFCAGSTFISDEVARDLSLQFKRPINPTDQSSYIVDSVTVKNGSIHLYFDKAGQKTYERHSLSHFVNLDNLRANNTKGSLPINVIVFDGKSKCEESSAKSASVYYSQLMCQPILLLDQALVSDVGDSAEVAVKMFDAYVNTFSSTFNVPMEKLKTLVATAEAELAKNVSLDNVLSTFISAARQGFVDSDVETKDVVECLKLSHQSDIEVTGDSCNNYMLTYNKVENMTPRDLGACIDCSARHINAQVAKSHNIALIWNVKDFMSLSEQLRKQIRSAAKKNNLPFKLTCATTRQVVNVVTTKIALKGG

SEQ ID NO: 16381 - protein, 1946 aa, Artificial Sequence
  SARS-CoV-2__MT345816.1__non-structural protein 3 (NSP3)
MAPTKVTFGDDTVIEVQGYKSVNITFELDERIDKVLNEKCSAYTVELGTEVNEFACVVADAVIKTLQPVSELLTPLGIDLDEWSMATYYLFDESGEFKLASHMYCSFYPPDEDEEEGDCEEEEFEPSTQYEYGTEDDYQGKPLEFGATSAALQPEEEQEEDWLDDDSQQTVGQQDGSEDNQTTTIQTIVEVQPQLEMEPTPVVQTIEVNSFSGYLKLTDNVYIKNADIVEEAKKVKPTVVVNAANVYLKHGGGVAGALNKATNNAMQVESDDYIATNGPLKVGGSCVLSGHNLAKHCLHVVGPNVNKGEDIQLLKSAYENFNQHEVLLAPLLSAGIFGADPIHSLRVCVDTVRTNVYLAVFDKNLYDKLVSSFLEMKSEKQVEQKIAEIPKEEVKPFITESKPSVEQRKQDDKKIKACVEEVTTTLEETKFLTENLLLYIDINGNLHPDSATLVSDIDITFLKKDAPYIVGDVVQEGVLTAVVIPTKKAGGTTEMLAKALRKVPTDNYITTYPGQGLNGYTVEEAKTVLKKCKSAFYILPSIISNEKQEILGTVSWNLREMLAHAEETRKLMPVCVETKAIVSTIQRKYKGIKIQEGVVDYGARFYFYTSKTTVASLINTLNDLNETLVTMPLGYVTHGLNLEEAARYMRSLKVPATVSVSSPDAVTAYNGYLTSSSKTPEEHFIETISLAGSYKDWSYSGQSTQLGIEFLKRGDKSVYYTSNPTTFHLDGEVITFDNLKTLLSLREVRTIKVFTTVDNINLHTQVVDMSMTYGQQFGPTYLDGADVTKIKPHNSHEGKTFYVLPNDDTLRVEAFEYYHTTDPSFLGRYMSALNHTKKWKYPQVNGLTSIKWADNNCYLATALLTLQQIELKFNPPALQDAYYRARAGEAANFCALILAYCNKTVGELGDVRETMSYLFQHANLDSCKRVLNVVCKTCGQQQTTLKGVEAVMYMGTLSYEQFKKGVQIPCTCGKQATKYLVQQESPFVMMSAPPAQYELKHGTFTCASEYTGNYQCGHYKHITSKETLYCIDGALLTKSSEYKGPITDVFYKENSYTTTIKPVTYKLDGVVCTEIDPKLDNYYKKDNSYFTEQPIDLVPNQPYPNASFDNFKFVCDNIKFADDLNQLTGYKKPASRELKVTFFPDLNGDVVAIDYKHYTPSFKKGAKLLHKPIVWHVNNATNKATYKPNTWCIRCLWSTKPVETSNSFDVLKSEDAQGMDNLACEDLKPVSEEVVENPTIQKDVLECNVKTTEVVGDIILKPANNSLKITEEVGHTDLMAAYVDNSSLTIKKPNELSRVLGLKTLATHGLAAVNSVPWDTIANYAKPFLNKVVSTTTNIVTRCLNRVCTNYMPYFFTLLLQLCTFTRSTNSRIKASMPTTIAKNTVKSVGKFCLEASFNYLKSPNFSKLINIIIWFLLLSVCLGSLIYSTAALGVLMSNLGMPSYCTGYREGYLNSTNVTIATYCTGSIPCSVCLSGLDSLDTYPSLETIQITISSFKWDLTAFGLVAEWFLAYILFTRFFYVLGLAAIMQLFFSYFAVHFISNSWLMWLIINLVQMAPISAMVRMYIFFASFYYVWKSYVHVVDGCNSSTCMMCYKRNRATRVECTTIVNGVRRSFYVYANGGKGFCKLHNWNCVNCDTFCAGSTFISDEVARDLSLQFKRPINPTDQSSYIVDSVTVKNGSIHLYFDKAGQKTYERHSLSHFVNLDNLRANNTKGSLPINVIVFDGKSKCEESSAKSASVYYSQLMCQPILLLDQALVSDVGDSAEVAVKMFDAYVNTFSSTFNVPMEKLKTLVATAEAELAKNVSLDNVLSTFISAARQGFVDSDVETKDVVECLKLSHQSDIEVTGDSCNNYMLTYNKVENMTPRDLGACIDCSARHINAQVAKSHNIALIWNVKDFMSLSEQLRKQIRSAAKKNNLPFKLTCATTRQVVNVVTTKIALKGG

SEQ ID NO: 16382 - protein, 1946 aa, Artificial Sequence
  SARS-CoV-2__MT345832.1__non-structural protein 3 (NSP3)
MAPTKVTFGDDTVIEVQGYKSVNITFELDERIDKVLNEKCSAYTVELGTEVNEFACVVADAVIKTLQPVSELLTPLGIDLDEWSMATYYLFDESGEFKLASHMYCSFYPPDEDEEEGDCEEEEFEPSTQYEYGTEDDYQGKPLEFGATSAALQPEEEQEEDWLDDDSQQTVGQQDGSEDNQTTTIQTIVEVQPQLEMELTPVVQTIEVNSFSGYLKLTDNVYIKNADIVEEAKKVKPTVVVNAANVYLKHGGGVAGALNKATNNAMQVESDDYIATNGPLKVGGSCVLSGHNLAKHCLHVVGPNVNKGEDIQLLKSAYENFNQHEVLLAPLLSAGIFGADPIHSLRVCVDTVRTNVYLAVFDKNLYDKLVSSFLEMKSEKQVEQKIAEIPKEEVKPFITESKPSVEQRKQDDKKIKACVEEVTTTLEETKFLTENLLLYIDINGNLHPDSATLVSDIDITFLKKDAPYIVGDVVQEGVLTAVVIPTKKAGGTTEMLAKALRKVPTDSYITTYPGQGLNGYTVEEAKTVLKKCKSAFYILPSIISNEKQEILGTVSWNLREMLAHAEETRKLMPVCVETKAIVSTIQRKYKGIKIQEGVVDYGARFYFYTSKTTVASLINTLNDLNETLVTMPLGYVTHGLNLEEAARYMRSLKVPATVSVSSPDAVTAYNGYLTSSSKTPEEHFIETISLAGSYKDWSYSGQSTQLGIEFLKRGDKSVYYTSNPTTFHLDGEVITFDNLKTLLSLREVRTIKVFTTVDNINLHTQVVDMSMTYGQQFGPTYLDGADVTKIKPHNSHEGKTFYVLPNDDTLRVEAFEYYHTTDPSFLGRYMSALNHTKKWKYPQVNGLTSIKWADNNCYLATALLTLQQIELKFNPPALQDAYYRARAGEAANFCALILAYCNKTVGELGDVRETMSYLFQHANLDSCKRVLNVVCKTCGQQQTTLKGVEAVMYMGTLSYEQFKKGVQIPCTCGKQATKYLVQQESPFVMMSAPPAQYELKHGTFTCASEYTGNYQCGHYKHITSKETLYCIDGALLTKSSEYKGPITDVFYKENSYTTTIKPVTYKLDGVVCTEIDPKLDNYYKKDNSYFTEQPIDLVPNQPYPNASFDNFKFVCDNIKFADDLNQLTGYKKPASRELKVTFFPDLNGDVVAIDYKHYTPSFKKGAKLLHKPIVWHVNNATNKATYKPNTWCIRCLWSTKPVETSNSFDVLKSEDAQGMDNLACEDLKPVSEEVVENPTIQKDVLECNVKTTEVVGDIILKPANNSLKITEEVGHTDLMAAYVDNSSLTIKKPNELSRVLGLKTLATHGLAAVNSVPWDTIANYAKPFLNKVVSTTTNIVTRCLNRVCTNYMPYFFTLLLQLCTFTRSTNSRIKASMPTTIAKNTVKSVGKFCLEASFNYLKSPNFSKLINIIIWFLLLSVCLGSLIYSTAALGVLMSNLGMPSYCTGYREGYLNSTNVTIATYCTGSIPCSVCLSGLDSLDTYPSLETIQITISSFKWDLTAFGLVAEWFLAYILFTRFFYVLGLAAIMQLFFSYFAVHFISNSWLMWLIINLVQMAPISAMVRMYIFFASFYYVWKSYVHVVDGCNSSTCMMCYKRNRATRVECTTIVNGVRRSFYVYANGGKGFCKLHNWNCVNCDTFCAGSTFISDEVARDLSLQFKRPINPTDQSSYIVDSVTVKNGSIHLYFDKAGQKTYERHSLSHFVNLDNLRANNTKGSLPINVIVFDGKSKCEESSAKSASVYYSQLMCQPILLLDQALVSDVGDSAEVAVRMFDAYVNTFSSTFNVPMEKLKTLVATAEAELAKNVSLDNVLSTFISAARQGFVDSDVETKDVVECLKLSHQSDIEVTGDSCNNYMLTYNKVENMTPRDLGACIDCSARHINAQVAKSHNIALIWNVKDFMSLSEQLRKQIRSAAKKNNLPFKLTCATTRQVVNVVTTKIALKGG

SEQ ID NO: 16383 - protein, 1946 aa, Artificial Sequence
  SARS-CoV-2__MT345848.1__non-structural protein 3 (NSP3)
MAPTKVTFGDDTVIEVQGYKSVNITFELDERIDKVLNEKCSAYTVELGTEVNEFACVVADAVIKTLQPVSELLTPLGIDLDEWSMATYYLFDESGEFKLASHMYCSFYPPDEDEEEGDCEEEEFEPSTQYEYGTEDDYQGKPLEFGATSAALQPEEEQEEDWLDDDSQQTVGQQDGSEDNQTTTIQTIVEVQPQLEMELTPVVQTIEVNSFSGYLKLTDNVYIKNADIVEETKKVKPTVVVNAANVYLKHGGGVAGALNKATNNAMQVESDDYIATNGPLKVGGSCVLSGHNLAKHCLHVVGPNVNKGEDIQLLKSAYENFNQHEVLLAPLLSAGIFGADPIHSLRVCVDTVRTNVYLAVFDKNLYDKLVSSFLEMKSEKQVEQKIAEIPKEEVKPFITESKPSVEQRKQDDKKIKACVEEVTTTLEETKFLTENLLLYIDINGNLHPDSATLVSDIDITFLKKDAPYIVGDVVQEGVLTAVVIPTKKAGGTTEMLAKALRKVPTDNYITTYPGQGLNGYTVEEAKTVLKKCKSAFYILPSIISNEKQEILGTVSWNLREMLAHAEETRKLMPVCVETKAIVSTIQRKYKGIKIQEGVVDYGARFYFYTSKTTVASLINTLNDLNETLVTMPLGYVTHGLNLEEAARYMRSLKVPATVSVSSPDAVTAYNGYLTSSSKTPEEHFIETISLAGSYKDWSYSGQSTQLGIEFLKRGDKSVYYTSNPTTFHLDGEVITFDNLKTLLSLREVRTIKVFTTVDNINLHTQVVDMSMTYGQQFGPTYLDGADVTKIKPHNSHEGKTFYVLPNDDTLRVEAFEYYHTTDPSFLGRYMSALNHTKKWKYPQVNGLTSIKWADNNCYLATALLTLQQIELKFNPPALQDAYYRARAGEAANFCALILAYCNKTVGELGDVRETMSYLFQHANLDSCKRVLNVVCKTCGQQQTTLKGVEAVMYMGTLSYEQFKKGVQIPCTCGKQATKYLVQQESPFVMMSAPPAQYELKHGTFTCASEYTGNYQCGHYKHITSKETLYCIDGALLTKSSEYKGPITDVFYKENSYTTTIKPVTYKLDGVVCTEIDPKLDNYYKKDNSYFTEQPIDLVPNQPYPNASFDNFKFVCDNIKFADDLNQLTGYKKPASRELKVTFFPDLNGDVVAIDYKHYTPSFKKGAKLLHKPIVWHVNNATNKATYKPNTWCIRCLWSTKPVETSNSFDVLKSEDAQGMDNLACEDLKPVSEEVVENPTIQKDVLECNVKTTEVVGDIILKPANNSLKITEEVGHTDLMAAYVDNSSLTIKKPNELSRVLGLKTLATHGLAAVNSVPWDTIANYAKPFLNKVVSTTTNIVTRCLNRVCTNYMPYFFTLLLQLCTFTRSTNSRIKASMPTTIAKNTVKSVGKFCLEASFNYLKSPNFSKLINIIIWFLLLSVCLGSLIYSTAALGVLMSNLGMPSYCTGYREGYLNSTNVTIATYCTGSIPCSVCLSGLDSLDTYPSLETIQITISSFKWDLTAFGLVAEWFLAYILFTRFFYVLGLAAIMQLFFSYFAVHFISNSWLMWLIINLVQMAPISAMVRMYIFFASFYYVWKSYVHVVDGCNSSTCMMCYKRNRATRVECTTIVNGVRRSFYVYANGGKGFCKLHNWNCVNCDTFCAGSTFISDEVARDLSLQFKRPINPTDQSSYIVDSVTVKNGSIHLYFDKAGQKTYERHSLSHFVNLDNLRANNTKGSLPINVIVFDGKSKCEESSAKSASVYYSQLMCQPILLLDQALVSDVGDSAEVAVKMFDAYVNTFSSTFNVPMEKLKTLVATAEAELAKNVSLDNVLSTFISAARQGFVDSDVETKDVVECLKLSHQSDIEVTGDSCNNYMLTYNKVENMTPRDLGACIDCSARHINAQVAKSHNIALIWNVKDFMSLSEQLRKQIRSAAKKNNLPFKLTCATTRQVVNVVTTKIALKGG

SEQ ID NO: 16384 - protein, 1946 aa, Artificial Sequence
  SARS-CoV-2__MT345861.1__non-structural protein 3 (NSP3)
MAPTKVTFGDDTVIEVQGYKSVNITFELDERIDKVLNEKCSAYTVELGTEVNEFACVVADAVIKTLQPVSELLTPLGIDLDEWSMATYYLFDESGEFKLASHMYCSFYPPDEDEEEGDCEEEEFEPSTQYEYGTEDDYQGKPLEFGATSAALQPEEEQEEDWLDDDSQQTVGQQDGSEDNQTTTIQTIVEVQPQLEMELTPVVQTIEVNSFSGYLKLTDNVYIKNADIVEEAKKVKPTVVVNAANVYLKHGGGVAGALNKATNNAMQVESDDYIATNGPLKVGGSCVLSGHNLAKHCLHVVGPNVNKGEDIQLLKSAYENFNQHEVLIAPLLSAGIFGADPIHSLRVCVDTVRTNVYLAVFDKNLYDKLVSSFLEMKSEKQVEQKIAEIPKEEVKPFITESKPSVEQRKQDDKKIKACVEEVTTTLEETKFLTENLLLYIDINGNLHPDSATLVSDIDITFLKKDAPYIVGDVVQEGVLTAVVIPTKKAGGTTEMLAKALRKVPTDNYITTYPGQGLNGYTVEEAKTVLKKCKSAFYILPSIISNEKQEILGTVSWNLREMLAHAEETRKLMPVCVETKAIVSTIQRKYKGIKIQEGVVDYGARFYFYTSKTTVASLINTLNDLNETLVTMPLGYVTHGLNLEEAARYMRSLKVPATVSVSSPDAVTAYNGYLTSSSKTPEEHFIETISLAGSYKDWSYSGQSTQLGIEFLKRGDKSVYYTSNPTTFHLDGEVITFDNLKTLLSLREVRTIKVFTTVDNINLHTQVVDMSMTYGQQFGPTYLDGADVTKIKPHNSHEGKTFYVLPNDDTLRVEAFEYYHTTDPSFLGRYMSALNHTKKWKYPQVNGLTSIKWADNNCYLATALLTLQQIELKFNPPALQDAYYRARAGEAANFCALILAYCNKTVGELGDVRETMSYLFQHANLDSCKRVLNVVCKTCGQQQTTLKGVEAVMYMGTLSYEQFKKGVQIPCTCGKQATKYLVQQESPFVMMSAPPAQYELKHGTFTCASEYTGNYQCGHYKHITSKETLYCIDGALLTKSSEYKGPITDVFYKENSYTTTIKPVTYKLDGVVCTEIDPKLDNYYKKDNSYFTEQPIDLVPNQPYPNASFDNFKFVCDNIKFADDLNQLTGYKKPASRELKVTFFPDLNGDVVAIDYKHYTPSFKKGAKLLHKPIVWHVNNATNKATYKPNTWCIRCLWSTKPVETSNSFDVLKSEDAQGMDNLACEDLKPVSEEVVENPTIQKDVLECNVKTTEVVGDIILKPANNSLKITEEVGHTDLMAAYVDNSSLTIKKPNELSRVLGLKTLATHGLAAVNSVPWDTIANYAKPFLNKVVSTTTNIVTRCLNRVCTNYMPYFFTLLLQLCTFTRSTNSRIKASMPTTIAKNTVKSVGKFCLEASFNYLKSPNFSKLINIIIWFLLLSVCLGSLIYSTAALGVLMSNLGMPSYCTGYREGYLNSTNVTIATYCTGSIPCSVCLSGLDSLDTYPSLETIQITISSFKWDLTAFGLVAEWFLAYILFTRFFYVLGLAAIMQLFFSYFAVHFISNSWLMWLIINLVQMAPISAMVRMYIFFASFYYVWKSYVHVVDGCNSSTCMMCYKRNRATRVECTTIVNGVRRSFYVYANGGKGFCKLHNWNCVNCDTFCAGSTFISDEVARDLSLQFKRPINPTDQSSYIVDSVTVKNGSIHLYFDKAGQKTYERHSLSHFVNLDNLRANNTKGSLPINVIVFDGKSKCEESSAKSASVYYSQLMCQPILLLDQALVSDVGDSAEVAVKMFDAYVNTFSSTFNVPMEKLKTLVATAEAELAKNVSLDNVLSTFISAARQGFVDSDVETKDVVECLKLSHQSDIEVTGDSCNNYMLTYNKVENMTPRDLGACIDCSARHINAQVAKSHNIALIWNVKDFMSLSEQLRKQIRSAAKKNNLPFKLTCATTRQVVNVVTTKIALKGG

SEQ ID NO: 16385 - protein, 1946 aa, Artificial Sequence
  SARS-CoV-2__MT345869.1__non-structural protein 3 (NSP3)
MAPTKVTFGDDTVIEVQGYKSVNITFELDERIDKVLNEKCSAYTVELGTEVNEFACVVADAVIKTLQPVSELLTPLGIDLDEWSMATYYLFDESGEFKLASHMYCSFYPPDEDEEEGDCEEEEFEPSTQYEYGTEDDYQGKSLEFGATSAALQPEEEQEEDWLDDDSQQTVGQQDGSEDNQTTTIQTIVEVQPQLEMELTPVVQTIEVNSFSGYLKLTDNVYIKNADIVEEAKKVKPTVVVNAANVYLKHGGGVAGALNKATNNAMQVESDDYIATNGPLKVGGSCVLSGHNLAKHCLHVVGPNVNKGEDIQLLKSAYENFNQHEVLLAPLLSAGIFGADPIHSLRVCVDTVRTNVYLAVFDKNLYDKLVSSFLEMKSEKQVEQKIAEIPKEEVKPFITESKPSVEQRKQDDKKIKACVEEVTTTLEETKFLTENLLLYIDINGNLHPDSATLVSDIDITFLKKDAPYIVGDVVQEGVLTAVVIPTKKAGGTTEMLAKALRKVPTDNYITTYPGQGLNGYTVEEAKTVLKKCKSAFYILPSIISNEKQEILGTVSWNLREMLAHAEETRKLMPVCVETKAIVSTIQRKYKGIKIQEGVVDYGARFYFYTSKTTVASLINTLNDLNETLVTMPLGYVTHGLNLEEAARYMRSLKVPATVSVSSPDAVTAYNGYLTSSSKTPEEHFIETISLAGSYKDWSYSGQSTQLGIEFLKRGDKSVYYTSNPTTFHLDGEVITFDNLKTLLSLREVRTIKVFTTVDNINLHTQVVDMSMTYGQQFGPTYLDGADVTKIKPHNSHEGKTFYVLPNDDTLRVEAFEYYHTTDPSFLGRYMSALNHTKKWKYPQVNGLTSIKWADNNCYLATALLTLQQIELKFNPPALQDAYYRARAGEAANFCALILAYCNKTVGELGDVRETMSYLFQHANLDSCKRVLNVVCKTCGQQQTTLKGVEAVMYMGTLSYEQFKKGVQIPCTCGKQATKYLVQQESPFVMMSAPPAQYELKHGTFTCASEYTGNYQCGHYKHITSKETLYCIDGALLTKSSEYKGPITDVFYKENSYTTTIKPVTYKLDGVVCTEIDPKLDNYYKKDNSYFTEQPIDLVPNQPYPNASFDNFKFVCDNIKFADDLNQLTGYKKPASRELKVTFFPDLNGDVVAIDYKHYTPSFKKGAKLLHKPIVWHVNNATNKATYKPNTWCIRCLWSTKPVETSNSFDVLKSEDAQGMDNLACEDLKPVSEEVVENPTIQKDVLECNVKTTEVVGDIILKPANNSLKITEEVGHTDLMAAYVDNSSLTIKKPNELSRVLGLKTLATHGLAAVNSVPWDTIANYAKPFLNKVVSTTTNIVTRCLNRVCTNYMPYFFTLLLQLCTFTRSTNSRIKASMPTTIAKNTVKSVGKFCLEASFNYLKSPNFSKLINIIIWFLLLSVCLGSLIYSTAALGVLMSNLGMPSYCTGYREGYLNSTNVTIATYCTGSIPCSVCLSGLDSLDTYPSLETIQITISSFKWDLTAFGLVAEWFLAYILFTRFFYVLGLAAIMQLFFSYFAVHFISNSWLMWLIINLVQMAPISAMVRMYIFFASFYYVWKSYVHVVDGCNSSTCMMCYKRNRATRVECTTIVNGVRRSFYVYANGGKGFCKLHNWNCVNCDTFCAGSTFISDEVARDLSLQFKRPINPTDQSSYIVDSVTVKNGSIHLYFDKAGQKTYERHSLSHFVNLDNLRANNTKGSLPINVIVFDGKSKCEESSAKSASVYYSQLMCQPILLLDQALVSDVGDSAEVAVKMFDAYVNTFSSTFNVPMEKLKTLVATAEAELAKNVSLDNVLSTFISAARQGFVDSDVETKDVVECLKLSHQSDIEVTGDSCNNYMLTYNKVENMTPRDLGACIDCSARHINAQVAKSHNIALIWNVKDFMSLSEQLRKQIRSAAKKNNLPFKLTCATTRQVVNVVTTKIALKGG

SEQ ID NO: 16386 - protein, 1946 aa, Artificial Sequence
  SARS-CoV-2__MT345871.1__non-structural protein 3 (NSP3)
MAPTKVTFGDDTVIEVQGYKSVNITFELDERIDKVLNEKCSAYTVELGTEVNEFACVVADAVIKTLQPVSELLTPLGIDLDEWSMATYYLFDESGEFKLASHMYCSFYPPDEDEEEGDCEEEEFEPSTQYEYGTEDDYQGKPLEFGATSAALQPEEEQEEDWLDDDSQQTVGQQDGSEDNQTTTIQTIVEVQPQLEMELTPVVQTIEVNSFSGYLKLTDNVYIKNADIVEEAKKVKPTVVVNAANVYLKHGGGVAGALNKATNNAMQVESDDYIATNGPLKVGGSCVLSGHNLAKHCLHVVGPNVNKGEDIQLLKSAYENFNQHEVLLAPLLSAGIFGADPIHSLRVCVDTVRTNVYLAVFDKNLYDKLVSSFLEMKSEKQVEQKIAEIPKEEVKPFITESKPSVEQRKQDDKKIKACVEEVTTTLEETKFLTENLLLYIDINGNLHPDSATLVSDIDITFLKKDAPYIVGDVVQEGVLTAVVIPTKKAGGTTEMLAKALRKVPTDNYITTYPGQGLNGYTVEEAKTVLKKCKSAFYILPSIISNEKQEILGTVSWNLREMLAHAEETRKLMPVCVETKAIVSTIQRKYKGIKIQEGVVDYGARFYFYTSKTTVASLINTLNDLNETLVTMPLGYVTHGLNLEEAARYMRSLKVPATVSVSSPDAVTAYNGYLTSSSKTPEEHFIETISLAGSYKDWSYSGQSTQLGIEFLKRGDKSVYYTSNPTTFHLDGEVITFDNLKTLLSLREVRTIKVFTTVDNINLHTQVVDMSMTYGQQFGPTYLDGADVTKIKPHNSHEGKTFYVLPNDDTLRVEAFEYYHTTDPSFLGRYMSALNHTKKWKYPQVNGLTSIKWADNNCYLATALLTLQQIELKFNPPALQDAYYRARAGEAANFCALILAYCNKTVGELGDVRETMSYLFQHANLDSCKRVLNVVCKTCGQQQTTLKGVEAVMYMGTLSYEQFKKGVQIPCTCGKQATKYLVQQESPFVMMSAPPAQYELKHGTFTCASEYTGNYQCGHYKHITSKETLYCIDGALLTKSSEYKGPITDVFYKENSYTTTIKPVTYKLDGVVCTEIDPKLDNYYKKDNSYFTEQPIDLVPNQPYPNASFDNFKFVCDNIKFADDLNQLTGYKKPASRELKVTFFPDLNGDVVAIDYKHYTPSFKKGAKLLHKPIVWHVNNATNKATYKPNTWCIRCLWSTKPVETSNSFDVLKLEDAQGMDNLACEDLKPVSEEVVENPTIQKDVLECNVKTTEVVGDIILKPANNSLKITEEVGHTDLMAAYVDNSSLTIKKPNELSRVLGLKTLATHGLAAVNSVPWDTIANYAKPFLNKVVSTTTNIVTRCLNRVCTNYMPYFFTLLLQLCTFTRSTNSRIKASMPTTIAKNTVKSVGKFCLEASFNYLKSPNFSKLINIIIWFLLLSVCLGSLIYSTAALGVLMSNLGMPSYCTGYREGYLNSTNVTIATYCTGSIPCSVCLSGLDSLDTYPSLETIQITISSFKWDLTAFGLVAEWFLAYILFTRFFYVLGLAAIMQLFFSYFAVHFISNSWLMWLIINLVQMAPISAMVRMYIFFASFYYVWKSYVHVVDGCNSSTCMMCYKRNRATRVECTTIVNGVRRSFYVYANGGKGFCKLHNWNCVNCDTFCAGSTFISDEVARDLSLQFKRPINPTDQSSYIVDSVTVKNGSIHLYFDKAGQKTYERHSLSHFVNLDNLRANNTKGSLPINVIVFDGKSKCEESSAKSASVYYSQLMCQPILLLDQALVSDVGDSAEVAVKMFDAYVNTFSSTFNVPMEKLKTLVATAEAELAKNVSLDNVLSTFISAARQGFVDSDVETKDVVECLKLSHQSDIEVTGDSCNNYMLTYNKVENMTPRDLGACIDCSARHINAQVAKSHNIALIWNVKDFMSLSEQLRKQIRSAAKKNNLPFKLTCATTRQVVNVVTTKIALKGG

SEQ ID NO: 16387 - protein, 1946 aa, Artificial Sequence
  SARS-CoV-2__MT345879.1__non-structural protein 3 (NSP3)
MAPTKVTFGDDTVIEVQGYKSVNITFELDERIDKVLNEKCSAYTVELGTEVNEFACVVADAVIKTLQPVSELLTPLGIDLDEWSMATYYLFDESGEFKLASHMYCSFYPPDEDEEEGDCEEEEFEPSTQYEYGTEDDYQGKPLEFGATSAALQPEEEQEEDWLDDDSQQTVGQQDGSEDNQTTTIQTIVEVQPQLEMELTPVVQTIEVNSFSGYLKLTDNVYIKNADIVEEAKKVKPTVVVNAANVYLKHGGGVAGALNKATNNAMQVESDDYIATNGPLKVGGSCVLSGHNLAKHCLHVVGPNVNKGEDIQLLKSAYENFNQHEVLLAPLLSAGIFGADPIHSLRVCVDTVRTNVYLAVFDKNLYDKLVSSFLEMKSEKQVEQKIAEIPKEEVKPFITESKPSVEQRKQDDKKIKACVEEVTTTLEETKFLTENLLLYIDINGNLHPDSATLVSDIDITFLKKDAPYIVGDVVQEGVLTAVVIPTKKAGGTTEMLAKALRKVPTDNYITTYPGQGLNGYTVEEAKTVLKKCKSAFYILPSIISNEKQEILGTVSWNLREMLAHAEETRKLMPVCVETKAIVSTIQRKYKGIKIQEGVVDYGARFYFYTSKTTVASLINTLNDLNETLVTMPLGYVTHGLNLEEAARYMRSLKVPATVSVSSPDAVTAYNGYLTSSSKTPEEHFIETISLAGSYKDWSYSGQSTQLGIEFLKRGDKSVYYTSNPTTFHLDGEVITFDNLKTLLSLREVRTIKVFTTVDNINLHTQVVDMSMTYGQQFGPTYLDGADVTKIKPHNSHEGKTFYVLPNDDTLRVEAFEYYHTTDPSFLGRYMSALNHTKKWKYPQVNGLTSIKWTDNNCYLATALLTLQQIELKFNPPALQDAYYRARAGEAANFCALILAYCNKTVGELGDVRETMSYLFQHANLDSCKRVLNVVCKTCGQQQTTLKGVEAVMYMGTLSYEQFKKGVQIPCTCGKQATKYLVQQESPFVMMSAPPAQYELKHGTFTCASEYTGNYQCGHYKHITSKETLYCIDGALLTKSSEYKGPITDVFYKENSYTTTIKPVTYKLDGVVCTEIDPKLDNYYKKDNSYFTEQPIDLVPNQPYPNASFDNFKFVCDNIKFADDLNQLTGYKKPASRELKVTFFPDLNGDVVAIDYKHYTPSFKKGAKLLHKPIVWHVNNATNKATYKPNTWCIRCLWSTKPVETSNSFDVLKSEDAQGMDNLACEDLKPVSEEVVENPTIQKDVLECNVKTTEVVGDIILKPANNSLKITEEVGHTDLMAAYVDNSSLTIKKPNELSRVLGLKTLATHGLAAVNSVPWDTIANYAKPFLNKVVSTTTNIVTRCLNRVCTNYMPYFFTLLLQLCTFTRSTNSRIKASMPTTIAKNTVKSVGKFCLEASFNYLKSPNFSKLINIIIWFLLLSVCLGSLIYSTAALGVLMSNLGMPSYCTGYREGYLNSTNVTIATYCTGSIPCSVCLSGLDSLDTYPSLETIQITISSFKWDLTAFGLVAEWFLAYILFTRFFYVLGLAAIMQLFFSYFAVHFISNSWLMWLIINLVQMAPISAMVRMYIFFASFYYVWKSYVHVVDGCNSSTCMMCYKRNRATRVECTTIVNGVRRSFYVYANGGKGFCKLHNWNCVNCDTFCAGSTFISDEVARDLSLQFKRPINPTDQSSYIVDSVTVKNGSIHLYFDKAGQKTYERHSLSHFVNLDNLRANNTKGSLPINVIVFDGKSKCEESSAKSASVYYSQLMCQPILLLDQALVSDVGDSAEVAVKMFDAYVNTFSSTFNVPMEKLKTLVATAEAELAKNVSLDNVLSTFISAARQGFVDSDVETKDVVECLKLSHQSDIEVTGDSCNNYMLTYNKVENMTPRDLGACIDCSARHINAQVAKSHNIALIWNVKDFMSLSEQLRKQIRSAAKKNNLPFKLTCATTRQVVNVVTTKIALKGG

SEQ ID NO: 16388 - protein, 1946 aa, Artificial Sequence
  SARS-CoV-2__MT345887.1__non-structural protein 3 (NSP3)
MAPTKVTFGDDTVIEVQGYKSVNITFELDERIDKVLNEKCSAYTVELGTEVNEFACVVADAVIKTLQPVSELLTPLGIDLDEWSMATYYLFDESGEFKLASHMYCSFYPPDEDEEEGDCEEEEFEPSTQYEYGTEDDYQGKPLEFGATSAALQPEEEQEEDWLDDDSQQTVGQQDGSEDNQTTTIQTIVEVQPQLEMELTPVVQTIEVNSFSGYLKLTDNVYIKNADIVEEAKKVKPTVVVNAANVYLKHGGGVAGALNKATNNAMQVESDDYIATNGPLKVGGSCVLSGHNLAKHCLHVVGPNVNKGEDIQLLKSAYENFNQHEVLLAPLLSAGIFGADPIHSLRVCVDTVRTNVYLAVFDKNLYDKLVSSFLEMKSEKQVEQKIAEIPKEEVKPFITESKPSVEQRKQDDKKIKACVEEVTTTLEETKFLTENLLLYIDINGNLHPDSATLVSDIDITFLKKDAPYIVGDVVQEGVLTAVVIPTKKAGGTTEMLAKALRKVPTDNYITTYPGQGLNGYTVEEAKTVLKKCKSAFYILPSIISNEKQEILGTVSWNLREMLAHAEETRKLMPVCVETKAIVSTIQRKYKGIKIQEGVVDYGARFYFYTSKTTVASLINTLNDLNETLVTMPLGYVTHGLNLEEAARYMRSLKVPATVSVSSPDAVTAYNGYLTSSSKTPEEHFIETISLAGSYKDWSYSGQSTQLGIEFLKRGDKSVYYTSNPTTFHLDGEVITFDNLKTLLSLREVRTIKVFTTVDNINLHTQVVDMSMTYGQQFGPTYLDGADVTKIKPHNSHEGKTFYVLPNDDTLRVEAFEYYHTTDPSFLGRYMSALNHTKKWKYPQVNGLTSIKWADNNCYLATALLTLQQIELKFNPPALQDAYYRARAGEAANFCALILAYCNKTVGELGDVRETMSYLFQHANLDSCKRVLNVVCKTCGQQQTTLKGVEAVMYMGTLSYEQFKKGVQIPCTCGKQATKYLVQQESPFVMMSAPPAQYELKHGTFTCASEYTGNYQCGHYKHITSKETLYCIDGALLTKSSEYKGPITDVFYKENSYTTTIKPVTYKLDGVVCIEIDPKLDNYYKKDNSYFTEQPIDLVPNQPYPNASFDNFKFVCDNIKFADDLNQLTGYKKPASRELKVTFFPDLNGDVVAIDYKHYTPSFKKGAKLLHKPIVWHVNNATNKATYKPNTWCIRCLWSTKPVETSNSFDVLKSEDAQGMDNLACEDLKPVSEEVVENPTIQKDVLECNVKTTEVVGDIILKPANNSLKITEEVGHTDLMAAYVDNSSLTIKKPNELSRVLGLKTLATHGLAAVNSVPWDTIANYAKPFLNKVVSTTTNIVTRCLNRVCTNYMPYFFTLLLQLCTFTRSTNSRIKASMPTTIAKNTVKSVGKFCLEASFNYLKSPNFSKLINIIIWFLLLSVCLGSLIYSTAALGVLMSNLGMPSYCTGYREGYLNSTNVTIATYCTGSIPCSVCLSGLDSLDTYPSLETIQITISSFKWDLTAFGLVAEWFLAYILFTRFFYVLGLAAIMQLFFSYFAVHFISNSWLMWLIINLVQMAPISAMVRMYIFFASFYYVWKSYVHVVDGCNSSTCMMCYKRNRATRVECTTIVNGVRRSFYVYANGGKGFCKLHNWNCVNCDTFCAGSTFISDEVARDLSLQFKRPINPTDQSSYIVDSVTVKNGSIHLYFDKAGQKTYERHSLSHFVNLDNLRANNTKGSLPINVIVFDGKSKCEESSAKSASVYYSQLMCQPILLLDQALVSDVGDSAEVAVKMFDAYVNTFSSTFNVPMEKLKTLVATAEAELAKNVSLDNVLSTFISAARQGFVDSDVETKDVVECLKLSHQSDIEVTGDSCNNYMLTYNKVENMTPRDLGACIDCSARHINAQVAKSHNIALIWNVKDFMSLSEQLRKQIRSAAKKNNLPFKLTCATTRQVVNVVTTKIALKGG

SEQ ID NO: 16389 - protein, 1946 aa, Artificial Sequence
  SARS-CoV-2__MT326054.1__non-structural protein 3 (NSP3)
MAPTKVTFGDDTVIEVQGYKSVNITFELDERIDKVLNEKCSAYTVELGTEVNEFACVVADAVIKTLQPVSELLTPLGIDLDEWSMATYYLFDESGEFKLASHMYCSFYPPDEDEEEGDCEEEEFEPSTQYEYGTEDDYQGKPLEFGATSAALQPEEEQEEDWLDDDSQQTVGQQDGSEDNQTTTIQTIVEVQPQLEMELTPVVQTIEVNSFSGYLKLTDNVYIKNADIVEEAKKVKPTVVVNAANVYLKHGGGVAGALNKATNNAMQVESDDYIATNGPLKVGGSCVLSGHNLAKHCLHVVGPNVNKGEDIQLLKSAYENFNQHEVLLAPLLSAGIFGADPIHSLRVCVDTVRTNVYLAVFDKNLYDKLVSSFLEMKSEKQVEQKIAEIPKEEVKPFITESKPSVEQRKQYDKKIKACVEEVTTTLEETKFLTENLLLYIDINGNLHPDSATLVSDIDITFLKKDAPYIVGDVVQEGVLTAVVIPTKKAGGTTEMLAKALRKVPTDNYITTYPGQGLNGYTVEEAKTVLKKCKSAFYILPSIISNEKQEILGTVSWNLREMLAHAEETRKLMPVCVETKAIVSTIQRKYKGIKIQEGVVDYGARFYFYTSKTTVASLINTLNDLNETLVTMPLGYVTHGLNLEEAARYMRSLKVPATVSVSSPDAVTAYNGYLTSSSKTPEEHFIETISLAGSYKDWSYSGQSTQLGIEFLKRGDKSVYYTSNPTTFHLDGEVITFDNLKTLLSLREVRTIKVFTTVDNINLHTQVVDMSMTYGQQFGPTYLDGADVTKIKPHNSHEGKTFYVLPNDDTLRVEAFEYYHTTDPSFLGRYMSALNHTKKWKYPQVNGLTSIKWADNNCYLATALLTLQQIELKFNPPALQDAYYRARAGEAANFCALILAYCNKTVGELGDVRETMSYLFQHANLDSCKRVLNVVCKTCGQQQTTLKGVEAVMYMGTLSYEQFKKGVQIPCTCGKQATKYLVQQESPFVMMSAPPAQYELKHGTFTCASEYTGNYQCGHYKHITSKETLYCIDGALLTKSSEYKGPITDVFYKENSYTTTIKPVTYKLDGVVCTEIDPKLDNYYKKDNSYFTEQPIDLVPNQPYPNASFDNFKFVCDNIKFADDLNQLTGYKKPASRELKVTFFPDLNGDVVAIDYKHYTPSFKKGAKLLHKPIVWHVNNATNKATYKPNTWCIRCLWSTKPVETSNSFDVLKSEDAQGMDNLACEDLKPVSEEVVENPTIQKDVLECNVKTTEVVGDIILKPANNSLKITEEVGHTDLMAAYVDNSSLTIKKPNELSRVLGLKTLATHGLAAVNSVPWDTIANYAKPFLNKVVSTTTNIVTRCLNRVCTNYMPYFFTLLLQLCTFTRSTNSRIKASMPTTIAKNTVKSVGKFCLEASFNYLKSPNFSKLINIIIWFLLLSVCLGSLIYSTAALGVLMSNLGMPSYCTGYREGYLNSTNVTIATYCTGSIPCSVCLSGLDSLDTYPSLETIQITISSFKWDLTAFGLVAEWFLAYILFTRFFYVLGLAAIMQLFFSYFAVHFISNSWLMWLIINLVQMAPISAMVRMYIFFASFYYVWKSYVHVVDGCNSSTCMMCYKRNRATRVECTTIVNGVRRSFYVYANGGKGFCKLHNWNCVNCDTFCAGSTFISDEVARDLSLQFKRPINPTDQSSYIVDSVTVKNGSIHLYFDKAGQKTYERHSLSHFVNLDNLRANNTKGSLPINVIVFDGKSKCEESSAKSASVYYSQLMCQPILLLDQALVSDVGDSAEVAVKMFDAYVNTFSSTFNVPMEKLKTLVATAEAELAKNVSLDNVLSTFISAARQGFVDSDVETKDVVECLKLSHQSDIEVTGDSCNNYMLTYNKVENMTPRDLGACIDCSARHINAQVAKSHNIALIWNVKDFMSLSEQLRKQIRSAAKKNNLPFKLTCATTRQVVNVVTTKIALKGG

SEQ ID NO: 16390 - protein, 1946 aa, Artificial Sequence
  SARS-CoV-2__MT326086.1__non-structural protein 3 (NSP3)
MAPTKVTFGDDTVIEVQGYKSVNITFELDERIDKVLNEKCSAYTVELGTEVNEFACVVADAVIKTLQPVSELLTPLGIDLDEWSMATYYLFDESGEFKLASHMYCSFYPPDEDEEEGDCEEEEFEPSTQYEYGTEDDYQGKPLEFGATSAALQPEEEQEEDWLDDDSQQTVGQQDGSEDNQTTTIQTIVEVQPQLEMELTPVVQTIEVNSFSGYLKLTDNVYIKNADIVEEAKKVKPTVVVNAANVYLKHGGGVAGALNKATNNAMQVESDDYIATNGPLKVGGSCVLSGHNLAKHCLHVVGPNVNKGEDIQLLKSAYENFNQHEVLLAPLLSAGIFGADPIHSLRVCVDTVRTNVYLAVFDKNLYDKLVSSFLEMKSEKQVEQKIAEIPKEEVKPFITESKPSVEQRKQDDKKIKACVEEVTTTLEETKFLTENLLLYIDINGNLHPDSATLVSDIDITFLKKDAPYIVGDVVQEGVLTAVVIPTKKAGGTTEMLAKALRKVPTDNYITTYPGQGLNGYTVEEAKTVLKKCKSAFYILPSIISNEKQEILGTVSWNLREMLAHAEETRKLMPVCVETKAIVSTIQRKYKGIKIQEGVVDYGARFYFYTSKTTVASLINTLNDLNETLVTMPLGYVTHGLNLEEAARYMRSLKVPATVSVSSPDAVTAYNGYLTSSSKTPEEHFIETISLAGSYKDWSYSGQSTQLGIEFLKRGDKSVYYTSNPTTFHLDGEVITFDNLKTLLSLREVRTIKVFTTVDNINLHTQVVDMSMTYGQQFGPTYLDGADVTKIKPHNSHEGKTFYVLPNDDTLRVEAFEYYHTTDPSFLGRYMSALNHTKKWKYPQVNGLTSIKWADNNCYLATALLTLQQIELKFNPPALQDAYYRARAGEAANFCALILAYCNKTVGELGDVRETMSYLFQHANLDSCKRVLNVVCKTCGQQQTTLKGVEAVMYMGTLSYEQFKKGVQIPCTCGKQATKYLVQQESPFVMMSAPPAQYELKHGTFTCASEYTGNYQCGHYKHITSKETLYCIDGALLTKSSEYKGPITDVFYKENSYTTTIKPVTYKLDGVVCTEIDPKLDNYYKKDNSYFTEQPIDLVPNQPYPNASFDNFKFVCDNIKFADDLNQLTGYKKPASRELKVTFFPDLNGDVVAIDYKHYTPSFKKGAKLLHKPIVWHVNNATNKATYKPNTWCIRCLWSTKPVETSNSFDVLKSEDAQGMDNLACEDLKPVSEEVVENPTIQKDVLECNVKTTEVVGDIILKPANNSLKITEEVGHTDLMAAYVDNSSLTIKKPNELSRVLGLKTLATHGLAAVNSVPWDTIANYAKPFLNKVVSTTTNIVTRCLNRVCTNYMPYFFTLLLQLCTFTRSANSRIKASMPTTIAKNTVKSVGKFCLEASFNYLKSPNFSKLINIIIWFLLLSVCLGSLIYSTAALGVLMSNLGMPSYCTGYREGYLNSTNVTIATYCTGSIPCSVCLSGLDSLDTYPSLETIQITISSFKWDLTAFGLVAEWFLAYILFTRFFYVLGLAAIMQLFFSYFAVHFISNSWLMWLIINLVQMAPISAMVRMYIFFASFYYVWKSYVHVVDGCNSSTCMMCYKRNRATRVECTTIVNGVRRSFYVYANGGKGFCKLHNWNCVNCDTFCAGSTFISDEVARDLSLQFKRPINPTDQSSYIVDSVTVKNGSIHLYFDKAGQKTYERHSLSHFVNLDNLRANNTKGSLPINVIVFDGKSKCEESSAKSASVYYSQLMCQPILLLDQALVSDVGDSAEVAVKMFDAYVNTFSSTFNVPMEKLKTLVATAEAELAKNVSLDNVLSTFISAARQGFVDSDVETKDVVECLKLSHQSDIEVTGDSCNNYMLTYNKVENMTPRDLGACIDCSARHINAQVAKSHNIALIWNVKDFMSLSEQLRKQIRSAAKKNNLPFKLTCATTRQVVNVVTTKIALKGG

SEQ ID NO: 16391 - protein, 1946 aa, Artificial Sequence
  SARS-CoV-2__MT326091.1__non-structural protein 3 (NSP3)
MAPTKVTFGDDTVIEVQGYKSVNITFELDERIDKVLNEKCSAYTVELGTEVNEFACVVADAVIKTLQPVSELLTPLGIGFYEWSMATYYLFDESGEFKLASHMYCSFYPPDEDEEEGDCEEEEFEPSTQYEYGTEDDYQGKPLEFGATSAALQPEEEQEEDWLDDDSQQTVGQQDGSEDNQTTTIQTIVEVQPQLEMELTPVVQTIEVNSFSGYLKLTDNVYIKNADIVEEAKKVKPTVVVNAANVYLKHGGGVAGALNKATNNAMQVESDDYIATNGPLKVGGSCVLSGHNLAKHCLHVVGPNVNKGEDIQLLKSAYENFNQHEVLLAPLLSAGIFGADPIHSLRVCVDTVRTNVYLAVFDKNLYDKLVSSFLEMKSEKQVEQKIAEIPKEEVKPFITESKPSVEQRKQDDKKIKACVEEVTTTLEETKFLTENLLLYIDINGNLHPDSATLVSDIDITFLKKDAPYIVGDVVQEGVLTAVVIPTKKAGGTTEMLAKALRKVPTDSYITTYPGQGLNGYTVEEAKTVLKKCKSAFYILPSIISNEKQEILGTVSWNLREMLAHAEETRKLMPVCVETKAIVSTIQRKYKGIKIQEGVVDYGARFYFYTSKTTVASLINTLNDLNETLVTMPLGYVTHGLNLEEAARYMRSLKVPATVSVSSPDAVTAYNGYLTSSSKTPEEHFIETISLAGSYKDWSYSGQSTQLGIEFLKRGDKSVYYTSNPTTFHLDGEVITFDNLKTLLSLREVRTIKVFTTVDNINLHTQVVDMSMTYGQQFGPTYLDGADVTKIKPHNSHEGKTFYVLPNDDTLRVEAFEYYHTTDPSFLGRYMSALNHTKKWKYPQVNGLTSIKWADNNCYLATALLTLQQIELKFNPPALQDAYYRARAGEAANFCALILAYCNKTVGELGDVRETMSYLFQHANLDSCKRVLNVVCKTCGQQQTTLKGVEAVMYMGTLSYEQFKKGVQIPCTCGKQATKYLVQQESPFVMMSAPPAQYELKHGTFTCASEYTGNYQCGHYKHITSKETLYCIDGALLTKSSEYKGPITDVFYKENSYTTTIKPVTYKLDGVVCTEIDPKLDNYYKKDNSYFTEQPIDLVPNQPYPNASFDNFKFVCDNIKFADDLNQLTGYKKPASRELKVTFFPDLNGDVVAIDYKHYTPSFKKGAKLLHKPIVWHVNNATNKATYKPNTWCIRCLWSTKPVETSNSFDVLKSEDAQGMDNLACEDLKPVSEEVVENPTIQKDVLECNVKTTEVVGDIILKPANNSLKITEEVGHTDLMAAYVDNSSLTIKKPNELSRVLGLKTLATHGLAAVNSVPWDTIANYAKPFLNKVVSTTTNIVTRCLNRVCTNYMPYFFTLLLQLCTFTRSTNSRIKASMPTTIAKNTVKSVGKFCLEASFNYLKSPNFSKLINIIIWFLLLSVCLGSLIYSTAALGVLMSNLGMPSYCTGYREGYLNSTNVTIATYCTGSIPCSVCLSGLDSLDTYPSLETIQITISSFKWDLTAFGLVAEWFLAYILFTRFFYVLGLAAIMQLFFSYFAVHFISNSWLMWLIINLVQMAPISAMVRMYIFFASFYYVWKSYVHVVDGCNSSTCMMCYKRNRATRVECTTIVNGVRRSFYVYANGGKGFCKLHNWNCVNCDTFCAGSTFISDEVARDLSLQFKRPINPTDQSSYIVDSVTVKNGSIHLYFDKAGQKTYERHSLSHFVNLDNLRANNTKGSLPINVIVFDGKSKCEESSAKSASVYYSQLMCQPILLLDQALVSDVGDSAEVAVKMFDAYVNTFSSTFNVPMEKLKTLVATAEAELAKNVSLDNVLSTFISAARQGFVDSDVETKDVVECLKLSHQSDIEVTGDSCNNYMLTYNKVENMTPRDLGACIDCSARHINAQVAKSHNIALIWNVKDFMSLSEQLRKQIRSAAKKNNLPFKLTCATTRQVVNVVTTKIALKGG

SEQ ID NO: 16392 - protein, 1946 aa, Artificial Sequence
  SARS-CoV-2__MT326135.1__non-structural protein 3 (NSP3)
MAPTKVTFGDDTVIEVQGYKSVNITFELDERIDKVLNEKCSAYTVELGTEVNEFACVVADAVIKTLQPVSELLTPLGIDLDEWSMATYYLFDESGEFKLASHMYCSFYPPDEDEEEGDCEEEEFEPSTQYEYGTEDDYQGKPLEFGATSAALQPEEEQEEDWLDDDSQQTVGQQDGSEDNQTTTIQTIVEVQPQLEMELTPVVQTIEVNSFSGYLKLTDNVYIKNADIVEEAKKVKPTVVVNAANVYLKHGGGVAGALNKATNNAMQVESDDYIATNGPLKVGGSCVLSGHNLAKHCLHVVGPNVNKGEDIQLLKSAYENFNQHEVLLAPLLSAGIFGADPIHSLRVCVDTVRTNVYLAVFDKNLYDKLVSSFLEMKSEKQVEQKIAEIPKEEVKPFITESKPSVEQRKQDDKKIKACVEEVTTTLEETKFLTENLLLYIDINGNLHPDSATLVSDIDITFLKKDAPYIVGDVVQEGVLTAVVIPTKKAGGTTEMLAKALRKVPTDNYITTYPGQGLNGYTVEEAKTVLKKCKSAFYILPSIISNEKQEILGTVSWNLREMLAHAEETRKLMPVCVETKAIVSTIQRKYKGIKIQEGVVDYGARFYFYTSKTTVASLINTLNDLNETLVTMPLGYVTHGLNLEEAARYMRSLKVPATVSVSSPDAVTAYNGYLTSSSKTPEEHFIETISLAGSYKDWSYSGQSTQLGIEFLKRGDKSVYYTSNPTTFHLDGEVITFDNLKTLLSLREVRTIKVFTTVDNINLHTQVVDMSMTYGQQFGPTYLDGADVTKIKPHNSHEGKTFYVLPNDDTLRVEAFEYYHTTDPSFLGRYMSALNHTKKWKYPQVNGLTSIKWADNNCYLATALLTLQQIELKFNPPALQDAYYRARAGEAANFCALILAYCNKTVGELGDVRETMSYLFQHANLDSCKRVLNVVCKTCGQQQTTLKGVEAVMYMGTLSYEQFKKGVQIPCTCGKQATKYLVQQESPFVMMSAPPAQYELKHGTFTCASEYTGNYQCGHYKHITSKETLYCIDGALLTKSSEYKGPITDVFYKENSYTTTIKPVTYKLDGVVCTEIDPKLDNYYKKDNSYFTEQPIDLVPNQPYPNASFDNFKFVCDNIKFADDLNQLTGYKKPASRELKVTFFPDLNGDVVAIDYKHYTPSFKKGAKLLHKPIVWHVNNATNKATYKPNTWCIRCLWSTKPVETSNSFDALKSEDAQGMDNLACEDLKPVSEEVVENPTIQKDVLECNVKTTEVVGDIILKPANNSLKITEEVGHTDLMAAYVDNSSLTIKKPNELSRVLGLKTLATHGLAAVNSVPWDTIANYAKPFLNKVVSTTTNIVTRCLNRVCTNYMPYFFTLLLQLCTFTRSTNSRIKASMPTTIAKNTVKSVGKFCLEASFNYLKSPNFSKLINIIIWFLLLSVCLGSLIYSTAALGVLMSNLGMPSYCTGYREGYLNSTNVTIATYCTGSIPCSVCLSGLDSLDTYPSLETIQITISSFKWDLTAFGLVAEWFLAYILFTRFFYVLGLAAIMQLFFSYFAVHFISNSWLMWLIINLVQMAPISAMVRMYIFFASFYYVWKSYVHVVDGCNSSTCMMCYKRNRATRVECTTIVNGVRRSFYVYANGGKGFCKLHNWNCVNCDTFCAGSTFISDEVARDLSLQFKRPINPTDQSSYIVDSVTVKNGSIHLYFDKAGQKTYERHSLSHFVNLDNLRANNTKGSLPINVIVFDGKSKCEESSAKSASVYYSQLMCQPILLLDQALVSDVGDSAEVAVKMFDAYVNTFSSTFNVPMEKLKTLVATAEAELAKNVSLDNVLSTFISAARQGFVDSDVETKDVVECLKLSHQSDIEVTGDSCNNYMLTYNKVENMTPRDLGACIDCSARHINAQVAKSHNIALIWNVKDFMSLSEQLRKQIRSAAKKNNLPFKLTCATTRQVVNVVTTKIALKGG

SEQ ID NO: 16393 - protein, 1946 aa, Artificial Sequence
  SARS-CoV-2__MT326160.1__non-structural protein 3 (NSP3)
MAPTKVTFGDDTVIEVQGYKSVNITFELDERIDKVLNEKCSAYTVELGTEVNEFACVVADAVIKTLQPVSELLTPLGIDLDEWSMATYYLFDESGEFKLASHMYCSFYPPDEDEEEGDCEEEEFEPSTQYEYGTEDDYQGKPLEFGATSAALQPEEEQEEDWLDDDSQQTVGQQDGSEDNQTTTIQTIVEVQPQLEMELTPVVQTIEVNSFSGYLKLTDNVYIKNADIVEEAKKVKPTVVVNAANVYLKHGGGVAGALNKATNNAMQVESDDYIATNGPLKVGGSCVLSGHNLAKHCLHVVGPNVNKGEDIQLLKSAYENFNQHEVLLAPLLSAGIFGADPIHSLRVCVDTVRTNVYLAVFDKNLYDKLVSSFLEMKSEKQVEQKIAEIPKEEVKPFITESKPSVEQRKQDDKKIKACVEEVTTTLEETKFLTENLLLYIDINGNLHPDSATLVSDIDITFLKKDAPYIVGDVVQEGVLTAVVIPTKKAGGTTEMLAKALRKVPTDNYITTYPGQGLNGYTVEEAKTVLKKCKSAFYILPSIISNEKQEILGTVSWNLREMLAHAEETRKLMPVCVETKAIVSTIQRKYKGIKIQEGVVDYGARFYFYTSKTTVASLINTLNDLNETLVTMPLGYVTHGLNLEEAARYMRSLKVPATVSVSSPDAVTAYNGYLTSSSKTPEEHFIETISLAGSYKDWSYSGQSTQLGIEFLKRGDKSVYYTSNPTTFHLDGEVITFDNLKTLLSLREVRTIKVFTTVDNINLHTQVVDMSMTYGQQFGPTYLDGADVTKIKPHNSHEGKTFYVLPNDDTLRVEAFEYYHTTDPSFLGRYMSALNHTKKWKYPQVNGLTSIKWADNNCYLATALLTLQQIELKFNPPALQDAYYRARAGEAANFCALILAYCNKTVGELGDVRETMSYLFQHANLDSCKRVLNVVCKTCGQQQTTLKGVEAVMYMGTLSYEQFKKGVQIPCTCGKQATKYLVQQESPFVMMSAPPAQYELKHGTFTCASEYTGNYQCGHYKHITSKETLYCIDGALLTKSSEYKGPITDVFYKENSYTTTIKPVTYKLDGVVCTEIDPKLDNYYKKDNSYFTEQPIDLVPNQPYPNASFDNFKFVCDNIKFADDLNQLTGYKKPASRELKVTFFPDLNGDVVAIDYKHYTPSFKKGAKLLHKPIVWHVNNATNKATYKPNTWCIRCLWSTKPVETSNSFDVLKSEDAQGMDNLACEDLKPVSEEVVENPTIQKDVLECNVKTTEVVGDIILKPANNSLKITEEVGHTDLMAAYVDNSSLTIKKPNELSRVLGLKTLATHGLAAINSVPWDTIANYAKPFLNKVVSTTTNIVTRCLNRVCTNYMPYFFTLLLQLCTFTRSTNSRIKASMPTTIAKNTVKSVGKFCLEASFNYLKSPNFSKLINIIIWFLLLSVCLGSLIYSTAALGVLMSNLGMPSYCTGYREGYLNSTNVTIATYCTGSIPCSVCLSGLDSLDTYPSLETIQITISSFKWDLTAFGLVAEWFLAYILFTRFFYVLGLAAIMQLFFSYFAVHFISNSWLMWLIINLVQMAPISAMVRMYIFFASFYYVWKSYVHVVDGCNSSTCMMCYKRNRATRVECTTIVNGVRRSFYVYANGGKGFCKLHNWNCVNCDTFCAGSTFISDEVARDLSLQFKRPINPTDQSSYIVDSVTVKNGSIHLYFDKAGQKTYERHSLSHFVNLDNLRANNTKGSLPINVIVFDGKSKCEESSAKSASVYYSQLMCQPILLLDQALVSDVGDSAEVAVKMFDAYVNTFSSTFNVPMEKLKTLVATAEAELAKNVSLDNVLSTFISAARQGFVDSDVETKDVVECLKLSHQSDIEVTGDSCNNYMLTYNKVENMTPRDLGACIDCSARHINAQVAKSHNIALIWNVKDFMSLSEQLRKQIRSAAKKNNLPFKLTCATTRQVVNVVTTKIALKGG

SEQ ID NO: 16394 - protein, 1946 aa, Artificial Sequence
  SARS-CoV-2__MT325594.1__non-structural protein 3 (NSP3)
MAPTKVTFGDDTVIEVQGYKSVNITFELDERIDKVLNEKCSAYTVELGTEVNEFACVVADAVIKTLQPVSELLTPLGIDLDEWSMATYYLFDESGEFKLASHMYCSFYPPDEDEEEGDCEEEEFEPSTQYEYGTEDDYQGKPLEFGATSAALQPEEEQEEDWLDDDSQQTVGQQDGSEDNQTTTIQTIVEVQPQLEMELTPVVQTIEVNSFSGYLKLTDNVYIKNADIVEEAKKVKPTVVVNAANVYLKHGGGVAGALNKATNNAMQVESDDYIATNGPLKVGGSCVLSGHNLAKHCLHVVGPNVNKGEDIQLLKSAYENFNQHEVLLAPLLSAGIFGADPIHSLRVCVDTVRTNVYLAVFDKNLYDKLVSSFLEMKSEKQVEQKIAEIPKEEVKPFITESKPSVEQRKQDDKKIKACVEEVTTTLEETKFLTENLLLYIDINGNLHPDSATLVSDIDITFLKKDAPYIVGDVVQEGVLTAVVIPTKKAGGTTEMLAKALRKVPTDNYITTYPGQGLNGYTVEEAKTVLKKCKSAFYILPSIISNEKQEILGTVSWNLREMLAHAEETRKLMPVCVETKAIVSTIQRKYKGIKIQEGVVDYGARFYFYTSKTTVASLINTLNDLNETLVTMPLGYVTHGLNLEEAARYMRSLKVPATVSVSSPDAVTAYNGYLTSSSKTPEEHFIETISLAGSYKDWSYSGQSTQLGIEFLKRGDKSVYYTSNPTTFHLDGEVITFDNLKTLLSLREVRTIKVFTTVDNINLHMQVVDMSMTYGQQFGPTYLDGADVTKIKPHNSHEGKTFYVLPNDDTLRVEAFEYYHTTDPSFLGRYMSALNHTKKWKYPQVNGLTSIKWADNNCYLATALLTLQQIELKFNPPALQDAYYRARAGEAANFCALILAYCNKTVGELGDVRETMSYLFQHANLDSCKRVLNVVCKTCGQQQTTLKGVEAVMYMGTLSYEQFKKGVQIPCTCGKQATKYLVQQESPFVMMSAPPAQYELKHGTFTCASEYTGNYQCGHYKHITSKETLYCIDGALLTKSSEYKGPITDVFYKENSYTTTIKPVTYKLDGVVCTEIDPKLDNYYKKDNSYFTEQPIDLVPNQPYPNASFDNFKFVCDNIKFADDLNQLTGYKKPASRELKVTFFPDLNGDVVAIDYKHYTPSFKKGAKLLHKPIVWHVNNATNKATYKPNTWCIRCLWSTKPVETSNSFDVLKSEDAQGMDNLACEDLKPVSEEVVENPTIQKDVLECNVKTTEVVGDIILKPANNSLKITEEVGHTDLMAAYVDNSSLTIKKPNELSRVLGLKTLATHGLAAVNSVPWDTIANYAKPFLNKVVSTTTNIVTRCLNRVCTNYMPYFFTLLLQLCTFTRSTNSRIKASMPTTIAKNTVKSVGKFCLEASFNYLKSPNFSKLINIIIWFLLLSVCLGSLIYSTAALGVLMSNLGMPSYCTGYREGYLNSTNVTIATYCTGSIPCSVCLSGLDSLDTYPSLETIQITISSFKWDLTAFGLVAEWFLAYILFTRFFYVLGLAAIMQLFFSYFAVHFISNSWLMWLIINLVQMAPISAMVRMYIFFASFYYVWKSYVHVVDGCNSSTCMMCYKRNRATRVECTTIVNGVRRSFYVYANGGKGFCKLHNWNCVNCDTFCAGSTFISDEVARDLSLQFKRPINPTDQSSYIVDSVTVKNGSIHLYFDKAGQKTYERHSLSHFVNLDNLRANNTKGSLPINVIVFDGKSKCEESSAKSASVYYSQLMCQPILLLDQALVSDVGDSAEVAVKMFDAYVNTFSSTFNVPMEKLKTLVATAEAELAKNVSLDNVLSTFISAARQGFVDSDVETKDVVECLKLSHQSDIEVTGDSCNNYMLTYNKVENMTPRDLGACIDCSARHINAQVAKSHNIALIWNVKDFMSLSEQLRKQIRSAAKKNNLPFKLTCATTRQVVNVVTTKIALKGG

SEQ ID NO: 16395 - protein, 1946 aa, Artificial Sequence
  SARS-CoV-2__MT293211.1__non-structural protein 3 (NSP3)
MAPTKVTFGDDTVIEVQGYKSVNITFELDERIDKVLNEKCSAYTVELGTEVNEFACVVADAVIKTLQPVSELLTPLGIDLDEWSMATYYLFDESGEFKLASHMYCSFYPPDEDEEEGDCEEEEFEPSTQYEYGTEDDYQGKPLEFGATSAALQPEEEQEEDWLDDDSQQTVGQQDGSEDNQTTTIQTIVEVQPQLEMELTPVVQTIEVNSFSGYLKLTDNVYIKNADIVEEAKKVKPTVVVNAANVYLKHGGGVAGALNKATNNAMQVESDDYIATNGPLKVGGSCVLSGHNLAKHCLHVVGPNVNKGEDIQLLKSAYENFNQHEVLLAPLLSAGIFGADPIHSLRVCVDTVRTNVYLAVFDKNLYDKLVSSFLEMKSEKQVEQKIAEIPKEEVKPFITESKPSVEQRKQDDKKIKACVEEVTTTLEETKFLTENLLLYIDINGNLHPDSATLVSDIDITFLKKDAPYIVGDVVQEGVLTAVVIPTKKAGGTTEMLAKALRKVPTDNYITTYPGQGLNGYTVEEAKTVLKKCKSAFYILPSIISNEKQEILGTVSWNLREMLAHAEETRKLMPVCVETKAIVSTIQRKYKGIKIQEGVVDYGARFYFYTSKTTVASLINTLNDLNETLVTMPLGYVTHGLNLEEAARYMRSLKVPATVSVSSPDAVTAYNGYLTSSSKTPEEHFIETISLAGSYKDWSYSGQSTQLGIEFLKRGDKSVYYTSNPTTFHLDGEVITFDNLKTLLSLREVRTIKVFTTVDNINLHTQVVDMSMTYGQQFGPTYLDGADVTKIKPHNSHEGKTFYVLPNDDTLRVEAFEYYHTTDPSFLGRYMSALNHTKKWKYPQVNGLTSIKWADNNCYLATALLTLQQIELKFNPPALQDAYYRARAGEAANFCALILAYCNKTVGELGDVRETMSYLFQHANLDSCKRVLNVVCKTCGQQQTTLKGVEAVMYMGTLSYEQFKKGVQIPCTCGKQATKYLVQQESPFVMMSAPPAQYELKHGTFTCASEYTGNYQCGHYKHIISKETLYCIDGALLTKSSEYKGPITDVFYKENSYTTTIKPVTYKLDGVVCTEIDPKLDNYYKKDNSYFTEQPIDLVPNQPYPNASFDNFKFVCDNIKFADDLNQLTGYKKPASRELKVTFFPDLNGDVVAIDYKHYTPSFKKGAKLLHKPIVWHVNNATNKATYKPNTWCIRCLWSTKPVETSNSFDVLKSEDAQGMDNLACEDLKPVSEEVVENPTIQKDVLECNVKTTEVVGDIILKPANNSLKITEEVGHTDLMAAYVDNSSLTIKKPNELSRVLGLKTLATHGLAAVNSVPWDTIANYAKPFLNKVVSTITNIVTRCLNRVCTNYMPYFFTLLLQLCTFTRSTNSRIKASMPTTIAKNTVKSVGKFCLEASFNYLKSPNFSKLINIIIWFLLLSVCLGSLIYSTAALGVLMSNLGMPSYCTGYREGYLNSTNVTIATYCTGSIPCSVCLSGLDSLDTYPSLETIQITISSFKWDLTAFGLVAEWFLAYILFTRFFYVLGLAAIMQLFFSYFAVHFISNSWLMWLIINLVQMAPISAMVRMYIFFASFYYVWKSYVHVVDGCNSSTCMMCYKRNRATRVECTTIVNGVRRSFYVYANGGKGFCKLHNWNCVNCDTFCAGSTFISDEVARDLSLQFKRPINPTDQSSYIVDSVTVKNGSIHLYFDKAGQKTYERHSLSHFVNLDNLRANNTKGSLPINVIVFDGKSKCEESSAKSASVYYSQLMCQPILLLDQALVSDVGDSAEVAVKMFDAYVNTFSSTFNVPMEKLKTLVATAEAELAKNVSLDNVLSTFISAARQGFVDSDVETKDVVECLKLSHQSDIEVTGDSCNNYMLTYNKVENMTPRDLGACIDCSARHINAQVAKSHNIALIWNVKDFMSLSEQLRKQIRSAAKKNNLPFKLTCATTRQVVNVVTTKIALKGG

SEQ ID NO: 16396 - protein, 1946 aa, Artificial Sequence
  SARS-CoV-2__MT291826.1__non-structural protein 3 (NSP3)
MAPTKVTFGDDTVIEVQGYKSVNITFELDERIDKVLNEKCSAYTVELGTEVNEFACVVADAVIKTLQPVSELLTPLGIDLDEWSMATYYLFDESGEFKLASHMYCSFYPPDEDEEEGDCEEEEFEPSTQYEYGTEDDYQGKPLEFGATSAALQPEEEQEEDWLDDDSQQTVGQQDGSEDNQTTTIQTIVEVQPQLEMELTPVVQTIEVNSFSGYLKLTDNVYIKNADIVEEAKKVKPTVVVNAANVYLKHGGGVAGALNKATNNAMQVESDDYIATNGPLKVGGSCVLSGHNLAKHCLHVVGPNVNKGEDIQLLKSAYENFNQHEVLLAPLLSAGIFGADPIHSLRVCVDTVRTNVYLAVFDKNLYDKLVSSFLEMKSEKQVEQKIAEIPKEEVKPFITESKPSVEQRKQDDKKIKACVEEVTTTLEETKFLTENLLLYIDINGNLHPDSATLVSDIDITFLKKDAPYIVGDVVQEGVLTAVVIPTKKAGGTTEMLAKALRKVPTDNYITTYPGQGLNGYTVEEAKTVLKKCKSAFYILPSIISNEKQEILGTVSWNLREMLAHAEETRKLMPVCVETKAIVSTIQRKYKGIKIQEGVVDYGARFYFYTSKTTVASLINTLNDLNETLVTMPLGYVTHGLNLEEAARYMRSLKVPATVSVSSPDAVTAYNGYLTSSSKTPEEHFIETISLAGSYKDWSYSGQSTQLGIEFLKRGDKSVYYTSNPTTFHLDGEVITFDNLKTLLPLREVRTIKVFTTVDNINLHTQVVDMSMTYGQQFGPTYLDGADVTKIKPHNSHEGKTFYVLPNDDTLRVEAFEYYHTTDPSFLGRYMSALNHTKKWKYPQVNGLTSIKWADNNCYLATALLTLQQIELKFNPPALQDAYYRARAGEAANFCALILAYCNKTVGELGDVRETMSYLFQHANLDSCKRVLNVVCKTCGQQQTTLKGVEAVMYMGTLSYEQFKKGVQIPCTCGKQATKYLVQQESPFVMMSAPPAQYELKHGTFTCASEYTGNYQCGHYKHITSKETLYCIDGALLTKSSEYKGPITDVFYKENSYTTTIKPVTYKLDGVVCTEIDPKLDNYYKKDNSYFTEQPIDLVPNQPYPNASFDNFKFVCDNIKFADDLNQLTGYKKPASRELKVTFFPDLNGDVVAIDYKHYTPSFKKGAKLLHKPIVWHVNNATNKATYKPNTWCIRCLWSTKPVETSNSFDVLKSEDAQGMDNLACEDLKPVSEEVVENPTIQKDVLECNVKTTEVVGDIILKPANNSLKITEEVGHTDLMAAYVDNSSLTIKKPNELSRVLGLKTLATHGLAAVNSVPWDTIANYAKPFLNKVVSTTTNIVTRCLNRVCTNYMPYFFTLLLQLCTFTRSTNSRIKASMPTTIAKNTVKSVGKFCLEASFNYLKSPNFSKLINIIIWFLLLSVCLGSLIYSTAALGVLMSNLGMPSYCTGYREGYLNSTNVTIATYCTGSIPCSVCLSGLDSLDTYPSLETIQITISSFKWDLTAFGLVAEWFLAYILFTRFFYVLGLAAIMQLFFSYFAVHFISNSWLMWLIINLVQMAPISAMVRMYIFFASFYYVWKSYVHVVDGCNSSTCMMCYKRNRATRVECTTIVNGVRRSFYVYANGGKGFCKLHNWNCVNCDTFCAGSTFISDEVARDLSLQFKRPINPTDQSSYIVDSVTVKNGSIHLYFDKAGQKTYERHSLSHFVNLDNLRANNTKGSLPINVIVFDGKSKCEESSAKSASVYYSQLMCQPILLLDQALVSDVGDSAEVAVKMFDAYVNTFSSTFNVPMEKLKTLVATAEAELAKNVSLDNVLSTFISAARQGFVDSDVETKDVVECLKLSHQSDIEVTGDSCNNYMLTYNKVENMTPRDLGACIDCSARHINAQVAKSHNIALIWNVKDFMSLSEQLRKQIRSAAKKNNLPFKLTCATTRQVVNVVTTKIALKGG

SEQ ID NO: 16397 - protein, 1946 aa, Artificial Sequence
  SARS-CoV-2__MT276325.2__non-structural protein 3 (NSP3)
MAPTKVTFGDDTVIEVQGYKSVNITFELDERIDKVLNEKCSAYTVELGTEVNEFACVVADAVIKTLQPVSELLTPLGIDLDEWSMATYYLFDESGEFKLASHMYCSFYPPDEDEEEGDCEEEEFEPSTQYEYGTEDDYQGKPLEFGATSAALQPEEEQEEDWLDDDSQQTVGQQDGSEDNQTTTIQTIVEVQPQLEMELTPVVQTIEVNSFSGYLKLTDNVYIKNADIVEEVKKVKPTVVVNAANVYLKHGGGVAGALNKATNNAMQVESDDYIATNGPLKVGGSCVLSGHNLAKHCLHVVGPNVNKGEDIQLLKSAYENFNQHEVLLAPLLSAGIFGADPIHSLRVCVDTVRTNVYLAVFDKNLYDKLVSSFLEMKSEKQVEQKIAEIPKEEVKPFITESKPSVEQRKQDDKKIKACVEEVTTTLEETKFLTENLLLYIDINGNLHPDSATLVSDIDITFLKKDAPYIVGDVVQEGVLTAVVIPTKKAGGTTEMLAKALRKVPTDNYITTYPGQGLNGYTVEEAKTVLKKCKSAFYILPSIISNEKQEILGTVSWNLREMLAHAEETRKLMPVCVETKAIVSTIQRKYKGIKIQEGVVDYGARFYFYTSKTTVASLINTLNDLNETLVTMPLGYVTHGLNLEEAARYMRSLKVPATVSVSSPDAVTAYNGYLTSSSKTPEEHFIETISLAGSYKDWSYSGQSTQLGIEFLKRGDKSVYYTSNPTTFHLDGEVITFDNLKTLLSLREVRTIKVFTTVDNINLHTQVVDMSMTYGQQFGPTYLDGADVTKIKPHNSHEGKTFYVLPNDDTLRVEAFEYYHTTDPSFLGRYMSALNHTKKWKYPQVNGLTSIKWADNNCYLATALLTLQQIELKFNPPALQDAYYRARAGEAANFCALILAYCNKTVGELGDVRETMSYLFQHANLDSCKRVLNVVCKTCGQQQTTLKGVEAVIYMGTLSYEQFKKGVQIPCTCGKQATKYLVQQESPFVMMSAPPAQYELKHGTFTCASEYTGNYQCGHYKHITSKETLYCIDGALLTKSSEYKGPITDVFYKENSYTTTIKPVTYKLDGVVCTEIDPKLDNYYKKDNSYFTEQPIDLVPNQPYPNASFDNFKFVCDNIKFADDLNQLTGYKKPASRELKVTFFPDLNGDVVAIDYKHYTPSFKKGAKLLHKPIVWHVNNATNKATYKPNTWCIRCLWSTKPVETSNSFDVLKSEDAQGMDNLACEDLKPVSEEVVENPTIQKDVLECNVKTTEVVGDIILKPANNSLKITEEVGHTDLMAAYVDNSSLTIKKPNELSRVLGLKTLATHGLAAVNSVPWDTIANYAKPFLNKVVSTTTNIVTRCLNRVCTNYMPYFFTLLLQLCTFTRSTNSRIKASMPTTIAKNTVKSVGKFCLEASFNYLKSPNFSKLINIIIWFLLLSVCLGSLIYSTAALGVLMSNLGMPSYCTGYREGYLNSTNVTIATYCTGSIPCSVCLSGLDSLDTYPSLETIQITISSFKWDLTAFGLVAEWFLAYILFTRFFYVLGLAAIMQLFFSYFAVHFISNSWLMWLIINLVQMAPISAMVRMYIFFASFYYVWKSYVHVVDGCNSSTCMMCYKRNRATRVECTTIVNGVRRSFYVYANGGKGFCKLHNWNCVNCDTFCAGSTFISDEVARDLSLQFKRPINPTDQSSYIVDSVTVKNGSIHLYFDKAGQKTYERHSLSHFVNLDNLRANNTKGSLPINVIVFDGKSKCEESSAKSASVYYSQLMCQPILLLDQALVSDVGDSAEVAVKMFDAYVNTFSSTFNVPMEKLKTLVATAEAELAKNVSLDNVLSTFISAARQGFVDSDVETKDVVECLKLSHQSDIEVTGDSCNNYMLTYNKVENMTPRDLGACIDCSARHINAQVAKSHNIALIWNVKDFMSLSEQLRKQIRSAAKKNNLPFKLTCATTRQVVNVVTTKIALKGG

SEQ ID NO: 16398 - protein, 1946 aa, Artificial Sequence
  SARS-CoV-2__MT263415.1__non-structural protein 3 (NSP3)
MAPTKVTFGDDTVIEVQGYKSVNITFELDERIDKVLNEKCSAYTVELGTEVNEFACVVADAVIKTLQPVSELLTPLGIDLDEWSMATYYLFDESGEFKLASHMYCSFYPPDEDEEEGDCEEEEFEPSTQYEYGTEDDYQGKPLEFGATSAALQPEEEQEEDWLDDDSQQTVGQQDGSEDNQTTTIQTIVEVQPQLEMELTPVVQTIEVNSFSGYLKLTDNVYIKNADIVEEAKKVKPTVVVNAANVYLKHGGGVAGALNKATNNAMQVESDDYIATNGPLKVGGSCVLSGHNLAKHCLHVVGPNVNKGEDIQLLKSAYENFNQHEVLLAPLLSAGIFGADPIHSLRVCVDTVRTNVYLAVFDKNLYDKLVSSFLEMKSEKQVEQKIAEIPKEEVKPFITESKPSVEQRKQDDKKIKACVEEVTTTLEETKFLTENLLLYIDINGNLHPDSATLVSDIDITFLKKDAPYIVGDVVQEGVLTAVVIPTKKAGGTTEMLAKALRKVPTDNYITTYPGQGLNGYTVEEAKTVLKKCKSAFYILPSIISNEKQEILGTVSWNLREMLAHAEETRKLMPVCVETKAIVSTIQRKYKGIKIQEGVVDYGARFYFYTSKTTVASLINTLNDLNETLVTMPLGYVTHGLNLEEAARYMRSLKVPVTVSVSSPDAVTAYNGYLTSSSKTPEEHFIETISLAGSYKDWSYSGQSTQLGIEFLKRGDKSVYYTSNPTTFHLDGEVITFDNLKTLLSLREVRTIKVFTTVDNINLHTQVVDMSMTYGQQFGPTYLDGADVTKIKPHNSHEGKTFYVLPNDDTLRVEAFEYYHTTDPSFLGRYMSALNHTKKWKYPQVNGLTSIKWADNNCYLATALLTLQQIELKFNPPALQDAYYRARAGEAANFCALILAYCNKTVGELGDVRETMSYLFQHANLDSCKRVLNVVCKTCGQQQTTLKGVEAVMYMGTLSYEQFKKGVQIPCTCGKQATKYLVQQESPFVMMSAPPAQYELKHGTFTCASEYTGNYQCGHYKHITSKETLYCIDGALLTKSSEYKGPITDVFYKENSYTTTIKPVTYKLDGVVCTEIDPKLDNYYKKDNSYFTEQPIDLVPNQPYPNASFDNFKFVCDNIKFADDLNQLTGYKKPASRELKVTFFPDLNGDVVAIDYKHYTPSFKKGAKLLHKPIVWHVNNATNKATYKPNTWCIRCLWSTKPVETSNSFDVLKSEDAQGMDNLACEDLKPVSEEVVENPTIQKDVLECNVKTTEVVGDIILKPANNSLKITEEVGHTDLMAAYVDNSSLTIKKPNELSRVLGLKTLATHGLAAVNSVPWDTIANYAKPFLNKVVSTTTNIVTRCLNRVCTNYMPYFFTLLLQLCTFTRSTNSRIKASMPTTIAKNTVKSVGKFCLEASFNYLKSPNFSKLINIIIWFLLLSVCLGSLIYSTAALGVLMSNLGMPSYCTGYREGYLNSTNVTIATYCTGSIPCSVCLSGLDSLDTYPSLETIQITISSFKWDLTAFGLVAEWFLAYILFTRFFYVLGLAAIMQLFFSYFAVHFISNSWLMWLIINLVQMAPISAMVRMYIFFASFYYVWKSYVHVVDGCNSSTCMMCYKRNRATRVECTTIVNGVRRSFYVYANGGKGFCKLHNWNCVNCDTFCAGSTFISDEVARDLSLQFKRPINPTDQSSYIVDSVTVKNGSIHLYFDKAGQKTYERHSLSHFVNLDNLRANNTKGSLPINVIVFDGKSKCEESSAKSASVYYSQLMCQPILLLDQALVSDVGDSAEVAVKMFDAYVNTFSSTFNVPMEKLKTLVATAEAELAKNVSLDNVLSTFISAARQGFVDSDVETKDVVECLKLSHQSDIEVTGDSCNNYMLTYNKVENMTPRDLGACIDCSARHINAQVAKSHNIALIWNVKDFMSLSEQLRKQIRSAAKKNNLPFKLTCATTRQVVNVVTTKIALKGG

SEQ ID NO: 16399 - protein, 1946 aa, Artificial Sequence
  SARS-CoV-2__MT263422.1__non-structural protein 3 (NSP3)
MAPTKVTFGDDTVIEVQGYKSVNITFELDERIDKVLNEKCSAYTVELGTEVNEFACVVADAVIKTLQPVSELLTPLGIDLDEWSMATYYLFDESGEFKLASHMYCSFYPPDEDEEEGDCEEEEFEPSTQYEYGTEDDYQGKPLEFGATSAALQPEEEQEEDWLDDDSQQTVGQQDGSEDNQTTTIQTIVEVQPQLEMELTPVVQTIEVNSFSGYLKLTDNVYIKNADIVEEAKKVKPTVVVNAANVYLKHGGGVAGALNKATNNAMQVESDDYIATNGPLKVGGSCVLSGHNLAKHCLHVVGPNVNKGEDIQLLKSAYENFNQHEVLLAPLLSAGIFGADPIHSLRVCVDTVRTNVYLAVFDKNLYDKLVSSFLEMKSEKQVEQKIAEIPKEEVKPFITESKPSVEQRKQDDKKIKACVEEVTTTLEETKFLTENLLLYIDINGNLHPDSATLVSDIDITFLKKDAPYIVGDVVQEGVLTAVVIPTKKAGGTTEMLAKALRKVPTDNYITTYPGQGLNGYTVEEAKTVLKKCKSAFYILPSIISNEKQEILGTVSWNLREMLAHAEETRKLMPVCVETKAIVSTIQRKYKGIKIQEGVVDYGARFYFYTSKTTVASLINTLNDLNETLVTMPLGYVTHGLNLEEAARYMRSLKVPATVSVSSPDAVTAYNGYLTSSSKTPEEHFIETISLAGSYKDWSYSGQSTQLGIEFLKRGDKSVYYTSNPTTFHLDGEVITFDNLKTLLSLREVRTIKVFTTVDNINFHTQVVDMSMTYGQQFGPTYLDGADVTKIKPHNSHEGKTFYVLPNDDTLRVEAFEYYHTTDPSFLGRYMSALNHTKKWKYPQVNGLTSIKWADNNCYLATALLTLQQIELKFNPPALQDAYYRARAGEAANFCALILAYCNKTVGELGDVRETMSYLFQHANLDSCKRVLNVVCKTCGQQQTTLKGVEAVMYMGTLSYEQFKKGVQIPCTCGKQATKYLVQQESPFVMMSAPPAQYELKHGTFTCASEYTGNYQCGHYKHITSKETLYCIDGALLTKSSEYKGPITDVFYKENSYTTTIKPVTYKLDGVVCTEIDPKLDNYYKKDNSYFTEQPIDLVPNQPYPNASFDNFKFVCDNIKFADDLNQLTGYKKPASRELKVTFFPDLNGDVVAIDYKHYTPSFKKGAKLLHKPIVWHVNNATNKATYKPNTWCIRCLWSTKPVETSNSFDVLKSEDAQGMDNLACEDLKPVSEEVVENPTIQKDVLECNVKTTEVVGDIILKPANNSLKITEEVGHTDLMAAYVDNSSLTIKKPNELSRVLGLKTLATHGLAAVNSVPWDTIANYAKPFLNKVVSTTTNIVTRCLNRVCTNYMPYFFTLLLQLCTFTRSTNSRIKASMPTTIAKNTVKSVGKFCLEASFNYLKSPNFSKLINIIIWFLLLSVCLGSLIYSTAALGVLMSNLGMPSYCTGYREGYLNSTNVTIATYCTGSIPCSVCLSGLDSLDTYPSLETIQITISSFKWDLTAFGLVAEWFLAYILFTRFFYVLGLAAIMQLFFSYFAVHFISNSWLMWLIINLVQMAPISAMVRMYIFFASFYYVWKSYVHVVDGCNSSTCMMCYKRNRATRVECTTIVNGVRRSFYVYANGGKGFCKLHNWNCVNCDTFCAGSTFISDEVARDLSLQFKRPINPTDQSSYIVDSVTVKNGSIHLYFDKAGQKTYERHSLSHFVNLDNLRANNTKGSLPINVIVFDGKSKCEESSAKSASVYYSQLMCQPILLLDQALVSDVGDSAEVAVKMFDAYVNTFSSTFNVPMEKLKTLVATAEAELAKNVSLDNVLSTFISAARQGFVDSDVETKDVVECLKLSHQSDIEVTGDSCNNYMLTYNKVENMTPRDLGACIDCSARHINAQVAKSHNIALIWNVKDFMSLSEQLRKQIRSAAKKNNLPFKLTCATTRQVVNVVTTKIALKGG

SEQ ID NO: 16400 - protein, 1946 aa, Artificial Sequence
  SARS-CoV-2__MT263457.1__non-structural protein 3 (NSP3)
MAPTKVTFGDDTVIEVQGYKSVNITFELDERIDKVLNEKCSAYTVELGTEVNEFACVVADAVIKTLQPVSELLTPLGIDLDEWSMATYYLFDESGEFKLASHMYCSFYPPDEDEEEGDCEEEEFEPSTQYEYGTEDDYQGKPLEFGATSAALQPEEEQEEDWLDDDSQQTVGQQDGSEDNQTTTIQTIVEVQPQLEMELTPVVQTIEVNSFSGYLKLTDNVYIKNADIVEEAKKVKPTVVVNAANVYLKHGGGVAGALNKATNNAMQVESDDYIATNGPLKVGGSCVLSGHNLAKHCLHVVGPNVNKGEDIQLLKSAYENFNQHEVLLAPLLSAGIFGADPIHSLRVCVDTVRTNVYLAVFDKNLYDKLVSSFLEMKSEKQVEQKIAEIPKEEVKPFITESKPSVEQRKQDDKKIKACVEEVTTTLEETKFLTENLLLYIDINGNLHPDSATLVSDIDITFLKKDAPYIVGDVVQEGVLTAVVIPTKKAGGTTEMLAKALRKVPTDNYITTYPGQGLNGYTVEEAKTVLKKCKSAFYILPSIISNEKQEILGTVSWNLREMLAHAEETRKLMPVCVETKAIVSTIQRKYKGIKIQEGVVDYGARFYFYTSKTTVASLINTLNDLNETLVTMPLGYVTHGLNLEEAARYMRSLKVPATVSVSSPDAVTAYNGYLTSSSKTPEEHFIETISLAGSYKDWSYSGQSTQLGIEFLKRGDKSVYYTSNPTTFHLDGEVITFDNLKTLLSLREVRTIKVFTTVDNINLHTQVVDMSMTYGQQFGPTYLDGADVTKIKPHNSHEGKTFYVLPNDDTLRVEAFEYYHTTDPSFLGRYMSALNHTKKWKYPQVNGLTSIKWADNNCYLATALLTLQQIELKFNPPALQDAYYRARAGEAANFCALILAYCNKTVGELGDVRETMSYLFQHANLDSCKRVLNVVCKTCGQQQTTLKGVEAVMYMGTLSYEQFKKGVQIPCTCGKQATKYLVQQESPFVMMSAPPAQYELKHGTFTCASEYTGNYQCGHYKHITSKETLYCIDGALLTKSSEYKGPITDVFYKENSYTTTIKPVTYKLDGVVCTEIDPKLDNYYKKDNSYFTEQPIDLVPNQPYPNASFDNFKFVCDNIKFADDLNQLTGYKKPASRELKVTFFPDLNGDVVAIDYKHYTPSFKKGAKLLHKPIVWHVNNATNKATYKPNTWCIRCLWSTKPVETSNSFDVLKSEDAQGMDNLACEDLKPVSEEVVENPTIQKDVLECNVKTTEVVGDIILKPANNSLKITEEVGHTDLMAAYVDNSSLTIKKPNELSRVLGLKTLATHGLAAVNSVPWDTIANYAKPFLNKVVSTTTNIVTRCLNRVCTNYMPYFFTLLLQLCTFTRSTNSRIKASMPTTIAKNTVKSVGKFCLEASFNYLKSPNFSKLINIIIWFLLLSVCLGSLIYSTAALGVLMSNLGMPSYCTGYREGYLNSTNVTIATYCTGSIPCSVCLSGLDSLDTYPSLETIQITISSFKWDLTAFGLVAEWFLAYILFTRFFYVLGLAAIMQLFFSYFAVHFISNSWLMWLIINLVQMAPISAMVRMYIFFASFYYVWKSYVHVVDGCNSSTCMMCYKRNRVTRVECTTIVNGVRRSFYVYANGGKGFCKLHNWNCVNCDTFCAGSTFISDEVARDLSLQFKRPINPTDQSSYIVDSVTVKNGSIHLYFDKAGQKTYERHSLSHFVNLDNLRANNTKGSLPINVIVFDGKSKCEESSAKSASVYYSQLMCQPILLLDQALVSDVGDSAEVAVKMFDAYVNTFSSTFNVPMEKLKTLVATAEAELAKNVSLDNVLSTFISAARQGFVDSDVETKDVVECLKLSHQSDIEVTGDSCNNYMLTYNKVENMTPRDLGACIDCSARHINAQVAKSHNIALIWNVKDFMSLSEQLRKQIRSAAKKNNLPFKLTCATTRQVVNVVTTKIALKGG

SEQ ID NO: 16401 - protein, 1946 aa, Artificial Sequence
  SARS-CoV-2__MT163720.1__non-structural protein 3 (NSP3)
MAPTKVTFGDDTVIEVQGYKSVNITFELDERIDKVLNEKCSAYTVELGTEVNEFACVVADAVIKTLQPVSELLTPLGIDLDEWSMATYYLFDESGEFKLASHMYCSFYPPDEDEEEGDCEEEEFEPSTQYEYGTEDDYQGKPLEFGATSAALQPEEEQEEDWLDDDSQQTVGQQDGSEDNQTTTIQTIVEVQPQLEMELTPVVQTIEVNSFSGYLKLTDNVYIKNADIVDEAKKVKPTVVVNAANVYLKHGGGVAGALNKATNNAMQVESDDYIATNGPLKVGGSCVLSGHNLAKHCLHVVGPNVNKGEDIQLLKSAYENFNQHEVLLAPLLSAGIFGADPIHSLRVCVDTVRTNVYLAVFDKNLYDKLVSSFLEMKSEKQVEQKIAEIPKEEVKPFITESKPSVEQRKQDDKKIKACVEEVTTTLEETKFLTENLLLYIDINGNLHPDSATLVSDIDITFLKKDAPYIVGDVVQEGVLTAVVIPTKKAGGTTEMLAKALRKVPTDNYITTYPGQGLNGYTVEEAKTVLKKCKSAFYILPSIISNEKQEILGTVSWNLREMLAHAEETRKLMPVCVETKAIVSTIQRKYKGIKIQEGVVDYGARFYFYTSKTTVASLINTLNDLNETLVTMPLGYVTHGLNLEEAARYMRSLKVPATVSVSSPDAVTAYNGYLTSSSKTPEEHFIETISLAGSYKDWSYSGQSTQLGIEFLKRGDKSVYYTSNPTTFHLDGEVITFDNLKTLLSLREVRTIKVFTTVDNINLHTQVVDMSMTYGQQFGPTYLDGADVTKIKPHNSHEGKTFYVLPNDDTLRVEAFEYYHTTDPSFLGRYMSALNHTKKWKYPQVNGLTSIKWADNNCYLATALLTLQQIELKFNPPALQDAYYRARAGEAANFCALILAYCNKTVGELGDVRETMSYLFQHANLDSCKRVLNVVCKTCGQQQTTLKGVEAVMYMGTLSYEQFKKGVQIPCTCGKQATKYLVQQESPFVMMSAPPAQYELKHGTFTCASEYTGNYQCGHYKHIISKETLYCIDGALLTKSSEYKGPITDVFYKENSYTTTIKPVTYKLDGVVCTEIDPKLDNYYKKDNSYFTEQPIDLVPNQPYPNASFDNFKFVCDNIKFADDLNQLTGYKKPASRELKVTFFPDLNGDVVAIDYKHYTPSFKKGAKLLHKPIVWHVNNATNKATYKPNTWCIRCLWSTKPVETSNSFDVLKSEDAQGMDNLACEDLKPVSEEVVENPTIQKDVLECNVKTTEVVGDIILKPANNSLKITEEVGHTDLMAAYVDNSSLTIKKPNELSRVLGLKTLATHGLAAVNSVPWDTIANYAKPFLNKVVSTTTNIVTRCLNRVCTNYMPYFFTLLLQLCTFTRSTNSRIKASMPTTIAKNTVKSVGKFCLEASFNYLKSPNFSKLINIIIWFLLLSVCLGSLIYSTAALGVLMSNLGMPSYCTGYREGYLNSTNVTIATYCTGSIPCSVCLSGLDSLDTYPSLETIQITISSFKWDLTAFGLVAEWFLAYILFTRFFYVLGLAAIMQLFFSYFAVHFISNSWLMWLIINLVQMAPISAMVRMYIFFASFYYVWKSYVHVVDGCNSSTCMMCYKRNRATRVECTTIVNGVRRSFYVYANGGKGFCKLHNWNCVNCDTFCAGSTFISDEVARDLSLQFKRPINPTDQSSYIVDSVTVKNGSIHLYFDKAGQKTYERHSLSHFVNLDNLRANNTKGSLPINVIVFDGKSKCEESSAKSASVYYSQLMCQPILLLDQALVSDVGDSAEVAVKMFDAYVNTFSSTFNVPMEKLKTLVATAEAELAKNVSLDNVLSTFISAARQGFVDSDVETKDVVECLKLSHQSDIEVTGDSCNNYMLTYNKVENMTPRDLGACIDCSARHINAQVAKSHNIALIWNVKDFMSLSEQLRKQIRSAAKKNNLPFKLTCATTRQVVNVVTTKIALKGG

SEQ ID NO: 16402 - protein, 508 aa, Artificial Sequence
  MERS-CoV/MERS-CoV-Jeddah-human-1__KF958702.1__non-structural protein 4 (NSP4)
MASTWFNALRDFTLKGYVLATIIVFLCAVLMYLCLPTFSMVPVEFYEDRILDFKVLDNGIIRDVNPDDKCFANKHRSFTQWYHEHVGGVYDNSITCPLTVAVIAGVAGARIPDVPTTLAWVNNQIIFFVSRVFANTGSVCYTPIDEIPYKSFSDSGCILPSECTMFRDAEGRMTPYCHDPTVLPGAFAYSQMRPHVRYDLYDGNMFIKFPEVVFESTLRITRTLSTQYCRFGSCEYAQEGVCITTNGSWAIFNDHHLNRPGVYCGSDFIDIVRRLAVSLFQPITYFQLTTSLVLGIGLCAFLTLLFYYINKVKRAFADYTQCAVIAVVAAVLNSLCICFVASIPLCIVPYTALYYYATFYFTNEPAFIMHVSWYIMFGPIVPIWMTCVYTVAMCFRHFFWVLAYFSKKHVEVFTDGKLNCSFQDAASNIFVINKDTYAALRNSLTNDAYSRFLGLFNKYKYFSGAMETAAYREAAACHLAKALQTYSETGSDLLYQPPNCSITSGVLQ

SEQ ID NO: 16403 - protein, 508 aa, Artificial Sequence
  MERS-CoV/Al-Hasa_4_2013__KF186564.1__non-structural protein 4 (NSP4)
MAPTWFNVLRDFTLKGYVLATIIVFLCAVLMYLCLPTFSMVPVEFYEDRILDFKVLDNGIIRDVNPDDKCFANKHRSFTQWYHEHVGGVYDNSITCPLTVAVIAGVAGARIPDVPTTLAWVNNQIIFFVSRVFANTGSVCYTPIDEIPYKSFSDSGCILPSECTMFRDAEGRMTPYCHDPTVLPGAFAYSQMRPHVRYDLYDGNMFIKFPEVVFESTLRITRTLSTQYCRFGSCEYAQEGVCITTNGSWAIFNDHHLNRPGVYCGSDFIDIVRRLAVSLFQPITYFQLTTSLVLGIGLCAFLTLLFYYINKVKRAFADYTQCAVIAVVAAVLNSLCICFVASIPLCIVPYTALYYYATFYFTNEPAFIMHVSWYIMFGPIVPIWMTCVYTVAMCFRHFFWVLAYFSKKHVEVFTDGKLNCSFQDAASNIFVINKDTYAALRNSLTNDAYSRFLGLFNKYKYFSGAMETAAYREAAACHLAKALQTYSETGSDLLYQPPNCSITSGVLQ

SEQ ID NO: 16404 - protein, 508 aa, Artificial Sequence
  MERS-CoV/Riyadh_14_2013__KJ156934.1__non-structural protein 4 (NSP4)
MAPTWFNALRDFTLKGYVLATIIVFLCAVLMYLCLPTFSMVPVEFYEDRILDFKVLDNGIIRDVNPDDKCFANKHRSFTQWYHEHVGGVYDNSITCPLTVAVIAGVAGARIPDVPTTLAWVNNQIIFFVSRVFANTGSVCYTPIDEIPYKSFSDSGCILPSECTMFRDAEGRMTPYCHDPTVLPGAFAYSQMRPHVRYDLYDGNMFIKFPEVVFESTLRITRTLSTQYCRFGSCEYAQEGVCITTNGSWAIFNDHHLNRPGVYCGSDFIDIVRRLAVSLFQPITYFQLTTSLVLGIGLCAFLTLLFYYINKVKRAFADYTQCAVIAVVAAVLNSLCICFVASIPLCIVPYTALYYYATFYFTNEPAFIMHVSWYIMFGPIVPIWMTCVYTVAMCFRHFFWVLAYFSKKHVEVFTDGKLNCSFQDAASNIFVINKDTYAALRNSLTNDAYSRFLGLFNKYKYFSGAMETAAYREAAACHLAKALQTYSETGSDLLYQPPNCSITSGVLQ

SEQ ID NO: 16405 - protein, 508 aa, Artificial Sequence; identical to SEQ ID NO: 16404
  MERS-CoV/England 1__NC_038294.1__non-structural protein 4 (NSP4)

SEQ ID NO: 16406 - protein, 501 aa, Artificial Sequence
  SARS-CoV/Tor2__NC_004718.3__non-structural protein 4 (NSP4)
MKIVSTCFKLMLKATLLCVLAALVCYIVMPVHTLSIHDGYTNEIIGYKAIQDGVTRDIISTDDCFANKHAGFDAWFSQRGGSYKNDKSCPVVAAIITREIGFIVPGLPGTVLRAINGDFLHFLPRVFSAVGNICYTPSKLIEYSDFATSACVLAAECTIFKDAMGKPVPYCYDTNLLEGSISYSELRPDTRYVLMDGSIIQFPNTYLEGSVRVVTTFDAEYCRHGTCERSEVGICLSTSGRWVLNNEHYRALSGVFCGVDAMNLIANIFTPLVQPVGALDVSASVVAGGIIAILVTCAAYYFMKFRRVFGEYNHVVAANALLFLMSFTILCLVPAYSFLPGVYSVFYLYLTFYFTNDVSFLAHLQWFAMFSPIVPFWITAIYVFCISLKHCHWFFNNYLRKRVMFNGVTFSTFEEAALCTFLLNKEMYLKLRSETLLPLTQYNRYLALYNKYKYFSGALDTTSYREAACCHLAKALNDFSNSGADVLYQPPQTSITSAVLQ

SEQ ID NO: 16407 - protein, 497 aa, Artificial Sequence
  HCoV/OC43__NC_006213.1__non-structural protein 4 (NSP4)
MAVFSYFVYVCFVLSLVCFIGLWCLMPTYTVHKSDFQLPVYASYKVLDNGVIRDVSVEDVCFANKFEQFDQWYESTFGLSYYSNSMACPIVVAVIDQDFGSTVFNVPTKVLRYGYHVLHFITHALSADGVQCYTPHSQISYSNFYASGCVLSSACTMFTMADGSPQPYCYTEGLMQNASLYSSLVPHVRYNLANAKGFIRFPEVLREGLVRIVRTRSMSYCRVGLCEEADEGICFNFNGSWVLNNDYYRSLPGTFCGRDVFDLIYQLFKGLAQPVDFLALTASSIAGAILAVIVVLVFYYLIKLKRAFGDYTSVVFVNVIVWCVNFMMLFVFQVYPILSCVYAICYFYATLYFPSEISVIMHLQWLVMYGTIMPLWFCLLYIAVVVSNHAFWVFSYCRKLGTSVRSDGTFEEMALTTFMITKDSYCKLKNSLSDVAFNRYLSLYNKYRYYSGKMDTAAYREAACSQLAKAMDTFTNNNGSDVLYQPPTASVSTSFLQ

SEQ ID NO: 16408 - protein, 497 aa, Artificial Sequence
  HCoV/HKU1__NC_006577.2__non-structural protein 4 (NSP4)
MVVLSNLLYILFFVSLICFILLWALLPTYSVYKSDIHLPAYASFKVIDNGVVRDISVNDLCFANKFFQFDQWYESTFGSVYYHNSMDCPIVVAVMDEDIGSTMFNVPTKVLRHGFHVLHFLTYAFASDSVQCYTPHIQISYNDFYASGCVLSSLCTMFKRGDGTPHPYCYSDGVMKNASLYTSLVPHTRYSLANSNGFIRFPDVISEGIVRIVRTRSMTYCRVGACEYAEEGICFNFNSSWVLNNDYYRSMPGTFCGRDLFDLFYQFFSSLIRPIDFFSLTASSIFGAILAIVVVLVFYYLIKLKRAFGDYTSVVVINVVVWCINFLMLFVFQVYPICACVYACFYFYVTLYFPSEISVIMHLQWIVMYGAIMPFWFCVTYVAMVIANHVLWLFSYCRKIGVNVCSDSTFEETSLTTFMITKDSYCRLKNSVSDVAYNRYLSLYNKYRYYSGKMDTAAYREAACSQLAKAMETFNHNNGNDVLYQPPTASVSTSFLQ

SEQ ID NO: 16409 - protein, 482 aa, Artificial Sequence
  HCoV/229E/BN1/GER/2015__KU291448.1__non-structural protein 4 (NSP4)
MGDAGHSLTWLWLLCGLVCLIQFYLCFFMPYFMHDVVSSFEGYDFKYIENGQLKNFEAPLKCVRNVFENFEDWHYAKFGFTPLNKQSCPIVVGVSEIVNTVAGIPSNVYLVGKTLIFTLQAAFGNAGVCYDIFGVTTPEKCIFTSACTRLEGLGGNNVYCYNTELMEGSLPYSSIQANAYYKYDNGNFIKLPEVIAQGFGFRTVRTIATKYCRVGECVDSNAGVCFGFDKWFVNDGRVANGYVCGTGLWNLVFNILSMFSSSFSVAAMSGQILLNCALGAFAIFCCFLVTKFRRMFGDLSVGVCTVVVAVLLNNVSYIVTQNLVTMIAYAILYFFATRSLRYAWIWCAAYLIAYISFAPWWLCAWYFLAMLTGLLPSLLKLKVSTNLFEGDKFVGTFESAAAGTFVIDIRSYEKLANSISPEKLKSYAASYNRYKYYSGNANEADYRCACYAYLAKAMLDFSRDHNDILYTPPTVSYGSTLQ

SEQ ID NO: 16410 - protein, 478 aa, Artificial Sequence
  HCoV/NL63/RPTEC/2004__JX504050.1__non-structural protein 4 (NSP4)
MGFKRTYNFLWYVCLFVVALFIGVSFIDYTTTVTSFHGYDFKYIENGQLKVFEAPLHCVRNVFDNFNQWHEAKFGVVTTNSDKCPIVVGVSERINVVPGVPTNVYLVGKTLVFTLQAAFGNTGVCYDFDGVTTSDKCIFNSACTRLEGLGGDNVYCYNTGLIEGSKPYSTLQPNAYYKYDAKNYVRFPEILARGFGLRTIRTLATRYCRVGECRDSHKGVCFGFDKWYVNDGRVDDGYICGDGLIDLLVNVLSIFSSSFSVVAMSGHMLFNFLFAAFITFLCFLVTKFKRVFGDLSYGVFTVVCATLINNISYVVTQNLFFMLLYAILYFVFTRTVRYAWIWHIAYIVAYFLLIPWWLLTWFSFAAFLELLPNVFKLKISTQLFEGDKFIGTFESAAAGTFVLDMRSYERLINTISPEKLKNYAASYNKYKYYSGSASEADYRCACYAHLAKAMLDYAKDHNDMLYSPPTISYNSTLQ

SEQ ID NO: 16411 - protein, 501 aa, Artificial Sequence
  Bat SARS-like CoV/WIV1__KF367457.1__non-structural protein 4 (NSP4)
MKIVSTWFKLMLKATLLCVIATLVCYIVMPVHTLSVHDGYTNEIIGYKAIQDGVTRDIVSTDDCFANKHAGFDSWLSQRGGSYKNDKSCPVVAAIITREIGFIVPGLPGTVLRAINGDFLHFLPRVFSAVGNICYTPSKLIEYSDFATSACVLAAECTIFKDAMGKPVPYCYDTNLLEGSISYSELRPDTRYVLMDGSIIQFPNTYLEGSVRVVTTFDAEYCRHGTCERSEAGICLSTSGRWVLNNEHYRALPGVFCGVDAMNLIANIFTPLVQPVGALDVSASVVAGGIIAILVTCAAYYFMKFRRAFGEYNHVVAANALLFLMSFTILCLAPAYSFLPGVYSVFYLYLTFYFTNDVSFLAHLQWFAMFSPIVPFWITAIYVFCISLKHCHWFFNNYLRKRVMFNGVTFSTFEEAALCTFLLNKEMYLKLRSETLLPLTQYNRYLALYNKYKYFSGALDTTSYREAACCHLAKALNDFSNSGADVLYQPPQTSITSAVLQ

SEQ ID NO: 16412 - protein, 495 aa, Artificial Sequence
  BatCoV/HKU9-1 BF_005I__NC_009021.1__non-structural protein 4 (NSP4)
MGHRRIVSWRRVLIHVFMLLVVLNPQWFTPWYIMRPIEYNVVDFKVIDNAVIRDITSADQCFANKFSAFENWYSNRYGSYVNSRGCPMVVGVVSDIVGSLVPGLPARFLRVGTTLLPLVNYGLGAVGSVCYTPHYAINYDVFDTSACVLAATCTLFSSASGERMPYCADAALIQNASRYDMLKPHVMYPFYEHSGYIRFPEVISAGVHIVRTMAMEYCKVGRCDVSEAGLCMSLQPRWVVNNAYFRQQSGVYCGTSAFDLFMNMLLPIFTPVGAVDITTSILMGALLAVVVSMSLYYLLRFRRAFGDYSGVIFTNILAFVLNVIVLCLEGPYPMLPSIYAMVFLYATCYFGSDIACMMHVSFLIMFAGVVPLWVTVLYIVVVLSRHILWFASLCTKRTVQVGDLAFHSFQDAALQTFMLDKEVFLRLKREISSDAYFKYLAMYNKYKYYSGPMDTAAYREAACSHLVMALEKYSNGGGDTIYQPPRCSVASAALQ

SEQ ID NO: 16413 - protein, 482 aa, Artificial Sequence
  PEDV/NPL-PEDv/2013/P10__KJ778616.1__non-structural protein 4 (NSP4)
MAGLPSFSKVKKFFWFLCLFIVAVFFALSFFDFSTQVSSDSDYDFKYIESGQLKTFDNPLSCVHNVFSNFDQWHDAKFGFTPVNNPSCPIVVGVSDEARTVPGIPAGVYLAGKTLVFAINTIFGTSGLCFDASGVADKGACIFNSACTTLSGLGGTAVYCYKNGLVEGAKLYSELAPHSYYKMVDGNAVSLPEIISRGFGIRTIRTKAMTYCRVGQCVQSAEGVCFGADRFFVYNAESGSDFVCGTGLFTLLMNVISVFSKTVPVTVLSGQILFNCIIAFAAVAVCFLFTKFKRMFGDMSVGVFTVGACTLLNNVSYIVTQNTLGMLGYATLYFLCTKGVRYMWIWHLGFLISYILIAPWWVLMVYAFSAIFEFMPNLFKLKVSTQLFEGDKFVGSFENAAAGTFVLDMHAYERLANSISTEKLRQYASTYNKYKYYSGSASEADYRLACFAHLAKAMMDYASNHNDTLYTPPTVSYNSTLQ

SEQ ID NO: 16414 - protein, 497 aa, Artificial Sequence
  MHV/A59__NC_048217.1__non-structural protein 4 (NSP4)
MAVFSRMLQWLFVANLICFIVLWALMPTYAVHKSDMQLPLYASFKVIDNGVLRDVSVTDACFANKFNQFDQWYESTFGLAYYRNSKACPVVVAVIDQDIGHTLFNVPTTVLRYGFHVLHFITHAFATDSVQCYTPHMQIPYDNFYASGCVLSSLCTMLAHADGTPHPYCYTGGVMHNASLYSSLAPHVRYNLASSNGYIRFPEVVSEGIVRVVRTRSMTYCRVGLCEEAEEGICFNFNRSWVLNNPYYRAMPGTFCGRNAFDLIHQVLGGLVRPIDFFALTASSVAGAILAIIVVLAFYYLIKLKRAFGDYTSVVVINVIVWCINFLMLFVFQVYPTLSCLYACFYFYTTLYFPSEISVVMHLQWLVMYGAIMPLWFCIIYVAVVVSNHALWLFSYCRKIGTEVRSDGTFEEMALTTFMITKESYCKLKNSVSDVAFNRYLSLYNKYRYFSGKMDTAAYREAACSQLAKAMETFNHNNGNDVLYQPPTASVTTSFLQ

SEQ ID NO: 16415 - protein, 501 aa, Artificial Sequence
  SARS-CoV-2/Wuhan-Hu-1__NC_045512.2/MN908947.2/EPI_ISL_402128__non -structural protein 4 (NSP4)
MKIVNNWLKQLIKVTLVFLFVAAIFYLITPVHVMSKHTDFSSEIIGYKAIDGGVTRDIASTDTCFANKHADFDTWFSQRGGSYTNDKACPLIAAVITREVGFVVPGLPGTILRTTNGDFLHFLPRVFSAVGNICYTPSKLIEYTDFATSACVLAAECTIFKDASGKPVPYCYDTNVLEGSVAYESLRPDTRYVLMDGSIIQFPNTYLEGSVRVVTTFDSEYCRHGTCERSEAGVCVSTSGRWVLNNDYYRSLPGVFCGVDAVNLLTNMFTPLIQPIGALDISASIVAGGIVAIVVTCLAYYFMRFRRAFGEYSHVVAFNTLLFLMSFTVLCLTPVYSFLPGVYSVIYLYLTFYLTNDVSFLAHIQWMVMFTPLVPFWITIAYIICISTKHFYWFFSNYLKRRVVFNGVSFSTFEEAALCTFLLNKEMYLKLRSDVLLPLTQYNRYLALYNKYKYFSGAMDTTSYREAACCHLAKALNDFSNSGSDVLYQPPQTSITSAVLQ

SEQ ID NO: 16416 - protein, 501 aa, Artificial Sequence
  SARS-CoV-2__MT919775.1__non-structural protein 4 (NSP4)
MKIVNNWLKQLIKVTLVFLFVAAIFYLITPVHVMSKHTDFSSEIIGYKAIDGGVTRDIASTDTCFANKHADFDTWFSQRGGSYTNDKACPLIAAVITREVGFVVPGLPGTILRTTNGDFLHFLPRVFSAVGNICYTPSKLIEYTDFATSACVLAAECTIFKDASGKPVPYCYDTNVLEGSVAYESLRPDTRYVLMDGSIIQFPNTYLEGSVRVVTTFDSEYCRHGTCERSEAGVCVSTSGRWVLNNDYYRSLPGVFCGVDAVNLLTNMFTPLIQPIGALDISASIVAGGIVAIVVTCLAYYFMRFRRVFGEYSHVVAFNTLLFLMSFTVLCLTPVYSFLPGVYSVIYLYLTFYLTNDVSFLAHIQWMVMFTPLVPFWITIAYIICISTKHFYWFFSNYLKRRVVFNGVSFSTFEEAALCTFLLNKEMYLKLRSDVLLPLTQYNRYLALYNKYKYFSGAMDTTSYREAACCHLAKALNDFSNSGSDVLYQPPQTSITSAVLQ

SEQ ID NO: 16417 - protein, 501 aa, Artificial Sequence
  SARS-CoV-2__MT919788.1__non-structural protein 4 (NSP4)
MKIVNNWLKQLIKVTLVFLFVAAIFYLITPVHVMSKHTDFSSEIIGYKAIDGGVTRDIASTDTCFANKHADFDTWFSQRGGSYTNDKACPLIAAVITREVGFVVPGLPGTILRTTNGDFLHFLPRVFSAVGNICYTPSKLIEYTDFATSACVLAAECTIFKDASGKPVPYCYDTNVLEGSVAYESLRPDTRYVLMDGSIIQFPNTYLEGSVRVVTTFDSEYCRHGTCERSEAGVCVSTSGRWVLNNDYYRSLPGVFCGVDAVNLLTNMFTPLIQPIGALDISASIVAGGIVAIVVTCLAYYFMRFRRAFGEYSHVVAFNTLLFLMSFTVLCLTPVYSFLPGVYSVIYLYLTFYLTNDVSFLAHIQWMVMFTPLVPFWITIAYIICISTKHFYWFFSNYLKRRVVFNGVSFGTFEEAALCTFLLNKEMYLKLRSDVLLPLTQYNRYLALYNKYKYFSGAMDTTSYREAACCHLAKALNDFSNSGSDVLYQPPQTSITSAVLQ

SEQ ID NO: 16418 - protein, 501 aa, Artificial Sequence
  SARS-CoV-2__MT920024.1__non-structural protein 4 (NSP4)
MKIVNNWLKQLIKVTLVFLFVAAIFYLITPVHVMSKHTDFSSEIIGYKAIDGGVTRDIASTDTCFANKHADFDTWFSQRGCSYTNDKACPLIAAVITREVGFVVPGLPGTILRTTNGDFLHFLPRVFSAVGNICYTPSKLIEYTDFATSACVLAAECTIFKDASGKPVPYCYDTNVLEGSVAYESLRPDTRYVLMDGSIIQFPNTYLEGSVRVVTTFDSEYCRHGTCERSEAGVCVSTSGRWVLNNDYYRSLPGVFCGVDAVNLLTNMFTPLIQPIGALDISASIVAGGIVAIVVTCLAYYFMRFRRAFGEYSHVVAFNTLLFLMSFTVLCLTPVYSFLPGVYSVIYLYLTFYLTNDVSFLAHIQWMVMFTPLVPFWITIAYIICISTKHFYWFFSNYLKRRVVFNGVSFSTFEEAALCTFLLNKEMYLKLRSDVLLPLTQYNRYLALYNKYKYFSGAMDTTSYREAACCHLAKALNDFSNSGSDVLYQPPQTSITSAVLQ

SEQ ID NO: 16419 - protein, 501 aa, Artificial Sequence
  SARS-CoV-2__MT913038.1__non-structural protein 4 (NSP4)
MKIVNNWLKQLIKVTLVFLFVAAIFYLITPVHVMSKHTDFSSEIIGYKAIDGGVTRDIASTDTCFANKHADFDTWFSQRGGSYTNDKACPLIAAVITREVGFVVPGLPGTILRITNGDFLHFLPRVFSAVGNICYTPSKLIEYTDFATSACVLAAECTIFKDASGKPVPYCYDTNVLEGSVAYESLRPDTRYVLMDGSIIQFPNTYLEGSVRVVTTFDSEYCRHGTCERSEAGVCVSTSGRWVLNNDYYRSLPGVFCGVDAVNLLTNMFTPLIQPIGALDISASIVAGGIVAIVVTCLAYYFMRFRRAFGEYSHVVAFNTLLFLMSFTVLCLTPVYSFLPGVYSVIYLYLTFYLTNDVSFLAHIQWMVMFTPLVPFWITIAYIICISTKHFYWFFSNYLKRRVVFNGVSFSTFEEAALCTFLLNKEMYLKLRSDVLLPLTQYNRYLALYNKYKYFSGAMDTTSYREAACCHLAKALNDFSNSGSDVLYQPPQTSITSAVLQ

SEQ ID NO: 16420 - protein, 501 aa, Artificial Sequence
  SARS-CoV-2__MT913046.1__non-structural protein 4 (NSP4)
MKIVNNWLKQLIKVTLVFLFVAAIFYLITPVHVMSKHTDFSSEIIGYKAIDGGVTRDIASTDTCFANKHADFDTWFSQRGGSYTNDKACPLIAAVITREVGFVVPGLPGTILRTTNGDFLHFLPRVFSAVGNICYTPSKLIEYTDFATSACVLAAECTIFKDASGKPVPYCYDTNVLEGSVAYESLRPDTRYVLMDGSIIQFPNTYLEGSVRVVTTFDSEYCRHGTCERSEAGVCVSTSGRWVLNNDYYRSLPGVFCGVDAVNLLTNMFTPLIQPIGALDISASIVAGGIVAIVVTCLAYYFMRFRRAFGEYSHVVAFNTLLLLMSFTVLCLTPVYSFLPGVYSVIYLYLTFYLTNDVSFLAHIQWMVMFTPLVPFWITIAYIICISTKHFYWFFSNYLKRRVVFNGVSFSTFEEAALCTFLLNKEMYLKLRSDVLLPLTQYNRYLALYNKYKYFSGAMDTTSYREAACCHLAKALNDFSNSGSDVLYQPPQTSITSAVLQ

SEQ ID NO: 16421 - protein, 501 aa, Artificial Sequence
  SARS-CoV-2__MT913061.1__non-structural protein 4 (NSP4)
MKIVNNWLKQLIKVTLVFLFVAAIFYLITPVHVMSKHTDFSSEIIGYKAIDGGVTRDIASTDTCFANKHADFDTWFSQRGGSYTNDKACPLITAVITREVGFVVPGLPGTILRTTNGDFLHFLPRVFSAVGNICYTPSKLIEYTDFATSACVLAAECTIFKDASGKPVPYCYDTNVLEGSVAYESLRPDTRYVLMDGSIIQFPNTYLEGSVRVVTTFDSEYCRHGTCERSEAGVCVSTSGRWVLNNDYYRSLPGVFCGVDAVNLLTNMFTPLIQPIGALDISASIVAGGIVAIVVTCLAYYFMRFRRAFGEYSHVVAFNTLLFLMSFTVLCLTPVYSFLPGVYSVIYLYLTFYLTNDVSFLAHIQWMVMFTPLVPFWITIAYIICISTKHFYWFFSNYLKRRVVFNGVSFSTFEEAALCTFLLNKEMYLKLRSDVLLPLTQYNRYLALYNKYKYFSGAMDTTSYREAACCHLAKALNDFSNSGSDVLYQPPQTSITSAVLQ

SEQ ID NO: 16422 - protein, 501 aa, Artificial Sequence
  SARS-CoV-2__MT913095.1__non-structural protein 4 (NSP4)
MKIVNNWLKQLIKVTLVFLFVAAIFYLITPVHVMSKHTDFSSEIIGYKAIDGGVTRDIASTDTCFANKHADFDTWFSQRGGSYTNDKACPLIAAVITREVGFVVPGLPGTILRTTNGDFLHFLPRVFSAVGNICYTPSKLIEYTDFATSACVLAAECTIFKDASGKPVPYCYDTNVLEGSVAYESLRPDTRYVLMDGSIIQFPNTYLEGSVRVVTTFDSEYCRHGTCERSEAGVCVSTSGRWVLNNDYYRSLPGVFCGVDAVNLLTNMFTPLIQPIGALDISASIVAGGIVAIVVTCLAYYFMRFRRAFGEYSHVVAFNTLLFLMSFTVLCLTPVYSFLPGVYSVIYLYLTFYLTNDVSFLAHIQWMVMFTPLVPFWITIAYIICISTKHFYWFFSNYLKRRVVFNGVSFSTFEEAALCTFLLNKEMYLKLRSDVLLPLTQYNRYLAFYNKYKYFSGAMDTTSYREAACCHLAKALNDFSNSGSDVLYQPPQTSITSAVLQ

SEQ ID NO: 16423 - protein, 501 aa, Artificial Sequence
  SARS-CoV-2__MT913100.1__non-structural protein 4 (NSP4)
MKIVNNWLKQLIKVTLVFLFVAAIFYLITPVHVMSKHTDFSSEIIGYKAIDGGVTRDIASTDTCFANKHADFDTWFSQRGGSYTNDKACPLIAAVITREVGFVVPGLPGTILRTTNGDFLHFLPRVFSAVGNICYTPSKLIEYTDFATSACVLAAECTIFKDASGKPVPYCYDTNVLEGSVAYESLRPDTRYVLMDGSIIQFPNTYLEGSVRVVTTFDSEYCRHGTCERSEAGVCVSTSGRWVLNNDYYRSLPGVFCGVDAVNLLTNMFTPLIQPIGALDISASIVAGGIVAIVVTCLAYYFMRFRRAFGEYSHVVAFNTLLFLMSFTVLCLTPVYSFLPGVYSVIYLYLTFYLTNDVSFLAHIQWMVMFTPLVPFWITIVYIICISTKHFYWFFSNYLKRRVVFNGVSFSTFEEAALCTFLLNKEMYLKLRSDVLLPLTQYNRYLALYNKYKYFSGAMDTTSYREAACCHLAKALNDFSNSGSDVLYQPPQTSITSAVLQ

SEQ ID NO: 16424 - protein, 501 aa, Artificial Sequence
  SARS-CoV-2__MT913141.1__non-structural protein 4 (NSP4)
MKIVNNWLKQLIKVTLVFLFVAAIFYLITPVHVMSKHNDFSSEIIGYKAIDGGVTRDIASTDTCFANKHADFDTWFSQRGGSYTNDKACPLIAAVITREVGFVVPGLPGTILRTTNGDFLHFLPRVFSAVGNICYTPSKLIEYTDFATSACVLAAECTIFKDASGKPVPYCYDTNVLEGSVAYESLRPDTRYVLMDGSIIQFPNTYLEGSVRVVTTFDSEYCRHGTCERSEAGVCVSTSGRWVLNNDYYRSLPGVFCGVDAVNLLTNMFTPLIQPIGALDISASIVAGGIVAIVVTCLAYYFMRFRRAFGEYSHVVAFNTLLFLMSFTVLCLTPVYSFLPGVYSVIYLYLTFYLTNDVSFLAHIQWMVMFTPLVPFWITIAYIICISTKHFYWFFSNYLKRRVVFNGVSFSTFEEAALCTFLLNKEMYLKLRSDVLLPLTQYNRYLALYNKYKYFSGAMDTTSYREAACCHLAKALNDFSNSGSDVLYQPPQTSITSAVLQ

SEQ ID NO: 16425 - protein, 501 aa, Artificial Sequence
  SARS-CoV-2__MT907515.1__non-structural protein 4 (NSP4)
MKIVNNWLKQLIKVTLVFLFVAAIFYLITPVHVMSKHTDFSSEIIGYKAIDGGVTRDIASTDTCFANKHADFDTWFSQRGGSYTNDKACPLIAAVITREVGFVVPGLPGTILRTTNGDFLHFLPRVFSAVGNICYTPSKLIEYTDFATSACVLAAECTIFKDASGKPVPYCYDTNVLEGSVAYESLRPDTRYVLMDGSIIQFPNTYLEGSVRVVTTFDSEYCRHGTCERSEAGVCVSTSGRWVLNNDYYRSLPGVFCGVDAVNLLTNMFTPLIQPIGALDISASIVAGGIVAIVVTCLAYYFMRFRRAYGEYSHVVAFNTLLFLMSFTVLCLTPVYSFLPGVYSVIYLYLTFYLTNDVSFLAHIQWMVMFTPLVPFWITIAYIICISTKHFYWFFSNYLKRRVVFNGVSFSTFEEAALCTFLLNKEMYLKLRSDVLLPLTQYNRYLALYNKYKYFSGAMDTTSYREAACCHLAKALNDFSNSGSDVLYQPPQTSITSAVLQ

SEQ ID NO: 16426 - protein, 501 aa, Artificial Sequence
  SARS-CoV-2__MT907517.1__non-structural protein 4 (NSP4)
MKIVNNWLKQLIKVTLVFLFVAAIFYLITPVHVMSKHTDFSSEIIGYKAIDGGVTRDIASTDTCFANKHADFDTWFSQRGGSYTNDKACPLIAAVITREVGFVVPGLPGTILRTTNGDFLHFLPRVFSAVGNICYTPSKLIEYTDFATSACVLAAECTIFKDASGKPVPYCYDTNVLEGSVAYESLRPDTRYVLMDGSIIQFPNTYLEGSVRVVTTFDSEYCRHGTCERSEAGVCVSTSGRWVLNNDYYRSLPGVFCGVDAVNLLTNMSTPLIQPIGALDISASIVAGGIVAIVVTCLAYYFMRFRRAFGEYSHVVAFNTLLFLMSFTVLCLTPVYSFLPGVYSVIYLYLTFYLTNDVSFLAHIQWMVMFTPLVPFWITIAYIICISTKHFYWFFSNYLKRRVVFNGVSFSTFEEAALCTFLLNKEMYLKLRSDVLLPLTQYNRYLALYNKYKYFSGAMDTTSYREAACCHLAKALNDFSNSGSDVLYQPPQTSITSAVLQ

SEQ ID NO: 16427 - protein, 501 aa, Artificial Sequence
  SARS-CoV-2__MT890294.1__non-structural protein 4 (NSP4)
MKIVNNWLKQLIKVTLVFLFVAAIFYLITPVHVMSKHTDFSSEIIGYKAIDGGVTRDIASTDTCFANKHADFDTWFSQRGGSYTNDKACPLIAAVITREVGFVVPGLPGTILRTTNGDFLHFLPRVFSAVGNICYTPSKLIEYTDFATSACVLAAECTIFKDASGKPVPYCYDTNVLEGSVAYESLRPDTRYVLMDGSIIQFPNTHLEGSVRVVTTFDSEYCRHGTCERSEAGVCVSTSGRWVLNNDYYRSLPGVFCGVDAVNLLTNMFTPLIQPIGALDISASIVAGGIVAIVVTCLAYYFMRFRRAFGEYSHVVAFNTLLFLMSFTVLCLTPVYSFLPGVYSVIYLYLTFYLTNDVSFLAHIQWMVMFTPLVPFWITIAYIICISTKHFYWFFSNYLKRRVVFNGVSFSTFEEAALCTFLLNKEMYLKLRSDVLLPLTQYNRYLALYNKYKYFSGAMDTTSYREAACCHLAKALNDFSNSGSDVLYQPPQTSITSAVLQ

SEQ ID NO: 16428 - protein, 501 aa, Artificial Sequence
  SARS-CoV-2__MT893001.1__non-structural protein 4 (NSP4)
MKIVNNWLKQLIKVTLVFLFVAAIFYLITPVHVMSKHTDFSSEIIGYKAIDGGVTRDIASTDTCFANKHADFDTWFSQRGGSYTNDKACPLIAAVITREVGFVVPGLPGTILRTTNGDFLHFLPRVFSAVGNICYTPSKLIEYTDFATSACVLAAECTIFKDASGKPVPYCYDTNVLEGSVAYESLRPDTRYVLMDGSIIQFPNTYLEGSVRVVTTFDSEYCRHGTCERSEAGVCVSTSGRWVLNNDYYRSLPGVFCGVDAVNLLTNMFTPLIQPIGALDISASIVAGGIVAIVVTCLAYYFMRFRRAFGEYSHVVAFNTLLFLMSFTVLCLTPVYLFLPGVYSVIYLYLTFYFTNDVSFLAHIQWMVMFTPLVPFWITIAYIICISTKHFYWFFSNYLKRRVVFNGVSFSTFEEAALCTFLLNKEMYLKLRSDVLLPLTQYNRYLALYNKYKYFSGAMDTTSYREAACCHLAKALNDFSNSGSDVLYQPPQTSITSAVLQ

SEQ ID NO: 16429 - protein, 501 aa, Artificial Sequence
  SARS-CoV-2__MT893008.1__non-structural protein 4 (NSP4)
MKIVNNWLKQLIKVTLVFLFVAAIFYLITPVHVMSKHTDFSIEIIGYKAIDGGVTRDIASTDTCFANKHADFDTWFSQRGGSYTNDKACPLIAAVITREVGFVVPGLPGTILRTTNGDFLHFLPRVFSAVGNICYTPSKLIEYTDFATSACVLAAECTIFKDASGKPVPYCYDTNVLEGSVAYESLRPDTRYVLMDGSIIQFPNTYLEGSVRVVTTFDSEYCRHGTCERSEAGVCVSTSGRWVLNNDYYRSLPGVFCGVDAVNLLTNMFTPLIQPIGALDISASIVAGGIVAIVVTCLAYYFMRFRRAFGEYSHVVAFNTLLFLMSFTVLCLTPVYSFLPGVYSVIYLYLTFYLTNDVSFLAHIQWMVMFTPLVPFWITIAYIICISTKHFYWFFSNYLKRRVVFNGVSFSTFEEAALCTFLLNKEMYLKLRSDVLLPLTQYNRYLALYNKYKYFSGAMDTTSYREAACCHLAKALNDFSNSGSDVLYQPPQTSITSAVLQ

SEQ ID NO: 16430 - protein, 501 aa, Artificial Sequence
  SARS-CoV-2__MT873055.1__non-structural protein 4 (NSP4)
MKIVNNWLKQLIKVTLVFLFVAAIFYLITPVHVMSKHTDFSSEIIGYKAIDGGVTRDIASTDTCFANKHADFDTWFSQRGGSYTNDKACPLIAAVITREVGIVVPGLPGTILRTTNGDFLHFLPRVFSAVGNICYTPSKLIEYTDFATSACVLAAECTIFKDASGKPVPYCYDTNVLEGSVAYESLRPDTRYVLMDGSIIQFPNTYLEGSVRVVTTFDSEYCRHGTCERSEAGVCVSTSGRWVLNNDYYRSLPGVFCGVDAVNLLTNMFTPLIQPIGALDISASIVAGGIVAIVVTCLAYYFMRFRRAFGEYSHVVAFNTLLFLMSFTVLCLTPVYSFLPGVYSVIYLYLTFYLTNDVSFLAHIQWMVMFTPLVPFWITIAYIICISTKHFYWFFSNYLKRRVVFNGVSFSTFEEAALCTFLLNKEMYLKLRSDVLLPLTQYNRYLALYNKYKYFSGAMDTTSYREAACCHLAKALNDFSNSGSDVLYQPPQTSITSAVLQ

SEQ ID NO: 16431 - protein, 501 aa, Artificial Sequence
  SARS-CoV-2__MT873076.1__non-structural protein 4 (NSP4)
MKIVNNWLKQLIKVTLVFLFVAAIFYLITPVHVMSKHTDFSSEIIGYKAIDGGVTRDIASTDTCFANKHADFDTWFSQRGGSYTNDKACPLIAAVITREVGFVVPGLPGTILRTTNGDFLHFLPRVFSAVGNICYTPSKLIEYTDFATSACVLAAECTIFKDASGKPVPYCYDTNVLEGSVAYESLRPDTRYVLMDGSIIQFPNTYLEGSVRVVTTFDSEYCRHGTCERSEAGVCVSTSGRWVLNNDYYRSLPGVFCGVDAVNLLTNMFTPLIQPIGALDISASIVAGGIVAIVVICLAYYFMRFRRAFGEYSHVVAFNTLLFLMSFTVLCLTPVYSFLPGVYSVIYLYLTFYLTNDVSFLAHIQWMVMFTPLVPFWITIAYIICISTKHFYWFFSNYLKRRVVFNGVSFSTFEEAALCTFLLNKEMYLKLRSDVLLPLTQYNRYLALYNKYKYFSGAMDTTSYREAACCHLAKALNDFSNSGSDVLYQPPQTSITSAVLQ

SEQ ID NO: 16432 - protein, 501 aa, Artificial Sequence
  SARS-CoV-2__MT873134.1__non-structural protein 4 (NSP4)
MKIVNNWLKQLIKVTLVFLFVAAIFYLITPVHVMSKHTDFSSEIIGYKAIDGGVTRDIASTDTCFANKHADFDTWFSQRGGSYTNDKACPLIAAVITREVGFVVPGLPGTILRTTNGDFLHFLPRVFSAVGNICYTPSKLIEYTDFATSACVLAAECTIFKDASGKPVPYCYDTNVLEGSVAYESLRPDTRYVLMDGSIIQFPNTYLEGSVRVVTTFDSEYCRHGTCERSEAGVCVSTSGRWVLNNDYYRSLPGVFCGVDAVNLLTNMFTPLIQPIGALDISASIVAGGIVAIVVTCLAYYFMRFRRAFGVYSHVVAFNTLLFLMSFTVLCLTPVYSFLPGVYSVIYLYLTFYLTNDVSFLAHIQWMVMFTPLVPFWITIAYIICISTKHFYWFFSNYLKRRVVFNGVSFSTFEEAALCTFLLNKEMYLKLRSDVLLPLTQYNRYLALYNKYKYFSGAMDTTSYREAACCHLAKALNDFSNSGSDVLYQPPQTSITSAVLQ

SEQ ID NO: 16433 - protein, 501 aa, Artificial Sequence
  SARS-CoV-2__MT873140.1__non-structural protein 4 (NSP4)
MKIVNNWLKQLIKVTLVFLFVAAIFYLITPVHVMSKHTDFSSEIIGYKAIDGGVTRDIASTDTCFANKHADFDTWFSQRGGSYTNDKACPLIAAVITREVGFVVPGLPGTILRTTNGDFLHFLPRVFSAVGNICYTPSKLIEYTDFATSACVLAAECTIFKDASGKPVPYCYDTNVLEGSVAYESLRPDTRYVLMDGSIIQFPNTYLEGSVRVVTTFDSEYCRHGTCERSEAGVCVSTSGRWVLNNDYYRSLPGVFCGVDAVNLLTNMFTPLIQPIGALDISASIVAGGIVATVVTCLAYYFMRFRRAFGEYSHVVAFNTLLFLMSFTVLCLTPVYSFLPGVYSVIYLYLTFYLTNDVSFLAHIQWMVMFTPLVPFWITIAYIICISTKHFYWFFSNYLKRRVVFNGVSFSTFEEAALCTFLLNKEMYLKLRSDVLLPLTQYNRYLALYNKYKYFSGAMDTTSYREAACCHLAKALNDFSNSGSDVLYQPPQTSITSAVLQ

SEQ ID NO: 16434 - protein, 501 aa, Artificial Sequence
  SARS-CoV-2__MT873324.1__non-structural protein 4 (NSP4)
MKIVNNWLKQLIKVTLVFLFVAAIFYLITPVHVMSKHTDFSSEIIGYKAIDGGVTRDIASTDTCFANKHADFDTWFSQRGGSYTNDKACPLIAAVITREVGFVVPGLPGTILRTTNGDFLHFLPRVFSAVGNICYTPSKLIEYTDFATSACVLAAECTIFKDASGKPVPYCYDTNVLEGSVAYESLRPDTRYVLMDGSIIQFPNTYLEGSVRVVTTFDSEYCRHGTCERSEAGVCVSTSGRWVLNNDYYRSLPGVFCGVDAVNLLTNMFTPLIQPIGALDISASIVAGGIVAIVVTCLAYYFMRFRRAFGEYSHVVAFNTLLFLMSFTVLCLTPVYSFLPGVYSIIYLYLTFYLTNDVSFLAHIQWMVMFTPLVPFWITIAYIICISTKHFYWFFSNYLKRRVVFNGVSFSTFEEAALCTFLLNKEMYLKLRSDVLLPLTQYNRYLALYNKYKYFSGAMDTTSYREAACCHLAKALNDFSNSGSDVLYQPPQTSITSAVLQ

SEQ ID NO: 16435 - protein, 501 aa, Artificial Sequence
  SARS-CoV-2__MT873454.1__non-structural protein 4 (NSP4)
MKIVNNWLKQLIKVTLVFLFVAAIFYLITPVHVMSKHTDFSSEIIGYKAIDGGVTRDIASTDTCFANKHADFDTWFSQRGGSYTNDKACPLIAAVITREVGFVVPGLPGTILRTTNGDFLHFLPRVFSAVGNICYTPSKLIEYTDFATSACVLAAECTIFKDASGKPVPYCYDTNVLEGSVAYESLRPDTRYVLMDGSIIQFPNTYLEGSVRVVTTFDSEYCRHGTCERSEAGVCVSTSGRWVLNNDYYRSLPGVFCGVDAVNLLTNMFTPLIQPIGALDISASIVAGGIVAIVVTCLAYYFMRFRRAFGEYSHVVAFNTLLFLMSFTVLCLTPVYSFLPGVYSVIYLYLTFYLTNDVSFLAHIQWMVMFTPLVPFWITIAYIICISTKHFYWFFSNYLKRRVVFNGVSFSTFEEAALCTFLLNKEMYLKLRSDVLLPLTQYNRYLALYNKYKYFSGAMDTTSYREAACCHLVKALNDFSNSGSDVLYQPPQTSITSAVLQ

SEQ ID NO: 16436 - protein, 501 aa, Artificial Sequence
  SARS-CoV-2__MT877304.1__non-structural protein 4 (NSP4)
MKIVNNWLKQLIKVTLVFLFVAVIFYLITPVHVMSKHTDFSSEIIGYKAIDGGVTRDIASTDTCFANKHADFDTWFSQRGGSYTNDKACPLIAAVITREVGFVVPGLPGTILRTTNGDFLHFLPRVFSAVGNICYTPSKLIEYTDFATSACVLAAECTIFKDASGKPVPYCYDTNVLEGSVAYESLRPDTRYVLMDGSIIQFPNTYLEGSVRVVTTFDSEYCRHGTCERSEAGVCVSTSGRWVLNNDYYRSLPGVFCGVDAVNLLTNMFTPLIQPIGALDISASIVAGGIVAIVVTCLAYYFMRFRRAFGEYSHVVAFNTLLFLMSFTVLCLTPVYSFLPGVYSVIYLYLTFYLTNDVSFLAHIQWMVMFTPLVPFWITIAYIICISTKHFYWFFSNYLKRRVVFNGVSFSTFEEAALCTFLLNKEMYLKLRSDVLLPLTQYNRYLALYNKYKYFSGAMDTTSYREAACCHLAKALNDFSNSGSDVLYQPPQTSITSAVLQ

SEQ ID NO: 16437 - protein, 501 aa, Artificial Sequence
  SARS-CoV-2__MT877329.1__non-structural protein 4 (NSP4)
MKIVNNWLKQLIKVTLVFLFVAAIFYLITPVHVMSKHTDFSSEIIGYKAIDGGVTRDIASTDTCFANKHADFDTWFSQRGGSYTNDKACPLIAAVITREVGFVVPGLPGTILRTTNGDFLHFLPRVFSAVGNICYTPSKLIEYTDFATSACVLAAECTIFKDASGKPVPYCYDTNVLEGSVAYESLRPNTRYVLMDGSIIQFPNTYLEGSVRVVTTFDSEYCRHGTCERSEAGVCVSTSGRWVLNNDYYRSLPGVFCGVDAVNLLTNMFTPLIQPIGALDISASIVAGGIVAIVVTCLAYYFMRFRRAFGEYSHVVAFNTLLFLMSFTVLCLTPVYSFLPGVYSVIYLYLTFYLTNDVSFLAHIQWMVMFTPLVPFWITIAYIICISTKHFYWFFSNYLKRRVVFNGVSFSTFEEAALCTFLLNKEMYLKLRSDVLLPLTQYNRYLALYNKYKYFSGAMDTTSYREAACCHLAKALNDFSNSGSDVLYQPPQTSITSAVLQ

SEQ ID NO: 16438 - protein, 501 aa, Artificial Sequence
  SARS-CoV-2__MT856682.1__non-structural protein 4 (NSP4)
MKIVNNWLKQLIKVTLVFLFVAAIFYLITPVHVMSKHTDFSSEIIGYKAIDGGVTRDIASTDTCFANKHADFDTWFSQRGGSYTNDKACPLIAAVITREVGFVVPSLPGTILRTTNGDFLHFLPRVFSAVGNICYTPSKLIEYTDFATSACVLAAECTIFKDASGKPVPYCYDTNVLEGSVAYESLRPDTRYVLMDGSIIQFPNTYLEGSVRVVTTFDSEYCRHGTCERSEAGVCVSTSGRWVLNNDYYRSLPGVFCGVDAVNLLTNMFTPLIQPIGALDISASIVAGGIVAIVVTCLAYYFMRFRRAFGEYSHVVAFNTLLFLMSFTVLCLTPVYSFLPGVYSVIYLYLTFYLTNDVSFLAHIQWMVMFTPLVPFWITIAYIICISTKHFYWFFSNYLKRRVVFNGVSFSTFEEAALCTFLLNKEMYLKLRSDVLLPLTQYNRYLALYNKYKYFSGAMDTTSYREAACCHLAKALNDFSNSGSDVLYQPPQTSITSAVLQ

SEQ ID NO: 16439 - protein, 501 aa, Artificial Sequence
  SARS-CoV-2__MT846007.1__non-structural protein 4 (NSP4)
MKIVNNWLKQLIKVTLVFLFVAAIFYLITPVHVMSKHTDFSSEIIGYKAIDGGVTRNIASTDTCFANKHADFDTWFSQRGGSYTNDKACPLIAAVITREVGFVVPGLPGTILRTTNGDFLHFLPRVFSAVGNICYTPSKLIEYTDFATSACVLAAECTIFKDASGKPVPYCYDTNVLEGSVAYESLRPDTRYVLMDGSIIQFPNTYLEGSVRVVTTFDSEYCRHGTCERSEAGVCVSTSGRWVLNNDYYRSLPGVFCGVDAVNLLTNMFTPLIQPIGALDISASIVAGGIVAIVVTCLAYYFMRFRRAFGEYSHVVAFNTLLFLMSFTVLCLTPVYSFLPGVYSVIYLYLTFYLTNDVSFLAHIQWMVMFTPLVPFWITIAYIICISTKHFYWFFSNYLKRRVVFNGVSFSTFEEAALCTFLLNKEMYLKLRSDVLLPLTQYNRYLALYNKYKYFSGAMDTTSYREAACCHLAKALNDFSNSGSDVLYQPPQTSITSAVLQ

SEQ ID NO: 16440 - protein, 501 aa, Artificial Sequence
  SARS-CoV-2__MT846519.1__non-structural protein 4 (NSP4)
MKIVNNWLKQLIKVTLVFLFVAAIFYLITPVHVMSKHTDFSSEIIGYKAIDGGVTRDIASTDTCFANKHADFDTWFSQRGGSYTNDKACPLIAAVITREVGFVVPGLPGTILRTTNGDFLHFLPRVFSAVGNICYTPSKLIEYTDFATSACVLAAECTIFKDASGKPVPYCYDTNVLEGSVAYESLRPDTRYVLMDGSIIQFPNTYLEGSVRVVTTFDSEYCRHGTCERSEAGVCVSTSGRWVLNNDYYRSLPGVFCGVDAVNLLTNMFTPLIQPIGALDISASIVAGGIVAIVVTCLAYYFMRFRRAFGEYSHVVAFNTLLFLMSFTVLCLTPVYSFLPGVYSVIYLYLTFYLTNDVSFLAHIQWMVMFTPLVPFWITIAYIICISTKHFYWFFSNYLERRVVFNGVSFSTFEEAALCTFLLNKEMYLKLRSDVLLPLTQYNRYLALYNKYKYFSGAMDTTSYREAACCHLAKALNDFSNSGSDVLYQPPQTSITSAVLQ

SEQ ID NO: 16441 - protein, 501 aa, Artificial Sequence
  SARS-CoV-2__MT846557.1__non-structural protein 4 (NSP4)
MKIVNNWLKQLIKVTLVFLFVAAIFYLITPVHVMSKHTDFSSEIIGYKAIDGGVTRDIASTDTCFANKHADFDTWFSQRGGSYTNDKACPLIAAVITREVGFVVPGLPGTILRTTNGDFLHFLPRVFSAVGNICYTPSKLIEYTDFATSACVLAAECTIFKDASGKPVPYCYDTNVLEGSVAYESLRPDIRYVLMDGSIIQFPNTYLEGSVRVVTTFDSEYCRHGTCERSEAGVCVSTSGRWVLNNDYYRSLPGVFCGVDAVNLLTNMFTPLIQPIGALDISASIVAGGIVAIVVTCLAYYFMRFRRAFGEYSHVVAFNTLLFLMSFTVLCLTPVYSFLPGVYSVIYLYLTFYLTNDVSFLAHIQWMVMFTPLVPFWITIAYIICISTKHFYWFFSNYLKRRVVFNGVSFSTFEEAALCTFLLNKEMYLKLRSDVLLPLTQYNRYLALYNKYKYFSGAMDTTSYREAACCHLAKALNDFSNSGSDVLYQPPQTSITSAVLQ

SEQ ID NO: 16442 - protein, 501 aa, Artificial Sequence
  SARS-CoV-2__MT846600.1__non-structural protein 4 (NSP4)
MKIVNNWLKQLIKVTLVFLFVAAIFYLITPVHVMSKHTDFSSEIIGYKAIDGGVTRDIASTDTCFANKHADFDTWFSQRGGSYTNDKACPLIAAVITREVGFVVPGLPGTILRTTNGDFLHFLPRVFSAVGNICYTPSKLIEYTDFATSACVLAAECTIFKDASGKSVPYCYDTNVLEGSVAYESLRPDTRYVLMDGSIIQFPNTYLEGSVRVVTTFDSEYCRHGTCERSEAGVCVSTSGRWVLNNDYYRSLPGVFCGVDAVNLLTNMFTPLIQPIGALDISASIVAGGIVAIVVTCLAYYFMRFRRAFGEYSHVVAFNTLLFLMSFTVLCLTPVYSFLPGVYSVIYLYLTFYLTNDVSFLAHIQWMVMFTPLVPFWITIAYIICISTKHFYWFFSNYLKRRVVFNGVSFSTFEEAALCTFLLNKEMYLKLRSDVLLPLTQYNRYLALYNKYKYFSGAMDTTSYREAACCHLAKALNDFSNSGSDVLYQPPQTSITSAVLQ

SEQ ID NO: 16443 - protein, 501 aa, Artificial Sequence
  SARS-CoV-2__MT846623.1__non-structural protein 4 (NSP4)
MKIVNNWLKQLIKVTLVFLFVAAIFYLITPVHVMSKHTDFSSEIIGYKAIDGGVTRDIASTDTCFANKHADFDTWFSQRGGSYTNDKACPLIAAVITREVGFVVPGLPGTILRTTNGDFLHFLPRVFSAVGNICYTPSKLIEYTDFATSACVLAAECTIFKDASGKPVPYCYDTNVLEGSVAYESLRPDTRYVLMDGSIIQFPNTYLEGSVRVVTTFDSEYCRHGTCERSEAGVCVSTSGRWVLNNDYYRSLPGVFCGVDAVNLLTNMFTPLIQPIGALDISASIVAGGIVAIVVTCLAYYFMRFRRAFGEYSHVVAFNTLLFLMSFTVLCLTPVYSFLPGVYSVIYLYLTFYLTNDVSFLAHIQWMVMFTPLVPFWITIAYIICISTKHFYWFFSNYLKKRVVFNGVSFSTFEEAALCTFLLNKEMYLKLRSDVLLPLTQYNRYLALYNKYKYFSGAMDTTSYREAACCHLAKALNDFSNSGSDVLYQPPQTSITSAVLQ

SEQ ID NO: 16444 - protein, 501 aa, Artificial Sequence
  SARS-CoV-2__MT843311.1__non-structural protein 4 (NSP4)
MKIVNNWLKQLIKVTLAFLFVAAIFYLITPVHVMSKHTDFSSEIIGYKAIDGGVTRDIASTDTCFANKHADFDTWFSQRGGSYTNDKACPLIAAVITREVGFVVPGLPGTILRTTNGDFLHFLPRVFSAVGNICYTPSKLIEYTDFATSACVLAAECTIFKDASGKPVPYCYDTNVLEGSVAYESLRPDTRYVLMDGSIIQFPNTYLEGSVRVVTTFDSEYCRHGTCERSEAGVCVSTSGRWVLNNDYYRSLPGVFCGVDAVNLLTNMFTPLIQPIGALDISASIVAGGIVAIVVTCLAYYFMRFRRAFGEYSHVVAFNTLLFLMSFTVLCLTPVYSFLPGVYSVIYLYLTFYLTNDVSFLAHIQWMVMFTPLVPFWITIAYIICISTKHFYWFFSNYLKRRVVFNGVSFSTFEEAALCTFLLNKEMYLKLRSDVLLPLTQYNRYLALYNKYKYFSGAMDTTSYREAACCHLAKALNDFSNSGSDVLYQPPQTSITSAVLQ

SEQ ID NO: 16445 - protein, 501 aa, Artificial Sequence
  SARS-CoV-2__MT843318.1__non-structural protein 4 (NSP4)
MKIVNNWLKQLIKVTLVFLFVAAIFYLITPVHVMSKHTDFSSEIIGYKAIDGGVTRDIASTDTCFANKHADFDTWFSQRGGSYTNDKACPLIAAVITREVGFVVPGLPGTILRTTNGDFLHFLPRVFSAVGNICYTPSKLIEYTDFATSACVLAAECTIFKDASGKPVPYCYDTNVLEGSVAYESLRPDTRYVLMDGSIIQFPNTYLEGSVRVVTTFDSEYCRHGTCERSEAGVCVSTSGRWVLNNDYYRSLPGVFCGVDAVNLLTNMFTPLIQPIGALDISASIVAGGIVAIVVTCLAYYFMRFRRAFGEYSHVVAFNTLLFLMSFTVLCLTPVYSFLPGVYSVIYLYLTFYLTNDVSFLAHIQWMVMFTPLVPFWITIAYIICISTKHFYWFFSNYLKRRVVFNGVSFSTFEEAALCTFLLNKEMYLKLRSDVLLPLTQYNRYLALYNKYKYFSGAIDTTSYREAACCHLAKALNDFSNSGSDVLYQPPQTSITSAVLQ

SEQ ID NO: 16446 - protein, 501 aa, Artificial Sequence
  SARS-CoV-2__MT843757.1__non-structural protein 4 (NSP4)
MKIVNNWLKQLIKVTLVFLFVAAIFYLITPVHVMSKHTDFSSEIIGYKAIDGGVTRDIASTDTCFANKHADFDTWFSQRGGSYTNDKACPLIAAVITREVGFVVPGLPGTILRTTSDFLHFLPRVFSAVGNICYTPSKLIEYTDFATSACVLAAECTIFKDASGKPVPYCYDTNVLEGSVAYESLRPDTRYVLMDGSIIQFPNTYLEGSVRVVTTFDSEYCRHGTCERSEAGVCVSTSGRWVLNNDYYRSLPGVFCGVDAVNLLTNMFTPLIQPIGALDISASIVAGGIVAIVVTCLAYYFMRFRRAFGEYSHVVAFNTLLFLMSFTVLCLTPVYSFLPGVYSVIYLYLTFYLTNDVSFLAHIQWMVMFTPLVPFWITIAYIICISTKHFYWFFSNYLKRRVVFNGVSFSTFEEAALCTFLLNKEMYLKLRSDVLLPLTQYNRYLALYNKYKYFSGAMDTTSYREAACCHLAKALNDFSNSGSDVLYQPPQTSITSAVLQS

SEQ ID NO: 16447 - protein, 501 aa, Artificial Sequence
  SARS-CoV-2__MT831125.1__non-structural protein 4 (NSP4)
MKNINNWLKQLIKVTLVFLFVAAIFYLITPVHVMSKHTDFSSEIIGYKAIDGGVTRDIASTDTCFANKHADFDTWFSQRGGSYTNDKACPLIAAVITREVGFVVPGLPGTILRTTNGDFLHFLPRVFSAVGNICYTPSKLIEYTDFATSACVLAAECTIFKDASGKPVPYCYDTNVLEGSVAYESLRPDTRYVLMDGSIIQFPNTYLEGSVRVVTTFDSEYCRHGTCERSEAGVCVSTSGRWVLNNDYYRSLPGVFCGVDAVNLLTNMFTPLIQPIGALDISASIVAGGIVAIVVTCLAYYFMRFRRAFGEYSHVVAFNTLLFLMSFTVLCLTPVYSFLPGVYSVIYLYLTFYLTNDVSFLAHIQWMVMFTPLVPFWITIAYIICISTKHFYWFFSNYLKRRVVFNGVSFSTFEEAALCTFLLNKEMYLKLRSDVLLPLTQYNRYLALYNKYKYFSGAMDTTSYREAACCHLAKALNDFSNSGSDVLYQPPQTSITSAVLQ

SEQ ID NO: 16448 - protein, 501 aa, Artificial Sequence
  SARS-CoV-2__MT831217.1__non-structural protein 4 (NSP4)
MKIVNNWLKQLIKVTLVFLFVAAIFYLITPVHVMSKHTDFSSEIIGYKAIDGGVTRDIAFTDTCFANKHADFDTWFSQRGGSYTNDKACPLIAAVITREVGFVVPGLPGTILRTTNGDFLHFLPRVFSAVGNICYTPSKLIEYTDFATSACVLAAECTIFKDASGKPVPYCYDTNVLEGSVAYESLRPDTRYVLMDGSIIQFPNTYLEGSVRVVTTFDSEYCRHGTCERSEAGVCVSTSGRWVLNNDYYRSLPGVFCGVDAVNLLTNMFTPLIQPIGALDISASIVAGGIVAIVVTCLAYYFMRFRRAFGEYSHVVAFNTLLFLMSFTVLCLTPVYSFLPGVYSVIYLYLTFYLTNDVSFLAHIQWMVMFTPLVPFWITIAYIICISTKHFYWFFSNYLKRRVVFNGVSFSTFEEAALCTFLLNKEMYLKLRSDVLLPLTQYNRYLALYNKYKYFSGAMDTTSYREAACCHLAKALNDFSNSGSDVLYQPPQTSITSAVLQ

SEQ ID NO: 16449 - protein, 501 aa, Artificial Sequence
  SARS-CoV-2__MT831323.1__non-structural protein 4 (NSP4)
MKIVNNWLKQLIKVTLVFLFVAAIFYLITPVHVMSKHTDFSSEIIGYKAIDGGVTRDITSTDTCFANKHADFDTWFSQRGGSYTNDKACPLIAAVITREVGFVVPGLPGTILRTTNGDFLHFLPRVFSAVGNICYTPSKLIEYTDFATSACVLAAECTIFKDASGKPVPYCYDTNVLEGSVAYESLRPDTRYVLMDGSIIQFPNTYLEGSVRVVTTFDSEYCRHGTCERSEAGVCVSTSGRWVLNNDYYRSLPGVFCGVDAVNLLTNMFTPLIQPIGALDISASIVAGGIVAIVVTCLAYYFMRFRRAFGEYSHVVAFNTLLFLMSFTVLCLTPVYSFLPGVYSVIYLYLTFYLTNDVSFLAHIQWMVMFTPLVPFWITIAYIICISTKHFYWFFSNYLKRRVVFNGVSFSTFEEAALCTFLLNKEMYLKLRSDVLLPLTQYNRYLALYNKYKYFSGAMDTTSYREAACCHLAKALNDFSNSGSDVLYQPPQTSITSAVLQ

SEQ ID NO: 16450 - protein, 501 aa, Artificial Sequence
  SARS-CoV-2__MT831695.1__non-structural protein 4 (NSP4)
MKIVNNWLKQLIKVTLVFLFVAAIFYLITPVHVMSKHTDFSSEIIGYKAIDGGVTRDIASTDTCFANKHADFDTWFSQRGGSYTNDKACPLIAAVITREVGFVVPGLPGTILRTTNGDFLHFLPRVFSAVGNICYTPSKLIEYTDFATSACVLAAECTIFKDASGKPVPYCYDTNVLEGSVAYESLRPDTRYVLMDGSIIQFPNTYLEGSVRVVTTFDSEYCRHGTCERSEAGVCVSTSGRWVLNNDYYRSLPGVFCGVDAVNLLTNMFTPLIQPIGALDISASIVAGGIVAIVVTCFAYYFMRFRRAFGEYSHVVAFNTLLFLMSFTVLCLTPVYSFLPGVYSVIYLYLTFYLTNDVSFLAHIQWMVMFTPLVPFWITIAYIICISTKHFYWFFSNYLKRRVVFNGVSFSTFEEAALCTFLLNKEMYLKLRSDVLLPLTQYNRYLALYNKYKYFSGAMDTTSYREAACCHLAKALNDFSNSGSDVLYQPPQTSITSAVLQ

SEQ ID NO: 16451 - protein, 501 aa, Artificial Sequence
  SARS-CoV-2__MT831697.1__non-structural protein 4 (NSP4)
MKIVNNWLKQLIKVTLVFLFVAAIFYLITPVHVMSKHTDFSSEIIGYKAIDGGVTRDIASTDTCFANKHADFDTWFSQRGGSYTNDKACPLIAAVITREVGFVVPGLPGTILRTTNGDFLHFLPRVFSAVGNICYTPSKLIEYTDFATSACVLAAECTIFKDASGKPVPYCYDTNVLEGSVAYESLRPDTRYVLMDGSIIQFPNTYLEGSVRVVTIFDSEYCRHGTCERSEAGVCVSTSGRWVLNNDYYRSLPGVFCGVDAVNLLTNMFTPLIQPIGALDISASIVAGGIVAIVVTCLAYYFMRFRRAFGEYSHVVAFNTLLFLMSFTVLCLTPVYSFLPGVYSVIYLYLTFYLTNDVSFLAHIQWMVMFTPLVPFWITIAYIICISTKHFYWFFSNYLKRRVVFNGVSFSTFEEAALCTFLLNKEMYLKLRSDVLLPLTQYNRYLALYNKYKYFSGAMDTTSYREAACCHLAKALNDFSNSGSDVLYQPPQTSITSAVLQ

SEQ ID NO: 16452 - protein, 501 aa, Artificial Sequence
  SARS-CoV-2__MT831724.1__non-structural protein 4 (NSP4)
MKIVNNWLKQLIKVTLVFLFVAAIFYLITPVHVMSKHTDFSSEIIGYKAIDGGVTRDIASTDTCFANKHADFDTWFSQRGGSYTNDKACPLIAAVITREVGFVVPGLPGTILRTTNGDFLHFLPRVFSAVGNICYTPSKLIEYTDFATSACVLAAECTIFKDASGKPVPYCYDTNVLEGSVAYESLRPDTRYVLMDGSIIQFPNTYLEGSVRVVTTFDSEYCRHGTCERSEAGVCVSTSGRWVLNNDYYRSLPGVFCGVDAVNLLTNMFTPLIQPIGALDISASIVAGGIVAIVVTCLAYYFMRFRRAFCEYSHVVAFNTLLFLMSFTVLCLTPVYSFLPGVYSVIYLYLTFYLTNDVSFLAHIQWMVMFTPLVPFWITIAYIICISTKHFYWFFSNYLKRRVVFNGVSFSTFEEAALCTFLLNKEMYLKLRSDVLLPLTQYNRYLALYNKYKYFSGAMDTTSYREAACCHLAKALNDFSNSGSDVLYQPPQTSITSAVLQ

SEQ ID NO: 16453 - protein, 501 aa, Artificial Sequence
  SARS-CoV-2__MT831729.1__non-structural protein 4 (NSP4)
MKIVNNWLKQLIKVTLVFLFVAAIFYLITPVHVMSKHTDFSSEIIGYKAIDGGVTRDIASTDTCFANKHADFDTWFSQRGGSYTNDKACPLIAAVITREVGFVVPGLPGTILRTTNGDFLHFLPRVFSAVGNICYTPSKLIEYTDFATSACVLAAECTIFKDASGKPVPYCYDTNVLEGSVAYESLRPDTRYVLMDGSIIQFPNTYLEGSVRVVTTFDSEYCRHGTCERSEAGVCVSTSGRWVLNNDYYRSLPGVFCGVDAVNLLTNMFTPLIQPIGALDISASIVAGGIVAIVVTCLAYYFMRFRRAFGEYSHVVAFNTLLFLMSFTVLCLTPVYSFLPGVYSVIYLYLTFYLTNDVSFLAHIQWMVVFTPLVPFWITIAYIICISTKHFYWFFSNYLKRRVVFNGVSFSTFEEAALCTFLLNKEMYLKLRSDVLLPLTQYNRYLALYNKYKYFSGAMDTTSYREAACCHLAKALNDFSNSGSDVLYQPPQTSITSAVLQ

SEQ ID NO: 16454 - protein, 501 aa, Artificial Sequence
  SARS-CoV-2__MT831811.1__non-structural protein 4 (NSP4)
MKIVNNWLKQLIKVTLVFLFVAAIFYLITPVHVMSKHTDFSSEIIGYKAIDGGVTRDIASTDTCFANKHADFDTWFSQRGGSYTNDKACPLIAAVITREVGFVVPGLPGTILRTTNGDFLHFLPRVFSAVGNICYTPSKLIEYTDFATSACVLAAECTIFKDASGKPVPYCYDTNVLEGSVAYESLRPDTRYVLMDGSIIQFPNTYLEGSVRVVTTFDSEYCRHGTCERSEAGVCVSTSGRWVLNNDYYRSLPGVFCGVDAVNLLTNMFTPLIQPIGALDISASIVAGGIVAIVVTCLAYYFMRFRRAFGEYSHVVAFNTLLFLMSFTVLCLTPVYSFLPGVYSVIYLYLTFYLTNDVSFLAHIQWMVMFTPLVPFWITIAYIICISTKHFYWFFSNCLKRRVVFNGVSFSTFEEAALCTFLLNKEMYLKLRSDVLLPLTQYNRYLALYNKYKYFSGAMDTTSYREAACCHLAKALNDFSNSGSDVLYQPPQTSITSAVLQ

SEQ ID NO: 16455 - protein, 501 aa, Artificial Sequence
  SARS-CoV-2__MT834038.1__non-structural protein 4 (NSP4)
MKIVNNWLKQLIKVTLVFLFVAAIFYLITPVHVMSKHTDFSSEIIGYKAIDGGVTRDIASTDTCFANKHADFDTWFSQRGGSYTNDKACPLIAAVITREVGFVVPGLPGTILRTTNGDFLHFLPRVFSAVGNICYTPSKLIEYTDFATSACVLAAECTIFKDASGKPVPYCYDTNVLEGSVAYESLRPDTRYVLMDGSIIQFPNTYLEGSVRVVTTFDSEYCRHGTCERSEAGVCVSTSGRWVLNNDYYRSLPGVFCGVDAVNLLTNMFTPLIQPIGALDISASIVAGGIVAIVVTCLAYYFMRFRRAFGEYSHVVAFNTLLFLMSFTVLCLTPVYSFLPGVYSVIYLYLTFYLTNDVSFLAHIQWMVMFTPLVPFWITIAYIICISTKHFYWFFSNYLKRRVVFNGVSFSTFEEAALCTFLLNKEMYLKLRSDVLLPLTQYNRYLALYNKYKYFSGAMDTTSYREAACCHLAKALNDFSNLGSDVLYQPPQTSITSAVLQ

SEQ ID NO: 16456 - protein, 501 aa, Artificial Sequence
  SARS-CoV-2__MT834636.1__non-structural protein 4 (NSP4)
MKIVNNWLKQLIKVTLVFLFVAAIFYLITPVHVMSKHTDFSSEIIGYKAIDGGVTRDIASTDTCFANKHADFDTWFSQRGGSYTNDKACPLIAAVITREVGFVVPGLPGTILRTTNGDFLHFLPRVFSAVGNICYTPSKLIEYTDFATSACVLAAECTIFKDASGKPVPYCYDTNVLEGSVAYESLRPDTRYVLMDGSIIQFPNTYLEGSVRVVTTFDSEYCRHGTCERSEAGVCVSTSGRWVLNNDYYRSLPGVFCGVDAVNLLTNMFTPLIQPIGALDISASIVAGGIVAIVVTCLAYYFMRFRRAFGEYSHVVAFNTLLFLMSFTVLCLTPVYSFLPGVYSVIYLYLTFYLTNDVSFLAHIQWMVMFTPLVPFWITIAYIICISTKHFYWFFSNYLKRRVVFNGVSFSTFEEAALCTFLLNKEMYLKLRSDVLLPLTQYNRYLALYNKYKYFSGVMDTTSYREAACCHLAKALNDFSNSGSDVLYQPPQTSITSAVLQ

SEQ ID NO: 16457 - protein, 501 aa, Artificial Sequence
  SARS-CoV-2__MT827203.1__non-structural protein 4 (NSP4)
MKIVNNWLKQLIKVTLVFLFVAAIFYLITPVHVMSKHTDFSSEIIGYKAIDGGVTRDIASTDTCFANKHADFDTWFSQRGGSYTNDKACPLIAAVITREVGFVVPGLPGTILRTTNGDFLHFLPRVFSAVGNICYTPSKLIEYTDFATSACVLAAECTIFKDASGKPVPYCYDTNVLEGSVAYESLRPDTRYVLMDGSIIQFPNTYLEGSVRVVTTFDSEYCRHGTCERSEVGVCVSTSGRWVLNNDYYRSLPGVFCGVDAVNLLTNMFTPLIQPIGALDISASIVAGGIVAIVVTCLAYYFMRFRRAFGEYSHVVAFNTLLFLMSFTVLCLTPVYSFLPGVYSVIYLYLTFYLTNDVSFLAHIQWMVMFTPLVPFWITIAYIICISTKHFYWFFSNYLKRRVVFNGVSFSTFEEAALCTFLLNKEMYLKLRSDVLLPLTQYNRYLALYNKYKYFSGAMDTTSYREAACCHLAKALNDFSNSGSDVLYQPPQTSITSAVLQ

SEQ ID NO: 16458 - protein, 501 aa, Artificial Sequence
  SARS-CoV-2__MT825091.1__non-structural protein 4 (NSP4)
MKIVNNWLKQLIKVTLVFLFVAAIFYLITPVHVMSKHTDFSSEIIGYKDIDGGVTRDIASTDTCFANKHADFDIWFSQRGGSYTNDKACPLIAAVITREVGFVVPGLPGTILRTTNGDFLHFLPRVFSAVGNICYTPSKLIEYTDFATSACVLAAECTIFKDASGKPVQYCYDTNVQEGSVAYESLRPDTRYVLMDGSIIQFPNTYLEGSVRVVTTFDSEYCRHGTCERSEAGVCVSTSGRWVPNNDYYRSLPGVFCGVDAVNLLTNMFTPLIQLIGALDISASIVAGGIVAIVVTCLAYYFMRFRRAFGEYSHVVAFNTLPFLMSFTVHCLTPVYSFLPGVYSVIYLYLTFYLTNDVSFLAHIQWMVMFTPLVPFWITIAYIICISTKHFYWFFSNYLKRRVVFNGVSFSTFEEAALCTFLLNKEMYLKLRSDVLLPLTQYNRYLALYNKYKYFSGAMDTTSYREAACCHLAKALNDFSNSGSDVLYLPPQTSITSAVLQ

SEQ ID NO: 16459 - protein, 501 aa, Artificial Sequence
  SARS-CoV-2__MT821553.1__non-structural protein 4 (NSP4)
MKIVNNWLKQLIKVTLVFLFVAAIFYLITPVHVMSKHTDFSSEIIGYKAIDGGVTRDIASTDTCFANKHADFDTWFSQRGGSYTNDKACPLIAAVITREVGFVVPGLPGTILRTTNGDFLHFLPRVFSAVGNICYTPSKLIEYTDFATSACVLAAECTIFKDASGKPVPYCYDTNVLEGSVAYESLRPDTRYVLMDGSIIQFPNTYLEGSVRVVTTFDSEYCRHGTCERSEAGVCVSTSGRWVLNNDYYRSLPGVFCGVDAVNLLTNMFTPLIQPIGALDISASIVAGGIVAIVVTCLAYYFMRFRRAFGEYSHVVAFNTLLFLMSFTVLCLTPVYSFLPGVYSVIYLYLTFYLTNDVSFLAHIQWMVMFTPLVPFWITIAYIICISTKHFYWFFSNYLKRRVVFNGVSFSTFEEAALCTFLLNKEMYLKLRSDVLLSLTQYNRYLALYNKYKYFSGAMDTTSYREAACCHLAKALNDFSNSGSDVLYQPPQTSITSAVLQ

SEQ ID NO: 16460 - protein, 501 aa, Artificial Sequence
  SARS-CoV-2__MT821707.1__non-structural protein 4 (NSP4)
MKIVNNWLKQLIKVTLVFLFVAAIFYLITPVHVMSKHTDFSSEIIGYKAIDGGVTRDIASTDTCFANKHADFDTWFSQRGGSYINDKACPLIAAVITREVGFVVPGLPGTILRTTNGDFLHFLPRVFSAVGNICYTPSKLIEYTDFATSACVLAAECTIFKDASGKPVPYCYDTNVLEGSVAYESLRPDTRYVLMDGSIIQFPNTYLEGSVRVVTTFDSEYCRHGTCERSEAGVCVSTSGRWVLNNDYYRSLPGVFCGVDAVNLLTNMFTPLIQPIGALDISASIVAGGIVAIVVTCLAYYFMRFRRAFGEYSHVVAFNTLLFLMSFTVLCLTPVYSFLPGVYSVIYLYLTFYLTNDVSFLAHIQWMVMFTPLVPFWITIAYIICISTKHFYWFFSNYLKRRVVFNGVSFSTFEEAALCTFLLNKEMYLKLRSDVLLPLTQYNRYLALYNKYKYFSGAMDTTSYREAACCHLAKALNDFSNSGSDVLYQPPQTSITSAVLQ

SEQ ID NO: 16461 - protein, 501 aa, Artificial Sequence
  SARS-CoV-2__MT820132.1__non-structural protein 4 (NSP4)
MKIVNNWLKQLIKVTLVFLFVAAIFYLITPVHVMSKHTDFSSEIIGYKAIDGGVTRDIASTDTCFANKHADFDTWFSQRGGSYTNDKACPLIAAVITREVGFVVPGLPGTILRTTNGDFLHFLPRVFSAVGNICYTPSKLIEYTDFATSACVLAAECTIFKDASGKPVPYCYDTNVLEGSVAYESLRPDTRYVLMDGSIIQFPNTYLEGSVRVVTTFDSEYCRHGTCERSEAGVCVSTSGRWVLNNDYYRSLPGVFCGVDAVNLLTNMFTPLIQPIGALDISASIVAGGIVAIVVTCLAYYFMRFRRAFGEYSHVVAFNTLLFLMSFTVLCLTPVYSFLPGVYSVIYLYLTFYLTNDVSFLAHIQWMVMFTPLVPFWITIAYIICISTKHFYWFFSNYLKRRVVFNGVSFSTFEEAALCTFLLNKEMYLKLRSDVLPLTQYNRYLALYNKYKYFSGAMDTTSYREAACCHLAKALNDFSNSGSDVLYQPPQTSITSAVLQS

SEQ ID NO: 16462 - protein, 501 aa, Artificial Sequence
  SARS-CoV-2__MT810483.1__non-structural protein 4 (NSP4)
MKIVNNWLKQLIKVTLVFLFVAAIFYLITPVHVISKHTDFSSEIIGYKAIDGGVTRDIASTDTCFANKHADFDTWFSQRGGSYTNDKACPLIAAVITREVGFVVPGLPGTILRTTNGDFLHFLPRVFSAVGNICYTPSKLIEYTDFATSACVLAAECTIFKDASGKPVPYCYDTNVLEGSVAYESLRPDTRYVLMDGSIIQFPNTYLEGSVRVVTTFDSEYCRHGTCERSEAGVCVSTSGRWVLNNDYYRSLPGVFCGVDAVNLLTNMFTPLIQPIGALDISASIVAGGIVAIVVTCLAYYFMRFRRAFGEYSHVVAFNTLLFLMSFTVLCLTPVYSFLPGVYSVIYLYLTFYLTNDVSFLAHIQWMVMFTPLVPFWITIAYIICISTKHFYWFFSNYLKRRVVFNGVSFSTFEEAALCTFLLNKEMYLKLRSDVLLPLTQYNRYLALYNKYKYFSGAMDTTSYREAACCHLAKALNDFSNSGSDVLYQPPQTSITSAVLQ

SEQ ID NO: 16463 - protein, 501 aa, Artificial Sequence
  SARS-CoV-2__MT810494.1__non-structural protein 4 (NSP4)
MKIVNNWLKQLIKVTLVFLFVAAIFYLITPVHVMSKHTDFSSEIIGYKAIDGGVTRDIASTDTCFANKHADFDTWFSQRGGSYTNDKACPLIAAVITREVGFVVPGLPGTILRTTNGDFLHFLPRVFSAVGNICYTPSKLIEYTDFATSACVLAAECTIFKDASGKPVPYCYDTNVLEGSVVYESLRPDTRYVLMDGSIIQFPNTYLEGSVRVVTTFDSEYCRHGTCERSEAGVCVSTSGRWVLNNDYYRSLPGVFCGVDAVNLLTNMFTPLIQPIGALDISASIVAGGIVAIVVTCLAYYFMRFRRAFGEYSHVVAFNTLLFLMSFTVLCLTPVYSFLPGVYSVIYLYLTFYLTNDVSFLAHIQWMVMFTPLVPFWITIAYIICISTKHFYWFFSNYLKRRVVFNGVSFSTFEEAALCTFLLNKEMYLKLRSDVLLPLTQYNRYLALYNKYKYFSGAMDTTSYREAACCHLAKALNDFSNSGSDVLYQPPQTSITSAVLQ

SEQ ID NO: 16464 - protein, 501 aa, Artificial Sequence
  SARS-CoV-2__MT810720.1__non-structural protein 4 (NSP4)
MKIVNNWLKQLIKVTLVFLFVAAIFYLITPVHVMSKHTDFSSEIIGYKAIDGGVTRDIASTDTCFANKHADFDAWFSQRGGSYTNDKACPLIAAVITREVGFVVPGLPGTILRTTNGDFLHFLPRVFSAVGNICYTPSKLIEYTDFATSACVLAAECTIFKDASGKPVPYCYDTNVLEGSVAYESLRPDTRYVLMDGSIIQFPNTYLEGSVRVVTTFDSEYCRHGTCERSEAGVCVSTSGRWVLNNDYYRSLPGVFCGVDAVNLLTNMFTPLIQPIGALDISASIVAGGIVAIVVTCLAYYFMRFRRAFGEYSHVVAFNTLLFLMSFTVLCLTPVYSFLPGVYSVIYLYLTFYLTNDVSFLAHIQWMVMFTPLVPFWITIAYIICISTKHFYWFFSNYLKRRVVFNGVSFSTFEEAALCTFLLNKEMYLKLRSDVLLPLTQYNRYLALYNKYKYFSGAMDTTSYREAACCHLAKALNDFSNSGSDVLYQPPQTSITSAVLQ

SEQ ID NO: 16465 - protein, 501 aa, Artificial Sequence
  SARS-CoV-2__MT810758.1__non-structural protein 4 (NSP4)
MKIVNNWLKQLIKVTLVFLFVAAIFYLITPVHVMSKHTDFSSEIIGYKAIDGGVTRDIASTDTCFANKHADFDTWFSQRGGSYTNDKACPLIAAVITREVGFVVPGLPGTILRTTNGDFLHFLPRVFSAVGNICYTPSKLIEYTDFATSACVLAAECTIFKDASGKPVPYCYDTNVLEGSVAYESLRPDTRYVLMDGSIIQFPNTYLEGSVRVVTTFDSEYCRHGTCERSEAGVCVSTSGRWVLNNDYYRSLPGVFCGVDAVNLLTNMFTPLIQPIGALDISASIVAGGIVAIVVTCLAYYFMRFRRAFGEYSHVVAFNTLLFLMSFTVLCLTPVYSFLPGVYSVIYLYLTFYLTNDVSFLAHIQWMVMFTPLVPFWITIAYIICISTKNFYWFFSNYLKRRVVFNGVSFSTFEEAALCTFLLNKEMYLKLRSDVLLPLTQYNRYLALYNKYKYFSGAMDTTSYREAACCHLAKALNDFSNSGSDVLYQPPQTSITSAVLQ

SEQ ID NO: 16466 - protein, 501 aa, Artificial Sequence
  SARS-CoV-2__MT810765.1__non-structural protein 4 (NSP4)
MKIVNNWLKQLIKVTLVFLFVAAIFYLITPVHVMFKHTDFSSEIIGYKAIDGGVTRDIASTDTCFANKHADFDTWFSQRGGSYTNDKACPLIAAVITREVGFVVPGLPGTILRTTNGDFLHFLPRVFSAVGNICYTPSKLIEYTDFATSACVLAAECTIFKDASGKPVPYCYDTNVLEGSVAYESLRPDTRYVLMDGSIIQFPNTYLEGSVRVVTTFDSEYCRHGTCERSEAGVCVSTSGRWVLNNDYYRSLPGVFCGVDAVNLLTNMFTPLIQPIGALDISASIVAGGIVAIVVTCLAYYFMRFRRAFGEYSHVVAFNTLLFLMSFTVLCLTPVYSFLPGVYSVIYLYLTFYLTNDVSFLAHIQWMVMFTPLVPFWITIAYIICISTKHFYWFFSNYLKRRVVFNGVSFSTFEEAALCTFLLNKEMYLKLRSDVLLPLTQYNRYLALYNKYKYFSGAMDTTSYREAACCHLAKALNDFSNSGSDVLYQPPQTSITSAVLQ

SEQ ID NO: 16467 - protein, 501 aa, Artificial Sequence
  SARS-CoV-2__MT810782.1__non-structural protein 4 (NSP4)
MKIVNNWLKQLIKVTLVFLFVAAIFYLITPVHVMSKHTDFSSEIIGYKAIDGGVTRDIASTDTCFANKHADFDTWFSQRGGSYTTDKACPLIAAVITREVGFVVPGLPGTILRTTNGDFLHFLPRVFSAVGNICYTPSKLIEYTDFATSACVLAAECTIFKDASGKPVPYCYDTNVLEGSVAYESLRPDTRYVLMDGSIIQFPNTYLEGSVRVVTTFDSEYCRHGTCERSEAGVCVSTSGRWVLNNDYYRSLPGVFCGVDAVNLLTNMFTPLIQPIGALDISASIVAGGIVAIVVTCLAYYFMRFRRAFGEYSHVVAFNTLLFLMSFTVLCLTPVYSFLPGVYSVIYLYLTFYLTNDVSFLAHIQWMVMFTPLVPFWITIAYIICISTKHFYWFFSNYLKRRVVFNGVSFSTFEEAALCTFLLNKEMYLKLRSDVLLPLTQYNRYLALYNKYKYFSGAMDTTSYREAACCHLAKALNDFSNSGSDVLYQPPQTSITSAVLQ

SEQ ID NO: 16468 - protein, 501 aa, Artificial Sequence
  SARS-CoV-2__MT810814.1__non-structural protein 4 (NSP4)
MKIVNNWLKQLIKVTLVFLFVAAIFYLITPVHVMSKHTDFSSEIIGYKAIDGGVTRDIASTDTCFANKHADFDTWFSQRGGSYTNDKACPLIAAVITREVGFVVPGLPGTILRTTNGDFLHFLPRVFSAVGNICYTPSKLIEYTDFATSACVLAAECTIFKDASGKPVPYCYDTNVLEGSVAYESLRPDTRYVLMDGSIIQFPNTYLEGSVRVVTTFDSEYCRHGTCERSEAGVCVSTSGRWVLNNDYYRSLPGVFCGVDAVNLLTNMFTPLIQPIGALDISASIVAGGIVAIVVTCLAYYFMRFRRAFGEYSHVVAFNTLLFLMSFTVLCLTPVYSFLPGVYSVIYLYLTFYLTNDVSFLAHIQWMVMFTPLVPFWITIAYIICISTKHFYWFFSNYLKRRVVFNGVSFSTFEEAALCTFLLNKEMYLKLRSDVLLPLTQYNRYLVLYNKYKYFSGAMDTTSYREAACCHLAKALNDFSNSGSDVLYQPPQTSITSAVLQ

SEQ ID NO: 16469 - protein, 501 aa, Artificial Sequence
  SARS-CoV-2__MT810842.1__non-structural protein 4 (NSP4)
MKIVNNWLKQLIKVTLVFLFVAAIFYLITPVHVMSKHTDFSSEIIGYKAIDGGVTRDIASTDTCFANKHADFDTWFSQRGGSYTNDKACPLIAAVITREVGFVVPGLPGTILRTTNGDFLHFLPRVFSAVGNICYTPSKLIEYTDFATSACVLAAECTIFKDASGKPVPYCYDTNVLEGSVAYESLRPDTRYVLMDGSIIQFPNTYLEGSVRVVTTFDSEYCRHCTCERSEAGVCVSTSGRWVLNNDYYRSLPGVFCGVDAVNLLTNMFTPLIQPIGALDISASIVAGGIVAIVVTCLAYYFMRFRRAFGEYSHVVAFNTLLFLMSFTVLCLTPVYSFLPGVYSVIYLYLTFYLTNDVSFLAHIQWMVMFTPLVPFWITIAYIICISTKHFYWFFSNYLKRRVVFNGVSFSTFEEAALCTFLLNKEMYLKLRSDVLLPLTQYNRYLALYNKYKYFSGAMDTTSYREAACCHLAKALNDFSNSGSDVLYQPPQTSITSAVLQ

SEQ ID NO: 16470 - protein, 501 aa, Artificial Sequence
  SARS-CoV-2__MT810897.1__non-structural protein 4 (NSP4)
MKIVNNWLKQLIKVTLVFLFVAAIFYLITPVHVMSKHTDFSSEIIGYKAIDGGVTRDIASTDTCFANKHADFDTWFSQRGGSYTNDKACPLIAAVITREVGFVVPGLPGTILRTTNGDFLHFLPRVFSAVGNICYTPSKLIEYTDFATSACVLAAECTIFKEASGKPVPYCYDTNVLEGSVAYESLRPDTRYVLMDGSIIQFPNTYLEGSVRVVTTFDSEYCRHGTCERSEAGVCVSTSGRWVLNNDYYRSLPGVFCGVDAVNLLTNMFTPLIQPIGALDISASIVAGGIVAIVVTCLAYYFMRFRRAFGEYSHVVAFNTLLFLMSFTVLCLTPVYSFLPGVYSVIYLYLTFYLTNDVSFLAHIQWMVMFTPLVPFWITIAYIICISTKHFYWFFSNYLKRRVVFNGVSFSTFEEAALCTFLLNKEMYLKLRSDVLLPLTQYNRYLALYNKYKYFSGAMDTTSYREAACCHLAKALNDFSNSGSDVLYQPPQTSITSAVLQ

SEQ ID NO: 16471 - protein, 501 aa, Artificial Sequence
  SARS-CoV-2__MT810946.1__non-structural protein 4 (NSP4)
MKIVNNWLKQLIKVTLVFLFVAAIFYLITPVHVMSKHTDFSSEIIGYKAIDGGVTRDIASTDTCFANKHADFDTWFSQRGGSYTNDKACPLIAAVITREVGFVVPGLPGTILRTTNGDFLHFLPRVFSAVGNICYTPSKLIEYTDFATSACVLAAECTIFKDASGKPVPYCYDTNVLEGSVAYESLRPDTRYVLMDGSIIQFPNTYLEGSVRVVTTFDSEYCRHGTCERSEAGVCVSTSGRWVLNNDYYRSLPGVFCGVDAVNLLTNMFTPLIQPIGALDISASIVAGGVVAIVVTCLAYYFMRFRRAFGEYSHVVAFNTLLFLMSFTVLCLTPVYSFLPGVYSVIYLYLTFYLTNDVSFLAHIQWMVMFTPLVPFWITIAYIICISTKHFYWFFSNYLKRRVVFNGVSFSTFEEAALCTFLLNKEMYLKLRSDVLLPLTQYNRYLALYNKYKYFSGAMDTTSYREAACCHLAKALNDFSNSGSDVLYQPPQTSITSAVLQ

SEQ ID NO: 16472 - protein, 501 aa, Artificial Sequence
  SARS-CoV-2__MT810982.1__non-structural protein 4 (NSP4)
MKIVNNWLKQLIKVTLVFLFVAAIFYLITPVHVMSKHTDFSSEIIGYKAIDGGVTRDIASTDTCFANKHADFDTWFSQRGGSYTNDKACPLIAAVITREVGFVVPGLPGTILRTTNGDFLHFLPRVFSAVGNICYTPSKLIEYTDFATSACVLAAECTIFKDASGKPVPYCYDTNVLEGSVAYESLRPDTRYVLMDGSIIQFPNTYLEGSVRVVTTFDSEYCRHGICERSEAGVCVSTSGRWVLNNDYYRSLPGVFCGVDAVNLLTNMFTPLIQPIGALDISASIVAGGIVAIVVTCLAYYFMRFRRAFGEYSHVVAFNTLLFLMSFTVLCLTPVYSFLPGVYSVIYLYLTFYLTNDVSFLAHIQWMVMFTPLVPFWITIAYIICISTKHFYWFFSNYLKRRVVFNGVSFSTFEEAALCTFLLNKEMYLKLRSDVLLPLTQYNRYLALYNKYKYFSGAMDTTSYREAACCHLAKALNDFSNSGSDVLYQPPQTSITSAVLQ

SEQ ID NO: 16473 - protein, 501 aa, Artificial Sequence
  SARS-CoV-2__MT811283.1__non-structural protein 4 (NSP4)
MKIVNNWLKQLIKVTLVFLFVAAIFYLITPVHVMSKHTDFSSEIIGYKAIDGGVTRDIASTDTCFANKHADFDTWFSQRGGSYTNDKACPLIAAVITREVGFVVPGLPGTILRTTNGDFLHFLPRVFSAVGNICYTPSKLIEYTDFATSACVLAAECTIFKDASGKPVPYCYDTNVLEGSVAYESLRPDTRYVLMDGSIIQFPNTYLEGSVRVVTTFDSEYCRHGTCERSEAGVCVSTSGRWVLNNDYYRSLPGVFCGVDAVNLLTNMFTPLIQPIGALDISASIVAGGIVAIVVTCLAYYFMRFRRAFGEYSHVVAFNTLLFLMSFTVLCLTPVYSFLPGVYSVIYLYLTFYLTNDVSFLAHIQWMVMFTSLVPFWITIAYIICISTKHFYWFFSNYLKRRVVFNGVSFSTFEEAALCTFLLNKEMYLKLRSDVLLPLTQYNRYLALYNKYKYFSGAMDTTSYREAACCHLAKALNDFSNSGSDVLYQPPQTSITSAVLQ

SEQ ID NO: 16474 - protein, 501 aa, Artificial Sequence
  SARS-CoV-2__MT811437.1__non-structural protein 4 (NSP4)
MKIVNNWLKQLIKVTLVFLFVAAIFYLITPVHVMSKHTDFSSEIIGYKAIDGGVTRDIASTDTCFANKHADFDTWFSQRGGSYTNDKACPLIAAVITREVGFVVPGLPGTILRTTNGDFLHFLPRVFSAVGNICYTPSKLIEYTDFATSACVLAAECTIFKDASGKPVPYCYDTNVLEGSVAYENLRPDTRYVLMDGSIIQFPNTYLEGSVRVVTTFDSEYCRHGTCERSEAGVCVSTSGRWVLNNDYYRSLPGVFCGVDAVNLLTNMFTPLIQPIGALDISASIVAGGIVAIVVTCLAYYFMRFRRAFGEYSHVVAFNTLLFLMSFTVLCLTPVYSFLPGVYSVIYLYLTFYLTNDVSFLAHIQWMVMFTPLVPFWITIAYIICISTKHFYWFFSNYLKRRVVFNGVSFSTFEEAALCTFLLNKEMYLKLRSDVLLPLTQYNRYLALYNKYKYFSGAMDTTSYREAACCHLAKALNDFSNSGSDVLYQPPQTSITSAVLQ

SEQ ID NO: 16475 - protein, 501 aa, Artificial Sequence
  SARS-CoV-2__MT811448.1__non-structural protein 4 (NSP4)
MKIVNNWLKQLIKVTLVFLFVAAIFYLITPVHVMSKHTDFSSEIIGYKAIDGGVTRDIASTDTCFANKHADFDTWFSQRGGSYTNDKACPLIAAVITREVGFVVPGLPGTILRTTNGDFLHFLPRVFSAVGNICYTPSKLIEYTDFATAACVLAAECTIFKDASGKPVPYCYDTNVLEGSVAYESLRPDTRYVLMDGSIIQFPNTYLEGSVRVVTTFDSEYCRHGTCERSEAGVCVSTSGRWVLNNDYYRSLPGVFCGVDAVNLLTNMFTPLIQPIGALDISASIVAGGIVAIVVTCLAYYFMRFRRAFGEYSHVVAFNTLLFLMSFTVLCLTPVYSFLPGVYSVIYLYLTFYLTNDVSFLAHIQWMVMFTPLVPFWITIAYIICISTKHFYWFFSNYLKRRVVFNGVSFSTFEEAALCTFLLNKEMYLKLRSDVLLPLTQYNRYLALYNKYKYFSGAMDTTSYREAACCHLAKALNDFSNSGSDVLYQPPQTSITSAVLQ

SEQ ID NO: 16476 - protein, 501 aa, Artificial Sequence
  SARS-CoV-2__MT811484.1__non-structural protein 4 (NSP4)
MKIVNNWLKQLIKVTLVFLFVAAIFYLITPVHVMSKHTDFSSEIIGYKAIDGGVTRDIASTDTCFANKHADFDTWFSQRGGSYTNDKACPLIAAVITREVGFVVPGLPGTILRTTNGDFLHFLPRVFSAVGNICYTPSKLIEYTDFATSACVLAAECTIFKDASGKPVPYCYDTNVLEGSVAYESLRPDTRYVLMDGSIIQFPNTYLEGSVRVVTTFDSEYCRHGTCERSEAGVCVSTSGRWVLNNDYYRSLPGVFCGVDAVNLLTNMFTPLIQPIGALDISASIVAGGIVAIVVTCLAYYFMRFRRAFGEYSHVVAFNTLLFLMSFTVLCLTPVYSFLPGVYSVIYLYLTFYLTNDVSFLAHIQWMVMFTPLVPFWITIAYIICISTKHFYWFFSNYLKRRVVFNGVSFSTFEEAALCTFLLNKEMYLKLRSDVLLPLTQYNRYLALYNKYKYFSGAMDTTSYREAACCHLAKALNDFSNSGSDVLYQPPQASITSAVLQ

SEQ ID NO: 16477 - protein, 501 aa, Artificial Sequence
  SARS-CoV-2__MT811505.1__non-structural protein 4 (NSP4)
MKIVNNWLKQLIKVTLVFLFVAAIFYLITPVHVMSKHTDFSSEIIGYKAIDGGVTRDIASTDTCFANKHADFDTWFSQRGGSYTNDKACPLIAAVITREVGFVVPGLPGTILRTTNGDFLHFLPRVFSAVGNICYTPSKLIEYTDFATSACVLAAECTIFKDASGKPVPYCYDTNVLEGSVAYESLRPDTRYVLMDGSIIQFPNTYLEGSVRVVITFDSEYCRHGTCERSEAGVCVSTSGRWVLNNDYYRSLPGVFCGVDAVNLLTNMFTPLIQPIGALDISASIVAGGIVAIVVTCLAYYFMRFRRAFGEYSHVVAFNTLLFLMSFTVLCLTPVYSFLPGVYSVIYLYLTFYLTNDVSFLAHIQWMVMFTPLVPFWITIAYIICISTKHFYWFFSNYLKRRVVFNGVSFSTFEEAALCTFLLNKEMYLKLRSDVLLPLTQYNRYLALYNKYKYFSGAMDTTSYREAACCHLAKALNDFSNSGSDVLYQPPQTSITSAVLQ

SEQ ID NO: 16478 - protein, 501 aa, Artificial Sequence
  SARS-CoV-2__MT811523.1__non-structural protein 4 (NSP4)
MKIVNNWLKQLIKVTLVFLFVAAIFYLITPVHVMSKHTDFSSEIIGYKAIDGGVTRDIASTDTCFANKHADFDTWFSQRGGSYTNDKACPLIAAVITREVGFVVPGLPGTILRTTNGDFLHFLPRVFSAVGNICYTPSKLIEYTDFATSACVLAAECTIFKDASGKPVPYCYDTNVLEGSVAYESLRPDTRYVLMDGSIIQFPNTYLEGSVRVVTTFDSEYCRHGTCERSEAGVCVSTSGRWVLNNDYYRSLPGVFCGVDAVNLLTNMFTPLIQPIGALNISASIVAGGIVAIVVTCLAYYFMRFRRAFGEYSHVVAFNTLLFLMSFTVLCLTPVYSFLPGVYSVIYLYLTFYLTNDVSFLAHIQWMVMFTPLVPFWITIAYIICISTKHFYWFFSNYLKRRVVFNGVSFSTFEEAALCTFLLNKEMYLKLRSDVLLPLTQYNRYLALYNKYKYFSGAMDTTSYREAACCHLAKALNDFSNSGSDVLYQPPQTSITSAVLQ

SEQ ID NO: 16479 - protein, 501 aa, Artificial Sequence
  SARS-CoV-2__MT811707.1__non-structural protein 4 (NSP4)
MKIVNNWLKQLIKVTLVFLFVAAIFYLITPVHVMSKHTDFSSEIIGYKAIDGGVTRDIASTDTCFANKHADFDTWFSQRGGSYTNDKACPLIAAVITREVGFVVPGLPGTILRTTNGDFLHFLPRVFSAVGNICYTPSKLIEYTDFATSACVLAAECTIFKDASGKPVPYCYDTNVLEGSVAYESLRPDTRYVLMDGSIIQFPNTYLEGSVRVVTTFDSEYCRHGTCERSEAGVCVSTSGRWVLNNDYYRSLPGVLCGVDAVNLLTNMFTPLIQPIGALDISASIVAGGIVAIVVTCLAYYFMRFRRAFGEYSHVVAFNTLLFLMSFTVLCLTPVYSFLPGVYSVIYLYLTFYLTNDVSFLAHIQWMVMFTPLVPFWITIAYIICISTKHFYWFFSNYLKRRVVFNGVSFSTFEEAALCTFLLNKEMYLKLRSDVLLPLTQYNRYLALYNKYKYFSGAMDTTSYREAACCHLAKALNDFSNSGSDVLYQPPQTSITSAVLQ

SEQ ID NO: 16480 - protein, 501 aa, Artificial Sequence
  SARS-CoV-2__MT811728.1__non-structural protein 4 (NSP4)
MKIVNNWLKQLIKVTLVFLFVAAIFYLITPVHVMSKHTDFSSEIIGYKAIDGGVTRDIASTDTCFANKHADFDTWFSQRGGSYTNDKACPLIAAVIIREVGFVVPGLPGTILRTTNGDFLHFLPRVFSAVGNICYTPSKLIEYTDFATSACVLAAECTIFKDASGKPVPYCYDTNVLEGSVAYESLRPDTRYVLMDGSIIQFPNTYLEGSVRVVTTFDSEYCRHGTCERSEAGVCVSTSGRWVLNNDYYRSLPGVFCGVDAVNLLTNMFTPLIQPIGALDISASIVAGGIVAIVVTCLAYYFMRFRRAFGEYSHVVAFNTLLFLMSFTVLCLTPVYSFLPGVYSVIYLYLTFYLTNDVSFLAHIQWMVMFTPLVPFWITIAYIICISTKHFYWFFSNYLKRRVVFNGVSFSTFEEAALCTFLLNKEMYLKLRSDVLLPLTQYNRYLALYNKYKYFSGAMDTTSYREAACCHLAKALNDFSNSGSDVLYQPPQTSITSAVLQ

SEQ ID NO: 16481 - protein, 501 aa, Artificial Sequence
  SARS-CoV-2__MT811737.1__non-structural protein 4 (NSP4)
MKIVNNWLKQLIKVTLVFLFVAAIFYLITPVHVMSKHTDFSSEIIGYKAIDGGVTRDIASTDTCFANKHADFDTWFSQRGGSYTNDKACPLIAAVITREVGFVVPGLPGTILRTTNGDFLHFLPRVFSAVGNICYTPSKLIEYTDFATSACVLAAECTIFKDASGKPVPYCYDTNVLEGSVAYESLRPDTRYVLMDGSIIQFPNTYLEGSVRVVTTFDSEYCRHGTCERSEAGVCVSTSGRWVLNNDYYRSLPGVFCGVDAVNLLTNMFTPLIQPIGALDISASIVAGGIVAIVVTCLAYYFMRFRRAFGEYSHVVAFNTLLFLMSFTVLCLTPVYSFLPGVYSVIYLYLIFYLTNDVSFLAHIQWMVMFTPLVPFWITIAYIICISTKHFYWFFSNYLKRRVVFNGVSFSTFEEAALCTFLLNKEMYLKLRSDVLLPLTQYNRYLALYNKYKYFSGAMDTTSYREAACCHLAKALNDFSNSGSDVLYQPPQTSITSAVLQ

SEQ ID NO: 16482 - protein, 501 aa, Artificial Sequence
  SARS-CoV-2__MT806775.1__non-structural protein 4 (NSP4)
MKIVNNWLKQLIKVTLVFLFVAAIFYLITPVHVMSKHTDFSSEIIGYKAIDGGVTRDIASTDTCFANKHADFDTWFSQRGGSYTNDKACPLIAAVITREVGFVVPGLPGTILRTTNGDFLHFLPRVFSVVGNICYTPSKLIEYTDFATSACVLAAECTIFKDASGKPVPYCYDTNVLEGSVAYESLRPDTRYVLMDGSIIQFPNTYLEGSVRVVTTFDSEYCRHGTCERSEAGVCVSTSGRWVLNNDYYRSLPGVFCGVDAVNLLTNMFTPLIQPIGALDISASIVAGGIVAIVVTCLAYYFMRFRRAFGEYSHVVAFNTLLFLMSFTVLCLTPVYSFLPGVYSVIYLYLTFYLTNDVSFLAHIQWMVMFTPLVPFWITIAYIICISTKHFYWFFSNYLKRRVVFNGVSFSTFEEAALCTFLLNKEMYLKLRSDVLLPLTQYNRYLALYNKYKYFSGAMDTTSYREAACCHLAKALNDFSNSGSDVLYQPPQTSITSAVLQ

SEQ ID NO: 16483 - protein, 501 aa, Artificial Sequence
  SARS-CoV-2__MT806779.1__non-structural protein 4 (NSP4)
MKIVNNWLKQLIKVTLVFLFVAAIFYLITPVHVMSKHTDFSSEIIGYKAIDGGVTRDIASTDTCFANKHADFDTWFSQRGGSYTNDKACPLIAAVITREVGFVVPGLPGTILRTTNGDFLHFLPRVFSAVGNICYTPSKLIEYTDFATSACVLAAECTIFKDASGKPVPYCYDTNVLEGSVAYESLRPDTRYVLMDGSIIQFPNTYLEGSVRVVTTFDSEYCRHGTCERSEAGVCVSISGRWVLNNDYYRSLPGVFCGVDAVNLLTNMFTPLIQPIGALDISASIVAGGIVAIVVTCLAYYFMRFRRAFGEYSHVVAFNTLLFLMSFTVLCLTPVYSFLPGVYSVIYLYLTFYLTNDVSFLAHIQWMVMFTPLVPFWITIAYIICISTKHFYWFFSNYLKRRVVFNGVSFSTFEEAALCTFLLNKEMYLKLRSDVLLPLTQYNRYLALYNKYKYFSGAMDTTSYREAACCHLAKALNDFSNSGSDVLYQPPQTSITSAVLQ

SEQ ID NO: 16484 - protein, 501 aa, Artificial Sequence
  SARS-CoV-2__MT800029.1__non-structural protein 4 (NSP4)
MKIVNNWLKQLIKVTLVFLFVAAIFYLITPVHVMSKHTDFSSEIIGYKAIDGGVTRDIASTDTCFANKHADFDTWFSQRGGSYTNDKACPLIAAVITREVGFVVPGLPGTILRTTNGDFLHFLPRVFSAVGNICYTPSKLIEYTDFATSACVLAAECTIFKDASGKPVPYCYDTNVLEGSVAYESLRPDTRYVLMDGSIIQFPNTYLEGSVRVVTTFDSEYCRHGTCERSEAGVCVSTSGRWVLNNDYYRSLPGVFCGVDAVNLLTNMFTPLIQPIGALDISASIVAGGIVAIVVTCLAYYFMRFRRAFGEYSHVVAFNTLLFLISFTVLCLTPVYSFLPGVYSVIYLYLTFYLTNDVSFLAHIQWMVMFTPLVPFWITIAYIICISTKHFYWFFSNYLKRRVVFNGVSFSTFEEAALCTFLLNKEMYLKLRSDVLLPLTQYNRYLALYNKYKYFSGAMDTTSYREAACCHLAKALNDFSNSGSDVLYQPPQTSITSAVLQ

SEQ ID NO: 16485 - protein, 501 aa, Artificial Sequence
  SARS-CoV-2__MT800282.1__non-structural protein 4 (NSP4)
MKIVNNWLKQLIKVTLVFLFVAAIFYLITPVHVMSKHTDFSSEIIGYKAIDGGVTRDIASTDTCFANKHADFDTWFSQRGGSYTNDKACPLIAAVITREVGFVVPGLPGTILRTTNGDFLHFLPRVFSAVGNICYTPSKLIEYTDFATSACVLAAECTIFKDASGKPVPYCYDTNVLEGSVAYESLRPDTRYVLMDGSIIQFPNTYLEGSVRVVTTFDSEYCRHGTCERSEAGVCVSTSGRWVLNNDYYRSLPGVFCGVDAVNLLTNMFTPLIQPIGALDISASIVAGGIVAIVVTCLAYYFMRFRRAFGEYSHVVAFNTLLFLMSFTVLCLTPVYSFLPGVYSVIYLYLTFYLTNDVSFLAHIQWMVMFTPLVPFWITIAYIICISTKHFYWFFGNYLKRRVVFNGVSFSTFEEAALCTFLLNKEMYLKLRSDVLLPLTQYNRYLALYNKYKYFSGAMDTTSYREAACCHLAKALNDFSNSGSDVLYQPPQTSITSAVLQ

SEQ ID NO: 16486 - protein, 501 aa, Artificial Sequence
  SARS-CoV-2__MT800753.1__non-structural protein 4 (NSP4)
MKIVNNWLKQLIKVTLVFLFVAAIFYLITPVHVMSKHTDFSSEIIGYKAIDGGVTRDIASTDTCFANKHADFDTWFSQRGGSYTNDKACPLIAAVITREVGFVVPGLPGTILRTTNGDFLHFLPRVFSAVGNICYTPSKLIEYTDFATSACVLAAECTIFKDASGKPVPYCYDTNVLEGSVAYESLRPDTRYVLMDGSIIQFPNTYLEGSVRVVTTFDSEYCRHGTCERSEAGVCVSTSGRWVLNNDYYRSLPGVFCGVDAVNLLTNMFTPLIQPIGALDISASIVAGGIVAIVVTCLAYYFMRFRRAFGEYSHVVAFNTLLFLMSFTVLCLTPVYSFLPGVYSVIYLYLTFYLTNDVSFLAHIQWMVMFTPLVPFWITIAYIICISIKHFYWFFSNYLKRRVVFNGVSFSTFEEAALCTFLLNKEMYLKLRSDVLLPLTQYNRYLALYNKYKYFSGAMDTTSYREAACCHLAKALNDFSNSGSDVLYQPPQTSITSAVLQ

SEQ ID NO: 16487 - protein, 501 aa, Artificial Sequence
  SARS-CoV-2__MT791940.1__non-structural protein 4 (NSP4)
MKIVNNWLKQLIKVTLVFLFVAAIFYLITPVHVMSKHTDFSSEIIGYKAIDGGVTRDIASTDTCFANKHADFDTWFSQRGGSYTNDKACPLIAAVITREVGFVVPGLPGTILRTTNGDFLHFLPRVFSAVGNICYTPSKLIEYTDFATSACVLAAECTIFKDASGKPVPYCYDTNVLEGSVAYESLRPDTRYVLMDGSIIQFPNTYLEGSVRVVTTFDSEYCRHGTCERSEAGVCVSTSGRWVLNNDYYRSLPGVFCGVDAVNLLTNMFTPLIQPIGALDISASIVAGGIVAIVVTCLAYYFMRFRRAFGEYSHVVAFNTLLFLMSFTVLCLTPVYSFLPGVYSVIYLYLTFYLTNDVSFLAHIQWMVMLTPLVPFWITIAYIICISTKHFYWFFSNYLKRRVVFNGVSFSTFEEAALCTFLLNKEMYLKLRSDVLLPLTQYNRYLALYNKYKYFSGAMDTTSYREAACCHLAKALNDFSNSGSDVLYQPPQTSITSAVLQ

SEQ ID NO: 16488 - protein, 501 aa, Artificial Sequence
  SARS-CoV-2__MT786815.1__non-structural protein 4 (NSP4)
MKIVNNWLKQLIKVTLVFLFVAAIFYLITPVHVMSKHTDFSSEIIGYKAIDGGVTRDIASTDTCFANKHADFDTWFSQRGGSYTNDKACPLIAAVITREVGFVVPGLPGTILRTTNGDFLHFLPRVFSAVGNICYTPSKLIEYTDFATSACVLAAECTIFKDASGKPVPYCYDTNVLEGSVAYESLRPDTRYVLMDGSIIQFSNTYLEGSVRVVTTFDSEYCRHGTCERSEAGVCVSTSGRWVLNNDYYRSLPGVFCGVDAVNLLTNMFTPLIQPIGALDISASIVAGGIVAIVVTCLAYYFMRFRRAFGEYSHVVAFNTLLFLMSFTVLCLTPVYSFLPGVYSVIYLYLTFYLTNDVSFLAHIQWMVMFTPLVPFWITIAYIICISTKHFYWFFSNYLKRRVVFNGVSFSTFEEAALCTFLLNKEMYLKLRSDVLLPLTQYNRYLALYNKYKYFSGAMDTTSYREAACCHLAKALNDFSNSGSDVLYQPPQTSITSAVLQ

SEQ ID NO: 16489 - protein, 501 aa, Artificial Sequence
  SARS-CoV-2__MT786838.1__non-structural protein 4 (NSP4)
MKIVNNWLKQLIKVTLVFLFVAAIFYLITPVHVMSKHTDFSSEIIGYKAIDGGVTRDIASTDTCFANKHADFDTWFSQRGGSYTNDKACPLIAAVITREVGFVVPGLPGTILRTTNGDFLHFLPRVFSAVGNICYTPSKLIEYTDFATSACVLAAECTIFKDASGKPVPYCYDTNVLEGSVAYESLRPDTRYVLMDGSIIQFPNTYLEGSVRVVTTFDSEYCRHGTCERSEAGVCVSTSGRWVLNNDYYRSLPGVFCGVDAVNLLTNMFTPLIQPIGALDISASIVAGGIVAIVVTCLAYYFMRFRRAFGEYSHVVAFNTLLFLMSFTVLCLTPVYSFLPGVYSVIYLYLTFYLTNDVSFLAHIQWMVMFTPLVPFWITIAYIICISTKHFYWFFSNYLKRRVVFNGVSFSTFEEAALCTFLLNKEMYLKLRSDVLLPLTQYNRYLAFYNKYKYFSGAMDTTSYREAACCHLAKALNDFSNSGSDVLYQPPQISITSAVLQ

SEQ ID NO: 16490 - protein, 501 aa, Artificial Sequence
  SARS-CoV-2__MT775831.1__non-structural protein 4 (NSP4)
MKIVNNWLKQLIKVTLVFLFVAAIFYLITPVHVMSKHTDFSSEIIGYKAIDGGVTRDIASTDTCFANKHADFDTWFSQRGGSYTNDKACPLIAAVITREVGFVVPGLPGTILRTTNGDFLHFLPRVFSAVGNICYTPSKLIEYTDFATSACVLAAECTIFKDASGKPVPYCYDTNVLEGSVAYESLRPDTRYVLMDGSIIQFPNTYLEGSVRVVTTFDSEYCRHGTCERSEAGVCVSTSGRWVLNNDYYRSLPGVFCGVDAVNLLTNMFTPLIQPIGALDISASIVAGGIVAIVVTCLAYYFMRFRRAFGDYSHVVAFNTLLFLMSFTVLCLTPVYSFLPGVYSVIYLYLTFYLTNDVSFLAHIQWMVMFTPLVPFWITIAYIICISTKHFYWFFSNYLKRRVVFNGVSFSTFEEAALCTFLLNKEMYLKLRSDVLLPLTQYNRYLALYNKYKYFSGAMDTTSYREAACCHLAKALNDFSNSGSDVLYQPPQTSITSAVLQ

SEQ ID NO: 16491 - protein, 501 aa, Artificial Sequence
  SARS-CoV-2__MT772215.1__non-structural protein 4 (NSP4)
MKIVNNWLKQLIKVTLVFLFVAAIFYLITPVHVMSKHTDFSSEIIGYKAIDGGVTRDIASTDTCFANKHADFDTWFSQRGGSYTNDKACPLIAAVITREVGFVVPGLPGTILRTTNGDFLHFLPRVFSAVGNICYTPSKLIEYTDFATSACVLAAECTIFKDASGKPVPYCYDTNVLEGSVAYESLRPDTRYVLMDGSIIQFPNTYLEGSVRVVTTFGSEYCRHGTCERSEAGVCVSTSGRWVLNNDYYRSLPGVFCGVDAVNLLTNMFTPLIQPIGALDISASIVAGGIVAIVVTCLAYYFMRFRRAFGEYSHVVAFNTLLFLMSFTVLCLTPVYSFLPGVYSVIYLYLTFYLTNDVSFLAHIQWMVMFTPLVPFWITIAYIICISTKHFYWFFSNYLKRRVVFNGVSFSTFEEAALCTFLLNKEMYLKLRSDVLLPLTQYNRYLALYNKYKYFSGAMDTTSYREAACCHLAKALNDFSNSGSDVLYQPPQTSITSAVLQ

SEQ ID NO: 16492 - protein, 501 aa, Artificial Sequence
  SARS-CoV-2__MT772564.1__non-structural protein 4 (NSP4)
MKIVNNWLKQLIKVTLVFLFVAAIFYLITPVHVMSKHTDFSSEIIGYKAIDGGVTRDIASTDTCFANKHADFDTWFSQRGGSYTNDKACPLIAAVITREVGFVVPGLPGTILRTTNGDFLHFLPRVFSAVGNICYTPSKLIEYTDFATSACVLAAECTIFKDASGKPVPYCYDTNVLEGSVAYESLRPDTRYVLMDGSIIQFPNTYLEGSVRVVTTFDSEYCRHGTCERSEAGVCVSTSGRWVLNNDYYRSLPGVFCGVDAVNLLTNMFTPLIQPIGALDISASIVAGGIVAIVVTCLAYYFMRFRRAFGEYSHVVAFNTLLFLMSFTVLCLTPVYSFLPGVYSVIYLYLTFYLTNDVSFLAHIQWMVMFTPLVPFWITIAYIICIFTKHFYWFFSNYLKRRVVFNGVSFSTFEEAALCTFLLNKEMYLKLRSDVLLPLTQYNRYLALYNKYKYFSGAMDTTSYREAACCHLAKALNDFSNSGSDVLYQPPQTSITSAVLQ

SEQ ID NO: 16493 - protein, 501 aa, Artificial Sequence
  SARS-CoV-2__MT764170.1__non-structural protein 4 (NSP4)
MKIVNNWLKQLIKVTLVFLFVAAIFYLITPVHVMSKHTDFSSEIIGYKAIDGGVTRDIASTDTCFANKHADFDTWFSQRGGSYTNDKACPLIAAVITREVGFVVPGLPGTILRTTNGDFLHFLPRVFSAVGNICYTPSKLIEYTDFATSACVLAAECTIFKDASGKPVPYCYDTNVLEGSVAYESLRPDTRYVLMDGSIIQFPNTYLEGSVRVVTTFDSEYCRHGTCERSEAGVCVSTSGRWVLNNDYYRSLPGVFCGVDAVNLLTNMFTPLIQPIGALDISASIVAGGIVAIVVTCLAYYFMRFRRAFGEYSHVVAFNTLLFLMSFTVLCLTPVYSFLPGVYSVIYLYLTFYLTNDVSFLAHIQWMVMFTPLVPFWITIAYIIFISTKHFYWFFSNYLKRRVVFNGVSFSTFEEAALCTFLLNKEMYLKLRSDVLLPLTQYNRYLALYNKYKYFSGAMDTTSYREAACCHLAKALNDFSNSGSDVLYQPPQTSITSAVLQ

SEQ ID NO: 16494 - protein, 501 aa, Artificial Sequence
  SARS-CoV-2__MT755829.1__non-structural protein 4 (NSP4)
MKIVNNWLKQLIKVTLVFLFVAAIFYLITPVHVMSKHTDFSSEIIGYKAIDGGVTRDIASTDTCFANKHADFDTWFSQRGGSYTNDKACPLIAAVITREVGFVVPGLPGTILRTTNGDFLHFLPRVFSAVGNICYTPSKLIEYTDFATSACVLAAECTIFKDASGKPVPYCYDTNVLEGSVAYESLRPDTRYVLMDGSIIQFPNTYLEGSVRVVTTFDSEYCRHGTCERSEAGVCVSTSGRWVLNNDYYRSLPGVFCGVDAVNLLTNMFTPLIQPIGALDISASIVAGGIVAIVVTCLAYYFMRFRRAFGEYSHVVAFNTLLFLMSFTVLCLTPVYSFLPGVYSVIYLYLTFYLTNDVSFLAHIQWMVMFTPLVPFWITIAYIICISTKHFYWFFSNYLKRRVVFNGVSFSTFEEAALCTFLLNKEMYLKLRSDVLLPFTQYNRYLALYNKYKYFSGAMDTTSYREAACCHLAKALNDFSNSGSDVLYQPPQTSITSAVLQ

SEQ ID NO: 16495 - protein, 501 aa, Artificial Sequence
  SARS-CoV-2__MT755892.1__non-structural protein 4 (NSP4)
MKIVNNWLKQLIKVTLVFLFVAAIFYLITPVHVMSKHTDFSSEIIGYKAIDGGVTRDIASTDTCFANKHADFDTWFSQRGGSYTNDKACPLIAAVITREVGFVVPGLPGTILRTTNGDFLHFLPRVFSAVGNICYTPSKLIEYTDFATSACVLAAECTIFKDASGKPVPYCYDTNVLEGSVAYGSLRPDTRYVLMDGSIIQFPNTYLEGSVRVVTTFDSEYCRHGTCERSEAGVCVSTSGRWVLNNDYYRSLPGVFCGVDAVNLLTNMFTPLIQPIGALDISASIVAGGIVAIVVTCLAYYFMRFRRAFGEYSHVVAFNTLLFLMSFTVLCLTPVYSFLPGVYSVIYLYLTFYLTNDVSFLAHIQWMVMFTPLVPFWITIAYIICISTKHFYWFFSNYLKRRVVFNGVSFSTFEEAALCTFLLNKEMYLKLRSDVLLPLTQYNRYLALYNKYKYFSGAMDTTSYREAACCHLAKALNDFSNSGSDVLYQPPQTSITSAVLQ

SEQ ID NO: 16496 - protein, 501 aa, Artificial Sequence
  SARS-CoV-2__MT745605.1__non-structural protein 4 (NSP4)
MKIVNNWLKQLIKVTLVFLFVAAIFYLITPVHVMSKHTDFSSEIIGYKAIDGGVTRDIASTDTCFANKHADFDTWFSQRGGSYTNDKACPLIAAVITREVGFVVPGLPGTILRTTNGDFLHFLPRVFSAVGNICYTPSKLIEYTDFATSACVLAAECTIFKDASGKPVPYCYDTNVLEGSVAYESLRPDTRYVLMDGSIIQFPNIYLEGSVRVVTTFDSEYCRHGTCERSEAGVCVSTSGRWVLNNDYYRSLPGVFCGVDAVNLLTNMFTPLIQPIGALDISASIVAGGIVAIVVTCLAYYFMRFRRAFGEYSHVVAFNTLLFLMSFTVLCLTPVYSFLPGVYSVIYLYLTFYLTNDVSFLAHIQWMVMFTPLVPFWITIAYIICISTKHFYWFFSNYLKRRVVFNGVSFSTFEEAALCTFLLNKEMYLKLRSDVLLPLTQYNRYLALYNKYKYFSGAMDTTSYREAACCHLAKALNDFSNSGSDVLYQPPQTSITSAVLQ

SEQ ID NO: 16497 - protein, 501 aa, Artificial Sequence
  SARS-CoV-2__MT745655.1__non-structural protein 4 (NSP4)
MKIVNNWLKQLIKVTLVFLFVAAIFYLITPVHVMSKHTDFSSEIIGYKAIDGGVTRDIASTDTCFANKHADFDTWFSQRGGSYTNDKACPLIAAVITREVGFVVPGLPGTILRTTNGDFLHFLPRVFSAVGNICYTPSKLIEYTDFATSACVLAAECTIFKDASGKPVPYCYDTNVLEGSVAYESLRPDTRYVLMDGSIIQFPNTYLEGSVRVVTTFDSEYCRHGTCERSEAGVCVSTSGRWVLNNDYYRSLPGVFCGVDAVNLLTNMFTPLIQPIGALDISASIVAGGIVAIVVTCLAYYFMRFRRAFGEYSHVVAFNTLLFLMSFTVLCLTPVYSFLPGVYSVIYLYLTFYLTNDVSFLAHSQWMVMFTPLVPFWITIAYIICISTKHFYWFFSNYLKRRVVFNGVSFSTFEEAALCTFLLNKEMYLKLRSDVLLPLTQYNRYLALYNKYKYFSGAMDTTSYREAACCHLAKALNDFSNSGSDVLYQPPQTSITSAVLQ

SEQ ID NO: 16498 - protein, 501 aa, Artificial Sequence
  SARS-CoV-2__MT745677.1__non-structural protein 4 (NSP4)
MKIVNNWLKQLIKVTLVFLFVAAIFYLITPVHVMSKHTDFSSEIIGYKAIDGGVTRDIASIDTCFANKHADFDTWFSQRGGSYTNDKACPLIAAVITREVGFVVPGLPGTILRTTNGDFLHFLPRVFSAVGNICYTPSKLIEYTDFATSACVLAAECTIFKDASGKPVPYCYDTNVLEGSVAYESLRPDTRYVLMDGSIIQFPNTYLEGSVRVVTTFDSEYCRHGTCERSEAGVCVSTSGRWVLNNDYYRSLPGVFCGVDAVNLLTNMFTPLIQPIGALDISASIVAGGIVAIVVTCLAYYFMRFRRAFGEYSHVVAFNTLLFLMSFTVLCLTPVYSFLPGVYSVIYLYLTFYLTNDVSFLAHIQWMVMFTPLVPFWITIAYIICISTKHFYWFFSNYLKRRVVFNGVSFSTFEEAALCTFLLNKEMYLKLRSDVLLPLTQYNRYLALYNKYKYFSGAMDTTSYREAACCHLAKALNDFSNSGSDVLYQPPQTSITSAVLQ

SEQ ID NO: 16499 - protein, 501 aa, Artificial Sequence
  SARS-CoV-2__MT740431.1__non-structural protein 4 (NSP4)
MKIVNNWLKQLIKVTLVFLFVAAIFYLITPVHVMSKHTDFSSEIIGYKAIDGGVTRDIASTDTCFANKHVDFDTWFSQRGGSYTNDKACPLIAAVITREVGFVVPGLPGTILRTTNGDFLHFLPRVFSAVGNICYTPSKLIEYTDFATSACVLAAECTIFKDASGKPVPYCYDTNVLEGSVAYESLRPDTRYVLMDGSIIQFPNTYLEGSVRVVTTFDSEYCRHGTCERSEAGVCVSTSGRWVLNNDYYRSLPGVFCGVDAVNLLTNMFTPLIQPIGALDISASIVAGGIVAIVVTCLAYYFMRFRRAFGEYSHVVAFNTLLFLMSFTVLCLTPVYSFLPGVYSVIYLYLTFYLTNDVSFLAHIQWMVMFTPLVPFWITIAYIICISTKHFYWFFSNYLKRRVVFNGVSFSTFEEAALCTFLLNKEMYLKLRSDVLLPLTQYNRYLALYNKYKYFSGAMDTTSYREAACCHLAKALNDFSNSGSDVLYQPPQTSITSAVLQ

SEQ ID NO: 16500 - protein, 501 aa, Artificial Sequence
  SARS-CoV-2__MT731936.1__non-structural protein 4 (NSP4)
MKIVNNWLKQLIKVTLVFLFVAAIFYLITPVHVMSKHTDFSSEIIGYKAIDGGVTRDIASTDTCFANKHADFDTWFSQRGGSYTNDKACPLIAAVITREVGFVVPGLPGTILRTTNGDFLHFLPRVFSAVGNICYTPSKLIEYTDFATSACVLAAECTIFKDASGKSVPYCYDTNVLEGSVAYESLRPDTRYVLMDGSIIQFPNTYLEGSVRVVTTFDSEYCRHGTCERSEAGVCVSTSGRWVLNNDYYRSLPGVFCGVDAVNLLTNMFTPLIQPIGALDISASIVAGGIVAIVVTCLAYYFMRFRRAFGEYSHVVAFNTLLFLMSFTVLCLTPVYSFLPGVYSVIYLYLTFYLTNDVSFLAHIQWMVMFTPLVPFWITIAYIICISTKHFYWFFSNYLKRRVVFNGVSFSTFEEAALCTFLLNKGMYLKLRSDVLLPLTQYNRYLALYNKYKYFSGAMDTTSYREAACCHLAKALNDFSNSGSDVLYQPPQTSITSAVLQ

SEQ ID NO: 16501 - protein, 501 aa, Artificial Sequence
  SARS-CoV-2__MT706149.1__non-structural protein 4 (NSP4)
MKIVNNWLKQLIKVTLVFLFVAAIFYLITPVHVMSKHTDFSSEIIGYKAIDGGVTRDIASTDTCFANKHADFDTWFSQRGGSYTNDKACPLIAAVITREVGFVVPGLPGTILRTTNGDFLHFLPRVFSAVGNICYTPSKLIEYTDFATSACVLAAECTIFKDASGKPVPYCYDTNVLEGSVAYESLRSDTRYVLMDGSIIQFPNTYLEGSVRVVTTFDSEYCRHGTCERSEAGVCVSTSGRWVLNNDYYRSLPGVFCGVDAVNLLTNMFTPLIQPIGALDISASIVAGGIVAIVVTCLAYYFMRFRRAFGEYSHVVAFNTLLFLMSFTVLCLTPVYSFLPGVYSVIYLYLTFYLTNDVSFLAHIQWMVMFTPLVPFWITIAYIICISTKHFYWFFSNYLKRRVVFNGVSFSTFEEAALCTFLLNKEMYLKLRSDVLLPLTQYNRYLALYNKYKYFSGAMDTTSYREAACCHLAKALNDFSNSGSDVLYQPPQTSITSAVLQ

SEQ ID NO: 16502 - protein, 501 aa, Artificial Sequence
  SARS-CoV-2__MT706230.1__non-structural protein 4 (NSP4)
MKIVNNWLKQLIKVTLVFLFVAAIFYLITPVHVMSKHTDFSSEIIGYKAIDGGVTRDIASTDTCFANKHADFDTWFSQRGGSYTNDKACPLIAAVITREVGFVVPGLPGTILRTTNGDFLHFLPRVFSAVGNICYTPSKLIEYTDFATSACVLAAECTIFKDASGKPLPYCYDTNVLEGSVAYESLRPDTRYVLMDGSIIQFPNTYLEGSVRVVTTFDSEYCRHGTCERSEAGVCVSTSGRWVLNNDYYRSLPGVFCGVDAVNLLTNMFTPLIQPIGALDISASIVAGGIVAIVVTCLAYYFMRFRRAFGEYSHVVAFNTLLFLMSFTVLCLTPVYSFLPGVYSVIYLYLTFYLTNDVSFLAHIQWMVMFTPLVPFWITIAYIICISTKHFYWFFSNYLKRRVVFNGVSFSTFEEAALCTFLLNKEMYLKLRSDVLLPLTQYNRYLALYNKYKYFSGAMDTTSYREAACCHLAKALNDFSNSGSDVLYQPPQTSITSAVLQ

SEQ ID NO: 16503 - protein, 501 aa, Artificial Sequence
  SARS-CoV-2__MT706254.1__non-structural protein 4 (NSP4)
MKIVNNWLKQLIKVTLVFLFVAAIFYLITPVHVMSKHTDFSSEIIGYKAIDGGVTRDIASTDTCFANKHADFDTWFSQRGGSYTNDKACPLIAAVITREVGFVVPGLPGTILRTTNGDFLHFLPRVFSAVGNICYTPSKLIEYTDFATSACVLAAECTIFKDASGKPVPYCYDTNVLEGSVAYESLRPDTRYVLMDGSIIQFPNTYLEGSVRVVTTFDSEYCRHGTCERSEAGVCVSTSGRWVLNNDYYRSLPGVFCGVDAVNLLTNMFTPLIQPIGALDISASIVAGGIVAIVVTCLAYYFMRFRRAFGEYSHVVAFNTLLFLMSFTVLCLTPVYSFLPGVYSVIYLYLTFYLTNDVSFLAHIQWMVMFTPLVPFWMTIAYIICISTKHFYWFFSNYLKRRVVFNGVSFSTFEEAALCTFLLNKEMYLKLRSDVLLPLTQYNRYLALYNKYKYFSGAMDTTSYREAACCHLAKALNDFSNSGSDVLYQPPQTSITSAVLQ

SEQ ID NO: 16504 - protein, 501 aa, Artificial Sequence
  SARS-CoV-2__MT706307.1__non-structural protein 4 (NSP4)
MKIVNNWLKQLIKVTLVFLFVAAIFYLITPVHVMSKHTDFSSEIIGYKAIDGGVTRDIASTDTCFANKHADFDTWFSQRGGSYTNDKACPLIAAVITREVGFVVPGLPGTILRTTNGDFLHFLPRVFSAVGNICYTPSKLIEYTDFATSACVLAAECTIFKDASGKPVPYCYDTNVLEGSVAYESLRPDTRYVLMDGSIIQFPNTYLEGSVRVVTTFDSEYCRHGTCERSEAGVCVSTSGRWVLNNDYYRSLPGVFCGVDAVNLLTNMFTPLIQPIGALDISASIVAGGIVAIVVTCLAYYFMRFRRAFGEYSHVVAFNILLFLMSFTVLCLTPVYSFLPGVYSVIYLYLTFYLTNDVSFLAHIQWMVMFTPLVPFWITIAYIICISTKHFYWFFSNYLKRRVVFNGVSFSTFEEAALCTFLLNKEMYLKLRSDVLLPLTQYNRYLALYNKYKYFSGAMDTTSYREAACCHLAKALNDFSNSGSDVLYQPPQTSITSAVLQ

SEQ ID NO: 16505 - protein, 501 aa, Artificial Sequence
  SARS-CoV-2__MT706334.1__non-structural protein 4 (NSP4)
MKIVNNWLKQLIKVTLVFLFVAAIFYLITPVHVMSKHTDFSSEIIGYKAIDGGVTRDIASTDTCFANKHADFDTWFSQRGGSYTNDKACPLIAAVITREVGFVVPGLPGTILRTTNGDFLHFLPRVFSAVGNICYTPSKLIEYTDFATSACVLAAECTIFKDASGKPVPYCYDTNVLEGSVAYESLRPDTRYVLMDGSIIQFPNTYLEGSVRVVTTFDSEYCRHGTCERSEAGVCVSTSGRWVLNNDYYRSLPGVFCGVDAVNLLTNMFTPLIQPIGALDISASIVAGGIVAIVVTCLAYYFMRFRRAFGEYSHVVAFNTLLFLMSFTVLCLTPVYSFLPGVYSVIYLYLTFYLTNDVSFLAHIQWMVMFTPLVPFWITIAYIICISTKHFYWFFSNYLKRRVVFNGVSFSTFEEAALCTFLLNKEMYLKLRGDVLLPLTQYNRYLALYNKYKYFSGAMDTTSYREAACCHLAKALNDFSNSGSDVLYQPPQTSITSAVLQ

SEQ ID NO: 16506 - protein, 501 aa, Artificial Sequence
  SARS-CoV-2__MT706437.1__non-structural protein 4 (NSP4)
MKIVNNWLKQLIKVTLVFLFVAAIFYLITPVHVMSKHTDFSSEIIGYKAIDGGVTRDIASTDTCFANKHADFDTWFSQRGGSYTNDKACPLIAAVITREVGFVVPGLPGTILRTTNGDFLHFLPRVFSAVGNICYTPSKLIEYTDFATSACVLAAECTIFKDASGKPVPYCYDTNVLEGSVAYESLRPDTRYVLMDGSIIQFPNTYLEGSVRVVTTFDSEYCRHGTCERSEAGVCVSTSGRWVLNNDYYRSLPGVFCGVDAVNLLTNMFTPLIQPIGALDISASIVAGGIVAIVVTCLAYYFMRFRRAFGEYSHVVAFNTLLFLMSFTVLCLTPVYSFLPGVYSVIYLYLTFYLTNDVSFLAHIQWMVMFTPLVPFWVTIAYIICISTKHFYWFFSNYLKRRVVFNGVSFSTFEEAALCTFLLNKEMYLKLRSDVLLPLTQYNRYLALYNKYKYFSGAMDTTSYREAACCHLAKALNDFSNSGSDVLYQPPQTSITSAVLQ

SEQ ID NO: 16507 - protein, 501 aa, Artificial Sequence
  SARS-CoV-2__MT704022.1__non-structural protein 4 (NSP4)
MKIVNNWLKQLIKVTLVFLFVAAIFYLITPVHVMSKHTDFSSEIIGYKAIDGGVTRDIASTDTCFANKHADFDTWFSQRGGSYTNDKACPLIAAVITREVGFVVPGLPGTILRTTNGDFLHFLPRVFSAVGNICYTPSKLIEYTDFATSACVLAAECTIFKDASGKPVPYCYDTNVLEGSVAYESLRPDTRYVLMDGSIIQFPNTYLEGSVRVVTTFDSEYCRHGTCERSEAGVCVSTSGRWVLNNDYYRSLPGVFCGVDAVNLLTNMFTPLIQPIGALDISASIVAGGIVAIIVTCLAYYFMRFRRAFGEYSHVVAFNTLLFLMSFTVLCLTPVYSFLPGVYSVIYLYLTFYLTNDVSFLAHIQWMVMFTPLVPFWITIAYIICISTKHFYWFFSNYLKRRVVFNGVSFSTFEEAALCTFLLNKEMYLKLRSDVLLPLTQYNRYLALYNKYKYFSGAMDTTSYREAACCHLAKALNDFSNSGSDVLYQPPQTSITSAVLQ

SEQ ID NO: 16508 - protein, 501 aa, Artificial Sequence
  SARS-CoV-2__MT704064.1__non-structural protein 4 (NSP4)
MKIVNNWLKQLIKVTLVFLFVAAIFYLITPVHVMSKHTDFSSEIIGYKAIDGGVTRDIASTDTCFANKHADFDTWFSQRGGSYTNDKACPLIAAVITREVGFVVPGLPGTILRTTNGDFLHFLPRVFSAVGNICYTPSKLIEYTDFATSACVLAAECTIFKDASGKPVPYCYDTNVLEGSVAYESLRPDTRYVLMDGSIIQFPNTYLEGSVRVVTTFDSEYCRHGTCERSEAGVCVSTSGRWVLNNDFYRSLPGVFCGVDAVNLLTNMFTPLIQPIGALDISASIVAGGIVAIVVTCLAYYFMRFRRAFGEYSHVVAFNTLLFLMSFTVLCLTPVYSFLPGVYSVIYLYLTFYLTNDVSFLAHIQWMVMFTPLVPFWITIAYIICISTKHFYWFFSNYLKRRVVFNGVSFSTFEEAALCTFLLNKEMYLKLRSDVLLPLTQYNRYLALYNKYKYFSGAMDTTSYREAACCHLAKALNDFSNSGSDVLYQPPQTSITSAVLQ

SEQ ID NO: 16509 - protein, 501 aa, Artificial Sequence
  SARS-CoV-2__MT704121.1__non-structural protein 4 (NSP4)
MKIVNNWLKQLIKVTLVFLFVAAIFYLITPVHVMSKHTDFSSEIIGYKAIDGGVTRDIASTDTCFANKHADFDTWFSQRGGSYTNDKACPLIAAVITREVGFVVPGLPGTILRTTNGDFLHFLPRVFSAVGNICYTPSKLIEYTDFATSACVLAAECTIFKDASGKPVPYCYDTNVLEGSVAYESLRPDTRYVLMDGSIIQFPNTYFEGSVRVVTTFDSEYCRHGTCERSEAGVCVSTSGRWVLNNDYYRSLPGVFCGVDAVNLLTNMFTPLIQPIGALDISASIVAGGIVAIVVTCLAYYFMRFRRAFGEYSHVVAFNTLLFLMSFTVLCLTPVYSFLPGVYSVIYLYLTFYLTNDVSFLAHIQWMVMFTPLVPFWITIAYIICISTKHFYWFFSNYLKRRVVFNGVSFSTFEEAALCTFLLNKEMYLKLRSDVLLPLTQYNRYLALYNKYKYFSGAMDTTSYREAACCHLAKALNDFSNSGSDVLYQPPQTSITSAVLQ

SEQ ID NO: 16510 - protein, 501 aa, Artificial Sequence
  SARS-CoV-2__MT704136.1__non-structural protein 4 (NSP4)
MKIVNNWLKQLIKVTLVFLFVAAIFYLITPVHVMSKHTDFSSEIIGYKAIDGGVTRDIASTDTCFANKHADFDTWFSQRGGSYTNDKACPLIAAVITREVGFVVPGLPGTILRTTNGDFLHFLPRVFSAVGNICYTPSKLIEYTDFATSACVLAAECTIFKDASGKPVPYCYDTNVLEGSVAYESLRPDTRYVLMDGSIIQFPNTYLEGSVRVVTTFDSEYCRHGTCERSEAGVCVSTSGRWVLNNDYYRSLPGVFCGVDAVNLLTNMFTPLIQPIGALDISASIVAGGIVAIVVTCLAYYFMRFRRAFGEYSHVVAFNTLLFFMSFTVLCLTPVYSFLPGVYSVIYLYLTFYLTNDVSFLAHIQWMVMFTPLVPFWITIAYIICISTKHFYWFFSNYLKRRVVFNGVSFSTFEEAALCTFLLNKEMYLKLRSDVLLPLTQYNRYLALYNKYKYFSGAMDTTSYREAACCHLAKALNDFSNSGSDVLYQPPQTSITSAVLQ

SEQ ID NO: 16511 - protein, 501 aa, Artificial Sequence
  SARS-CoV-2__MT683386.1__non-structural protein 4 (NSP4)
MKIVNNWLKQLIKVTLVFLFVAAIFYLITPVHVMSKHTDFSSEIIGYKAIDGGVTRDIASTDTCFANKHADFDTWFSQRGGSYTNDKACPLIAAVITREVGFVVPGLPGTILRTTNGDFLHFLPRVFSAVGNICYTPSKLIEYTDFATSACVLAAECTIFKDASGKPVPYCYDTNVLEGSVAYESLRPDTRYVLMDGSIIQFPNTYLEGSVRVVTTFDSEYCRHGTCERSEAGVCVSTSGRWVLNNDYYRSLPGVFCGVDAVNLLTNMFTPLIQPIGALDISASIVAGGIVAILVTCLAYYFMRFRRAFGEYSHVVAFNTLLFLMSFTVLCLTPVYSFLPGVYSVIYLYLTFYLTNDVSFLAHIQWMVMFTPLVPFWITIAYIICISTKHFYWFFSNYLKRRVVFNGVSFSTFEEAALCTFLLNKEMYLKLRSDVLLPLTQYNRYLALYNKYKYFSGAMDTTSYREAACCHLAKALNDFSNSGSDVLYQPPQTSITSAVLQ

SEQ ID NO: 16512 - protein, 501 aa, Artificial Sequence
  SARS-CoV-2__MT627391.1__non-structural protein 4 (NSP4)
MKIVNNWLKQLIKVTLVFLFVAAIFYLITPVHVMSKHTDFSSEIIGYKAIDGGVTRDIASTDTCFANKHADFDTWFSQRGGSYTNDKACPLIAAVITREVGFVVPGLPGTILRTTNGDFLHFLPRVFSAVGNICYTPSKLIEYTDFATSACVLAAECTIFKDASGKPVPYCYDTNVLEGSVAYESLRPDTRYVLMDGSIIQFPNTYLEGSVRVVTTFDSEYCRHGTCERSEAGVCVSTSGRWVLNNDYYRSLPGVFCGVDAVNLLTNMFTPLIQPIGALDISASIVAGGIVAIVVTCLAYYFMRFRRAFGAYSHVVAFNTLLFLMSFTVLCLTPVYSFLPGVYSVIYLYLTFYLTNDVSFLAHIQWMVMFTPLVPFWITIAYIICISTKHFYWFFSNYLKRRVVFNGVSFSTFEEAALCTFLLNKEMYLKLRSDVLLPLTQYNRYLALYNKYKYFSGAMDTTSYREAACCHLAKALNDFSNSGSDVLYQPPQTSITSAVLQ

SEQ ID NO: 16513 - protein, 501 aa, Artificial Sequence
  SARS-CoV-2__MT678839.1__non-structural protein 4 (NSP4)
MKIVNNWLKQLIKVTLVFLFVAAIFYLITPVHVMSKHTDFSSEIIGYKAIDGGVTRDIASTDTCFANKHADFDTWFSQRGGSYTNDKACPLIAAVITREVGFVVPGLPSTILRTTNGDFLHFLPRVFSAVGNICYTPSKLIEYTDFATSACVLAAECTIFKDASGKPVPYCYDTNVLEGSVAYESLRPDTRYVLMDGSIIQFPNTYLEGPVRVVTTFDSEYCGHGTCERSEAGVCVSTSGRWVLNNDYYRSLPGVFCGVDAVNLLTNMFTPLIQPIGALDISASIVAGGIVAIVVTCLAYYFMRFRRAFGEYSHVVAFNTLLFLMSFTVLCLTPVYSFLPGVYSVIYLYLTFYLTNDVSFLAHIQWMVMFTPLVPFWITIAYIICISTKHFYWFFSNYLKRRVVFNGVSFSTFEEAALCTFLLNKEMYLKLRSDVLLPLTQYNRYLALYNKYKYFSGAMDTTSYREAACCHLAKALNDFSNSGSDVLYQPPQTSITSAVLQ

SEQ ID NO: 16514 - protein, 501 aa, Artificial Sequence
  SARS-CoV-2__MT611440.1__non-structural protein 4 (NSP4)
MKIVNNWLKQLIKVTLVFLFVAAIFYLITPVHVMSKHTDFSSEIIGYKAIDGGVTRDIASTDTCFANKHADFDTWFSQRGGSYTNDKACPLIAAVITREVGFVVPGLPGTILRTTNGDFLHFLPRVFSAVGNICYTPSKLIEYTDFATSACVLAAECTIFKDASGKPVPYCYDTNVLEGSVAYESLRPDTRYVLMDGSIIQFPNTYLEGSVRVVTTFDSEYCRHGTCERSEAGVCVSTSGRWVLNNDYYRSLPGVFCGVDAVNLLTNMFTPLIQPIGALDISASIVAGGIVAIVVTCLAYYFMRFRRAFGEYSHVVAFNTLLFLMSFTVLCLTPVYSFLPGVYSVIYLYLTFYLTNDVSFLAHIQWMVMFTPLVPFWITIAYIICISTKHFYWFFSNYLKRRVVFNGVSFSTFEEAALCTFLLNKEMYLKLRSDVLLPLTQYNRYLALYNKYKYFSGAMDTTSYREAACCHLAKALNDFSNSGSDVLYQPPQTSITSAILQ

SEQ ID NO: 16515 - protein, 501 aa, Artificial Sequence
  SARS-CoV-2__MT648830.1__non-structural protein 4 (NSP4)
MKIVNNWLKQLIKVTLVFLFVAAIFYLITPVHVMSKHTDFSSEIIGYKAIDGGVTRDIASTDTCFANKHADFDTWFSQRGGSYTNDKACPLIAAVITREVGFVVPGLPGTILRTTNGDFLHFLPRVFSAVGNICYTPSKLIEYTDFATSACVLAAECTIFKDASGKPVPYCYDTNVLEGSVAYESLRPDTRYVLMDGSIIQFPNTYLEGSVRVVTTFDSEYCRHGTCERSEAGVCVSTSGRWVLNNDYYRSLPGVFCGVDAVNLLTNMFTPLIQPIGALDISASIVAGGIVAIVVTCLAYYFMRFRRAFGEYSHVVAFNTLLFLMSFTVLCLTPVYSFLPGVYSVIYLYLTFYLTNDVSFLAHIQWMVMFTPLVPFWITIAYIICISTKHFYWFFSNYLKRRVVFNGVSFSTFEEAALCTFLLNKEMYLKLRSDVLLPLTQYNRYLALYNKYKYFSGAMDTTSYREAACCHLSKALNDFSNSGSDVLYQPPQTSITSAVLQ

SEQ ID NO: 16516 - protein, 501 aa, Artificial Sequence
  SARS-CoV-2__MT641509.1__non-structural protein 4 (NSP4)
MKIVNNWLKQLIKVTLVFLFVAAIFYLITPVHVMSKHTDFSSEIIGYKAIDGGVTRDIASTDTCFANKHADFDTWFSQRGGSYTNDKACPLIAAVITREVGFVVPGLPGTILRTTNGDFLHFLPRVFSAVGNICYTPSKLIEYTDFATSACVLAAECTIFKDASGKPVPYCYDTNVLEGSVAYESLRPDTRYVLMDGSIIQFPNTYLEGSVRVVTTFDSEYCRHGTCERSEAGVCVSTSGRWVLNNDYYRSLPGVFCGVDAVNLLINMFTPLIQPIGALDISASIVAGGIVAIVVTCLAYYFMRFRRAFGEYSHVVAFNTLLFLMSFTVLCLTPVYSFLPGVYSVIYLYLTFYLTNDVSFLAHIQWMVMFTPLVPFWITIAYIICISTKHFYWFFSNYLKRRVVFNGVSFSTFEEAALCTFLLNKEMYLKLRSDVLLPLTQYNRYLALYNKYKYFSGAMDTTSYREAACCHLAKALNDFSNSGSDVLYQPPQTSITSAVLQ

SEQ ID NO: 16517 - protein, 501 aa, Artificial Sequence
  SARS-CoV-2__MT641646.1__non-structural protein 4 (NSP4)
MKIVNNWLKQLIKVTLVFLFVAAIFYLITPVHVMSKHTDFSSEIIGYKAIDGGVTRDIASTDTCFANKHADFDTWFSQRGGSYTNDKACPLIAAVITREVGFVVPGLPGTILRTTNGDFLHFLPRVFSAVGNICYTPSKLIEYTDFATSACVLAAECTIFKDASGKPVPYCYDTNVLEGSVAYESLRPDTRYVLMDGSIIQFPNTYLEGSVRVVTTFDSEYCRHGTCERSEAGVCVSTSGRWVLNNDYYRSLPGVFCGVDVVNLLTNMFTPLIQPIGALDISASIVAGGIVAIVVTCLAYYFMRFRRAFGEYSHVVAFNTLLFLMSFTVLCLTPVYSFLPGVYSVIYLYLTFYLTNDVSFLAHIQWMVMFTPLVPFWITIAYIICISTKHFYWFFSNYLKRRVVFNGVSFSTFEEAALCTFLLNKEMYLKLRSDVLLPLTQYNRYLALYNKYKYFSGAMDTTSYREAACCHLAKALNDFSNSGSDVLYQPPQTSITSAVLQ

SEQ ID NO: 16518 - protein, 501 aa, Artificial Sequence
  SARS-CoV-2__MT641677.1__non-structural protein 4 (NSP4)
MKIVNNWLKQLIKVTLVFLFVAAIFYLITPVHVMSKHTDFSSEIIGYKAIDGGVTRDIASTDTCFANKHADFDTWFSQRGGSYTNDKACPLIAAVITREVGFVVPGLPGTILRTTNGDFLHFLPRVFSAVGNICYTPSKLIEYTDFATSACVLAAECTIFKDASGKPVPYCYDTNVLEGSVAYESLRPDTRYVLMDGSIIQFPNTYLEGSVRVVTTFDSEYCRHGTCERSEAGVCVSTSGRWVLNNDYYRSLPGVFCGVDAVNLLTNMFTPLIQPIGALDISASIVAGGIVAIVVTCLAYYFMRFRRAFGEYSHVVAFNTLLFLMSFTVLCLTPVYSFLPGVYSVIYLYLTFYLTNDVSFLAHIQWMVMFTPLVPFWITIAYIICISTKHFYWFFSNYLKRRVVFNGVSFSTFEEAALCTFLLNKEMYLKLRSDVLLPLTQYNRYLALYNKYKYFSGAMDTTSYREAACCHLTKALNDFSNSGSDVLYQPPQTSITSAVLQ

SEQ ID NO: 16519 - protein, 501 aa, Artificial Sequence
  SARS-CoV-2__MT641679.1__non-structural protein 4 (NSP4)
MKIVNNWLKQLIKVTLVFLFVAAIFYLITPVHVMSKHTDFSSEIIGYKAIDGGVTRDIASTDTCFANKHADFDTWFSQRVGSYTNDKACPLIAAVITREVGFVVPGLPGTILRTTNGDFLHFLPRVFSAVGNICYTPSKLIEYTDFATSACVLAAECTIFKDASGKPVPYCYDTNVLEGSVAYESLRPDTRYVLMDGSIIQFPNTYLEGSVRVVTTFDSEYCRHGTCERSEAGVCVSTSGRWVLNNDYYRSLPGVFCGVDAVNLLTNMFTPLIQPIGALDISASIVAGGIVAIVVTCLAYYFMRFRRAFGEYSHVVAFNTLLFLMSFTVLCLTPVYSFLPGVYSVIYLYLTFYLTNDVSFLAHIQWMVMFTPLVPFWITIAYIICISTKHFYWFFSNYLKRRVVFNGVSFSTFEEAALCTFLLNKEMYLKLRSDVLLPLTQYNRYLALYNKYKYFSGAMDTTSYREAACCHLAKALNDFSNSGSDVLYQPPQTSITSAVLQ

SEQ ID NO: 16520 - protein, 501 aa, Artificial Sequence
  SARS-CoV-2__MT641710.1__non-structural protein 4 (NSP4)
MKIVNNWLKQLIKVTLVFLFVAAIFYLITPVHVMSKHTDFSSEIIGYKAIDGGVTRDIASTDTCFANKHADFDTWFSQRGGSYTNDKACPLIAAVITREVGFVVPGLPGTILRTTNGDFLHFLPRVFSAVGNICYTPSKLIEYTDFATSACVLAAECTIFKDASGKPVPYCYDTNVLEGSVAYESLRPDTRYVLMDGSIIQFPNTYLEGSVRVVTTFDSEYCRHGTCERSEAGVCVSTSGRWVLNNDYYRSLPGVFCGVDAVNLLTNMFTPLIQPIGALDISASIVAGGIVAIVVTCLAYYFMRFRRAFGEYSYVVAFNTLLFLMSFTVLCLTPVYSFLPGVYSVIYLYLTFYLTNDVSFLAHIQWMVMFTPLVPFWITIAYIICISTKHFYWFFSNYLKRRVVFNGVSFSTFEEAALCTFLLNKEMYLKLRSDVLLPLTQYNRYLALYNKYKYFSGAMDTTSYREAACCHLAKALNDFSNSGSDVLYQPPQTSITSAVLQ

SEQ ID NO: 16521 - protein, 501 aa, Artificial Sequence
  SARS-CoV-2__MT642243.1__non-structural protein 4 (NSP4)
MKIVNNWLKQLIKVILVFLFVAAIFYLITPVHVMSKHTDFSSEIIGYKAIDGGVTRDIASTDTCFANKHADFDTWFSQRGGSYTNDKACPLIAAVITREVGFVVPGLPGTILRTTNGDFLHFLPRVFSAVGNICYTPSKLIEYTDFATSACVLAAECTIFKDASGKPVPYCYDTNVLEGSVAYESLRPDTRYVLMDGSIIQFPNTYLEGSVRVVTTFDSEYCRHGTCERSEAGVCVSTSGRWVLNNDYYRSLPGVFCGVDAVNLLTNMFTPLIQPIGALDISASIVAGGIVAIVVTCLAYYFMRFRRAFGEYSHVVAFNTLLFLMSFTVLCLTPVYSFLPGVYSVIYLYLTFYLTNDVSFLAHIQWMVMFTPLVPFWITIAYIICISTKHFYWFFSNYLKRRVVFNGVSFSTFEEAALCTFLLNKEMYLKLRSDVLLPLTQYNRYLALYNKYKYFSGAMDTTSYREAACCHLAKALNDFSNSGSDVLYQPPQTSITSAVLQ

SEQ ID NO: 16522 - protein, 501 aa, Artificial Sequence
  SARS-CoV-2__MT642326.1__non-structural protein 4 (NSP4)
MKIVNNWLKQLIKVTLVFLFVAAIFYLITPVHVMSKHTDFSSEIIGYKAIDGGVTRDIASTDTCFANKHADFDTWFSQRGGSYTNDKACPLIAAVITREVGFVVPGLPGTILRTTNGDFLHFLPRVFSAVGNICYTPSKLIEYTDFATSACVLAAECTIFKDASGKPVPYCYDTNVLEGSVAYESLRPDTRYVLMDGSIIQFPNTYLEGSVRVVTTFDSEYCRHGTCERSEAGVCVSTSGRWVFNNDYYRSLPGVFCGVDAVNLLTNMFTPLIQPIGALDISASIVAGGIVAIVVTCLAYYFMRFRRAFGEYSHVVAFNTLLFLMSFTVLCLTPVYSFLPGVYSVIYLYLTFYLTNDVSFLAHIQWMVMFTPLVPFWITIAYIICISTKHFYWFFSNYLKRRVVFNGVSFSTFEEAALCTFLLNKEMYLKLRSDVLLPLTQYNRYLALYNKYKYFSGAMDTTSYREAACCHLAKALNDFSNSGSDVLYQPPQTSITSAVLQ

SEQ ID NO: 16523 - protein, 501 aa, Artificial Sequence
  SARS-CoV-2__MT642360.1__non-structural protein 4 (NSP4)
MKIVNNWLKQLIKVTLVFLFVAAIFYLITPVHVMSKHTDFSSEIIGYKAIDGGVTRDIASTDTCFANKHADFDTWFSQRGGSYTNDKACPLIAAVITREVGFVVPGLPGTILRTTNGDFLHFLPRVFSAVGNICYTPSKLIEYIDFATSACVLAAECTIFKDASGKPVPYCYDTNVLEGSVAYESLRPDTRYVLMDGSIIQFPNTYLEGSVRVVTTFDSEYCRHGTCERSEAGVCVSTSGRWVLNNDYYRSLPGVFCGVDAVNLLTNMFTPLIQPIGALDISASIVAGGIVAIVVTCLAYYFMRFRRAFGEYSHVVAFNTLLFLMSFTVLCLTPVYSFLPGVYSVIYLYLTFYLTNDVSFLAHIQWMVMFTPLVPFWITIAYIICISTKHFYWFFSNYLKRRVVFNGVSFSTFEEAALCTFLLNKEMYLKLRSDVLLPLTQYNRYLALYNKYKYFSGAMDTTSYREAACCHLAKALNDFSNSGSDVLYQPPQTSITSAVLQ

SEQ ID NO: 16524 - protein, 501 aa, Artificial Sequence
  SARS-CoV-2__MT627615.1__non-structural protein 4 (NSP4)
MKIVNNWLKQLIKVTLVFLFVAAIFYLITPVHVMSKHTDFSSEVIGYKAIDGGVTRDIASTDTCFANKHADFDTWFSQRGGSYTNDKACPLIAAVITREVGFVVPGLPGTILRTTNGDFLHFLPRVFSAVGNICYTPSKLIEYTDFATSACVLAAECTIFKDASGKPVPYCYDTNVLEGSVAYESLRPDTRYVLMDGSIIQFPNTYLEGSVRVVTTFDSEYCRHGTCERSEAGVCVSTSGRWVLNNDYYRSLPGVFCGVDAVNLLTNMFTPLIQPIGALDISASIVAGGIVAIVVTCLAYYFMRFRRAFGEYSHVVAFNTLLFLMSFTVLCLTPVYSFLPGVYSVIYLYLTFYLTNDVSFLAHIQWMVMFTPLVPFWITIAYIICISTKHFYWFFSNYLKRRVVFNGVSFSTFEEAALCTFLLNKEMYLKLRSDVLLPLTQYNRYLALYNKYKYFSGAMDTTSYREAACCHLAKALNDFSNSGSDVLYQPPQTSITSAVLQ

SEQ ID NO: 16525 - protein, 501 aa, Artificial Sequence
  SARS-CoV-2__MT628156.1__non-structural protein 4 (NSP4)
MKIVNNWLKQLIKVTLVFLFVAAIFYLITPVHVMSKHTDFSSEIIGYKAIDGGVTRDIASTDTCFANKHADFDTWFSQRGGSYTNDKACPLIAAVITREVGFVVPGLPGTILRTTNGDFLHFLPRVFSAVGNICYTPSKLIEYTDFATSACVLAAECTIFKDASGKPVPYCYDTNVLEGSVAYESLRPDTRYVLMDGSIIQFPNTYLEGSVRVVTTFDSEYCRHGTCERSEAGVCVSTSGRWVLNNDYYRSLPGVFCGVDAVNLLTNMFTPLIQPIGALDISASIVAGGIVAIVVTSLAYYFMRFRRAFGEYSHVVAFNTLLFLMSFTVLCLTPVYSFLPGVYSVIYLYLTFYLTNDVSFLAHIQWMVMFTPLVPFWITIAYIICISTKHFYWFFSNYLKRRVVFNGVSFSTFEEAALCTFLLNKEMYLKLRSDVLLPLTQYNRYLALYNKYKYFSGAMDTTSYREAACCHLAKALNDFSNSGSDVLYQPPQTSITSAVLQ

SEQ ID NO: 16526 - protein, 501 aa, Artificial Sequence
  SARS-CoV-2__MT628225.1__non-structural protein 4 (NSP4)
MKIVNNWLKQLIKVTLVFLFVAAIFYLITPVHVMSKHTDFSSEIIGYKAIDGGVTRDIASTDTCFANKHADFDTWFSQRGGSYTNDKACPLIAAVITREVGFVVPGLPGTILRTTNGDFLHFLPRVFSAVGNICYTPSKLIEYTDFATSACVLAAECTIFKDASGKPVPYCYDTNVLEGSVAYESLRPDTRYVLMDGSIIQFPNTYLEGFVRVVTTFDSEYCRHGTCERSEAGVCVSTSGRWVLNNDYYRSLPGVFCGVDAVNLLTNMFTPLIQPIGALDISASIVAGGIVAIVVTCLAYYFMRFRRAFGEYSHVVAFNTLLFLMSFTVLCLTPVYSFLPGVYSVIYLYLTFYLTNDVSFLAHIQWMVMFTPLVPFWITIAYIICISTKHFYWFFSNYLKRRVVFNGVSFSTFEEAALCTFLLNKEMYLKLRSDVLLPLTQYNRYLALYNKYKYFSGAMDTTSYREAACCHLAKALNDFSNSGSDVLYQPPQTSITSAVLQ

SEQ ID NO: 16527 - protein, 501 aa, Artificial Sequence
  SARS-CoV-2__MT632520.1__non-structural protein 4 (NSP4)
MKIVNNWLKQLIKVTLVFLFVVAIFYLITPVHVMSKHTDFSSEIIGYKAIDGGVTRDIASTDTCFANKHADFDTWFSQRGGSYTNDKACPLIAAVITREVGFVVPGLPGTILRTTNGDFLHFLPRVFSAVGNICYTPSKLIEYTDFATSACVLAAECTIFKDASGKPVPYCYDTNVLEGSVAYESLRPDTRYVLMDGSIIQFPNTYLEGSVRVVTTFDSEYCRHGTCERSEAGVCVSTSGRWVLNNDYYRSLPGVFCGVDAVNLLTNMFTPLIQPIGALDISASIVAGGIVAIVVTCLAYYFMRFRRAFGEYSHVVAFNTLLFLMSFTVLCLTPVYSFLPGVYSVIYLYLTFYLTNDVSFLAHIQWMVMFTPLVPFWITIAYIICISTKHFYWFFSNYLKRRVVFNGVSFSTFEEAALCTFLLNKEMYLKLRSDVLLPLTQYNRYLALYNKYKYFSGAMDTTSYREAACCHLAKALNDFSNSGSDVLYQPPQTSITSAVLQ

SEQ ID NO: 16528 - protein, 501 aa, Artificial Sequence
  SARS-CoV-2__MT632793.1__non-structural protein 4 (NSP4)
MKIVNNWLKQLIKVTLVFLFVAAIFYLITPVHVMSKHTDFSSEIIGYKAIDGGVTRDIASTDTCFANKHADFDTWFSQRGGSYTNDKACPLIAAVITREVGFVVPGLPGTILRTTNGDFLHFLPRVFSAVGNICYTPSKLIEYTDFATSACVLAAECTIFKDASGKPVPYCYDTNVLEGSVAYESLRPDTRYVLMDGSIIQFPNTYLEGSVRVVTTFDFEYCRHGTCERSEAGVCVSTSGRWVLNNDYYRSLPGVFCGVDAVNLLTNMFTPLIQPIGALDISASIVAGGIVAIVVTCLAYYFMRFRRAFGEYSHVVAFNTLLFLMSFTVLCLTPVYSFLPGVYSVIYLYLTFYLTNDVSFLAHIQWMVMFTPLVPFWITIAYIICISTKHFYWFFSNYLKRRVVFNGVSFSTFEEAALCTFLLNKEMYLKLRSDVLLPLTQYNRYLALYNKYKYFSGAMDTTSYREAACCHLAKALNDFSNSGSDVLYQPPQTSITSAVLQ

SEQ ID NO: 16529 - protein, 501 aa, Artificial Sequence
  SARS-CoV-2__MT633007.1__non-structural protein 4 (NSP4)
MKIVNNWLKQLIKVTLVFLFVAAIFYLITPVHVMSKHTDFSSEIIGYKAIDGGVTRDIASTDTCFANKHADFDTWFSQRGGSYTNDKACPLIAAVITREVGFVVPGLPGTILRTTNGDFLHFLPRVFSAVGNICYTPSKLIEYTDFATSACVLAAECTIFKDASGKPVPYCYDTNVLEGSVAYESLRPDTRYVLMDGSIIQFPNTYLEGSVRVVTTFDSEYCRHGTCERSEAGVCVSTSGRWVLNNDYYRSLPGVFCGVDAVNLLTNMFTPLIQPIGALDISASIVAGGIVAIVVTCLAYYFMRFRRAFGEYSHVVAFNTLLFLMSFIVLCLTPVYSFLPGVYSVIYLYLTFYLTNDVSFLAHIQWMVMFTPLVPFWITIAYIICISTKHFYWFFSNYLKRRVVFNGVSFSTFEEAALCTFLLNKEMYLKLRSDVLLPLTQYNRYLALYNKYKYFSGAMDTTSYREAACCHLAKALNDFSNSGSDVLYQPPQTSITSAVLQ

SEQ ID NO: 16530 - protein, 501 aa, Artificial Sequence
  SARS-CoV-2__MT609566.1__non-structural protein 4 (NSP4)
MKIVNNWLKQLIKVTLVFLFVAAIFYLITPVHVMSKHTDFSSEIIGYKAIDGGVTRDIASTDTCFANKHADFDTWFSQRGGSYTNDKACPLIAAVITREVGFVVPGLPGTILRTTNGDFLHFLPRVFSAVGNICYTPSKLIEYTDFATSACVLAAECTIFKDASGKPVPYCYDTNVLEGSVAYESLRPDTRYVLMDGSIIQFPNTYLEGSVRVVTTFDSEYCRHGTCERSEAGVCVSTSGRWVLNNDYYRSLPGVFCGVDAVNLLTNMFTPLIQPIGALDISASIVAGGIVAIVVTCLAYYFMRFRRAFGEYSHVVAFNTLLFLMSFTVLCLTPVYSFLPGVYSVIYLYLTFYLTNDVSFLAHIQWMVMFTPLVPFWITIAYIICISTKHFYWFFSNYLKRRVVFNGVSFSTFEEAALCTFLLNKEMYLKLRSDVLLPLTQYNRYLALYNKYKYFSGAMDTISYREAACCHLAKALNDFSNSGSDVLYQPPQTSITSAVLQ

SEQ ID NO: 16531 - protein, 501 aa, Artificial Sequence
  SARS-CoV-2__MT609577.1__non-structural protein 4 (NSP4)
MKIVNNWLKQLIKVTLVFLFVAAIFYLITPVHVMSKHTDFSSEIIGYKAIDGGVTRDIASTDTCFANKHADFDTWFSQRGGSYTNDKACPLIAAVITREVGFVVPGLPGTILRTTNGDFLHFLPRVFSAVGNICYTPSKLIEYTDFATSACVLAAECTIFKDASGKPVPYCYDTNVLEGSVAYESLRPDTRYVLMDGSIIQFPNTYLEGSVRVVTTFDSEYCRHGTCERSEAGVCVSTSGRWVLNNDYYRSLPGVFCGVDAVNLLTNMFTPLIQPIGALDISASIVAGGIVAIVVTCLAYYFMRFRRAFGEYSHVVAFNTLLFLMSFTVLCLTPVYSFLPGVYSVIYLYFTFYLTNDVSFLAHIQWMVMFTPLVPFWITIAYIICISTKHFYWFFSNYLKRRVVFNGVSFSTFEEAALCTFLLNKEMYLKLRSDVLLPLTQYNRYLALYNKYKYFSGAMDTTSYREAACCHLAKALNDFSNSGSDVLYQPPQTSITSAVLQ

SEQ ID NO: 16532 - protein, 501 aa, Artificial Sequence
  SARS-CoV-2__MT601291.1__non-structural protein 4 (NSP4)
MKIVNNWLKQLIKVTLVFLFVAAIFYLITPVHVMSKHTDFSSEIIGYKAIDGGVTRDIASTDTCFANKHADFDTWFSQRGGSYTNDKACPLIAAVITREVGFVVPGLPGTILRTTNGDFLHFLPRVFSAVGNICYTPSKLIEYTDFATSACVLAAECTIFKDASGKPVPYCYDTNVLEGSVAYESLRPDTRYVLMDGSIIQFPNTYLEGSVRVVTTFDSEYCRHGTCERSEAGVCVSTSGRWVLNNDYYRSLPGVFCGVDAVNLLTNMFTPLIQPIGALDISASIVAGGIVAIVVTCLAYYFMRFRRAFGEYSHVVAFNTLLFLMSFTVLCLTPVYSFLPGVYSVIYLYLTFYLTNDVSFLAHIQWMVMFTPLVPFWITIAYIICISTKHFYWFFSNYLKRRVFFNGVSFSTFEEAALCTFLLNKEMYLKLRSDVLLPLTQYNRYLALYNKYKYFSGAMDTTSYREAACCHLAKALNDFSNSGSDVLYQPPQTSITSAVLQ

SEQ ID NO: 16533 - protein, 501 aa, Artificial Sequence
  SARS-CoV-2__MT585084.1__non-structural protein 4 (NSP4)
MKIVNNWLKQLIKVTLVFLFVAAIFYLITPVHVMSKHTDFSSEIIGYKAIDGGVTRDIASTDTCFANKHADFDTWFSQRGGSYTNDKACPLIAAVITREVGFVVPGLPGMILRTTNGDFLHFLPRVFSAVGNICYTPSKLIEYTDFATSACVLAAECTIFKDASGKPVPYCYDTNVLEGSVAYESLRPDTRYVLMDGSIIQFPNTYLEGSVRVVTTFDSEYCRHGTCERSEAGVCVSTSGRWVLNNDYYRSLPGVFCGVDAVNLLTNMFTPLIQPIGALDISASIVAGGIVAIVVTCLAYYFMRFRRAFGEYSHVVAFNTLLFLMSFTVLCLTPVYSFLPGVYSVIYLYLTFYLTNDVSFLAHIQWMVMFTPLVPFWITIAYIICISTKHFYWFFSNYLKRRVVFNGVSFSTFEEAALCTFLLNKEMYLKLRSDVLLPLTQYNRYLALYNKYKYFSGAMDTTSYREAACCHLAKALNDFSNSGSDVLYQPPQTSITSAVLQ

SEQ ID NO: 16534 - protein, 501 aa, Artificial Sequence
  SARS-CoV-2__MT499215.1__non-structural protein 4 (NSP4)
MKIVNNWLKQLIKVTLVFLFVAAIFYLITPVHVMSRHTDFSSEIIGYKAIDGGVTRDIASTDTCFANKHADFDTWFSQRGGSYTNDKACPLIAAVITREVGFVVPGLPGTILRTTNGDFLHFLPRVFSAVGNICYTPSKLIEYTDFATSACVLAAECTIFKDASGKPVPYCYDTNVLEGSVAYESLRPDTRYVLMDGSIIQFPNTYLEGSVRVVTTFDSEYCRHGTCERSEAGVCVSTSGRWVLNNDYYRSLPGVFCGVDAVNLLTNMFTPLIQPIGALDISASIVAGGIVAIVVTCLAYYFMRFRRAFGEYSHVVAFNTLLFLMSFTVLCLTPVYSFLPGVYSVIYLYLTFYLTNDVSFLAHIQWMVMFTPLVPFWITIAYIICISTKHFYWFFSNYLKRRVVFNGVSFSTFEEAALCTFLLNKEMYLKLRSDVLLPLTQYNRYLALYNKYKYFSGAMDTTSYREAACCHLAKALNDFSNSGSDVLYQPPQTSITSAVLQ

SEQ ID NO: 16535 - protein, 501 aa, Artificial Sequence
  SARS-CoV-2__MT499217.1__non-structural protein 4 (NSP4)
MKIVNNWLKQLIKVTLVFLFVAAIFYLITPVHVMSRHTDFSSEIIGYKAIDGGVTRDIASTDTCFANKHADFDTWFNQRGGSYTNDKACPLIAAVITREVGFVVPGLPGTILRTTNGDFLHFLPRVFSAVGNICYTPSKLIEYTDFATSACVLAAECTIFKDASGKPVPYCYDTNVLEGSVAYESLRPDTRYVLMDGSIIQFPNTYLEGSVRVVTTFDSEYCRHGTCERSEAGVCVSTSGRWVLNNDYYRSLPGVFCGVDAVNLLTNMFTPLIQPIGALDISASIVAGGIVAIVVTCLAYYFMRFRRAFGEYSHVVAFNTLLFLMSFTVLCLTPVYSFLPGVYSVIYLYLTFYLTNDVSFLAHIQWMVMFTPLVPFWITIAYIICISTKHFYWFFSNYLKRRVVFNGVSFSTFEEAALCTFLLNKEMYLKLRSDVLLPLTQYNRYLALYNKYKYFSGAMDTTSYREAACCHLAKALNDFSNSGSDVLYQPPQTSITSAVLQ

SEQ ID NO: 16536 - protein, 501 aa, Artificial Sequence
  SARS-CoV-2__MT576530.1__non-structural protein 4 (NSP4)
MKIVNNWLKQLIKVTLVFLFVAAIFYLITPVHVMSKHTDFSSEIIGYKAIDGGVTRDIASTDTCFANKYADFDTWFSQRGGSYTNDKACPLIAAVITREVGFVVPGLPGTILRTTNGDFLHFLPRVFSAVGNICYTPSKLIEYTDFATSACVLAAECTIFKDASGKPVPYCYDTNVLEGSVAYESLRPDTRYVLMDGSIIQFPNTYLEGSVRVVTTFDSEYCRHGTCERSEAGVCVSTSGRWVLNNDYYRSLPGVFCGVDAVNLLTNMFTPLIQPIGALDISASIVAGGIVAIVVTCLAYYFMRFRRAFGEYSHVVAFNTLLFLMSFTVLCLTPVYSFLPGVYSVIYLYLTFYLTNDVSFLAHIQWMVMFTPLVPFWITIAYIICISTKHFYWFFSNYLKRRVVFNGVSFSTFEEAALCTFLLNKEMYLKLRSDVLLPLTQYNRYLALYNKYKYFSGAMDTTSYREAACCHLAKALNDFSNSGSDVLYQPPQTSITSAVLQ

SEQ ID NO: 16537 - protein, 501 aa, Artificial Sequence
  SARS-CoV-2__MT520390.1__non-structural protein 4 (NSP4)
MKIVNNWLKQLIKVTLVFLFVAAIFYLITPVHVMSKHTDFSSEIIGYKAIDGGVTRDIAYTDTCFANKHADFDTWFSQRGGSYTNDKACPLIAAVITREVGFVVPGLPGTILRTTNGDFLHFLPRVFSAVGNICYTPSKLIEYTDFATSACVLAAECTIFKDASGKPVPYCYDTNVLEGSVAYESLRPDTRYVLMDGSIIQFPNTYLEGSVRVVTTFDSEYCRHGTCERSEAGVCVSTSGRWVLNNDYYRSLPGVFCGVDAVNLLTNMFTPLIQPIGALDISASIVAGGIVAIVVTCLAYYFMRFRRAFGEYSHVVAFNTLLFLMSFTVLCLTPVYSFLPGVYSVIYLYLTFYLTNDVSFLAHIQWMVMFTPLVPFWITIAYIICISTKHFYWFFSNYLKRRVVFNGVSFSTFEEAALCTFLLNKEMYLKLRSDVLLPLTQYNRYLVLYNKYKYFSGAMDTTSYREAACCHLAKALNDFSNSGSDVLYQPPQTSITSAVLQ

SEQ ID NO: 16538 - protein, 501 aa, Artificial Sequence
  SARS-CoV-2__MT539163.1__non-structural protein 4 (NSP4)
MKIVNNWLKQLIKVTLVFLFVAAIFYLITPVHVMSKHTDFSSEIIGYKAIDGGVTRDIASTDTCFANKHADFDTWFSQRGGSYTNDKACPLIAAVITREVGFVVPGLPGTILRTTNGDFLHFLPRVFSAVGNICYTPSKLIEYTDFATSACVLAAECTIFKDASGKPVPYCYDTNVLEGSVAYESLRPDTRYVLMDGSIIQFPNTYLEGSVRVVTTFDSEYCRHGTCERSEAGVCVSTSGRWVLNNDYYRSLPGVFCGVDAVNLLTNMFTPLIQPIGALDISASIVAGGIVAIVVTCLAYYFMRFRRAFGEYSHVVAFSTLLFLMSFTVLCLTPVYSFLPGVYSVIYLYLTFYLTNDVSFLAHIQWMVMFTPLVPFWITIAYIICISTKHFYWFFSNYLKRRVVFNGVSFSTFEEAALCTFLLNKEMYLKLRSDVLLPLTQYNRYLALYNKYKYFSGAMDTTSYREAACCHLAKALNDFSNSGSDVLYQPPQTSITSAVLQ

SEQ ID NO: 16539 - protein, 501 aa, Artificial Sequence
  SARS-CoV-2__MT407653.1__non-structural protein 4 (NSP4)
MKIVNNWLKQLIKVTLVFLFVAAIFYLITPVHVMSKHTDFSSEIIGYKAIDGGVTRDIASTDTCFANKHADFDTWFSQRGGSYTNDKACPLIAAVITREVGFVVPGLPGTILRTTNGDFLHFLPRVFSAVGNICYTPSKLIEYTDFATSACVLAAECTIFKDASGKPVPYCYDTNVLEGSVAYESLRPDTRYVLMDGSIIQFPNTYLEGSVRVVTTFDSEYCRHGTCERSEAGVCVSTSGRWVLNNDYYRSLPGVFCGVDAVNLLTNMFTPLMQPIGALDISASIVAGGIVAIVVTCLAYYFMRFRRAFGEYSHVVAFNTLLFLMSFTVLCLTPVYSFLPGVYSVIYLYLTFYLTNDVSFLAHIQWMVMFTPLVPFWITIAYIICISTKHFYWFFSNYLKRRVVFNGVSFSTFEEAALCTFLLNKEMYLKLRSDVLLPLTQYNRYLALYNKYKYFSGAMDTTSYREAACCHLAKALNDFSNSGSDVLYQPPQTSITSAVLQ

SEQ ID NO: 16540 - protein, 501 aa, Artificial Sequence
  SARS-CoV-2__MT535503.1__non-structural protein 4 (NSP4)
MKIVNNWLKQLIKVTLVFLFVAAIFYLITPVHVMSKHTDFSSEIIGYKAIDGGVTRDIASTDTCFANKHADFSQRGGSYTNDKACPLIAAVITREVGFVVPGLPGTILRTTNGDFLHFLPRVFSAVGNICYTPSKLIEYTDFATSACVLAAECTIFKDASGKPVPYCYDTNVLEGSVAYESLRPDTRYVLMDGSIIQFPNTYLEGSVRVVTTFDSEYCRHGTCERSEAGVCVSTSGRWVLNNDYYRSLPGVFCGVDAVNLLTNMFTPLIQPIGALDISASIVAGGIVAIVVTCLAYYFMRFRRAFGEYSHVVAFNTLLFLMSFTVLCLTPVYSFLPGVYSVIYLYLTFYLTNDVSFLAHIQWMVMFTPLVPFWITIAYIICISTKHFYWFFSNYLKRRVVFNGVSFSTFEEAALCTFLLNKEMYLKLRSDVLLPLTQYNRYLALYNKYKYFSGAMDTTSYREAACCHLAKALNDFSNSGSDVLYQPPQTSITSAVLQSGFR

SEQ ID NO: 16541 - protein, 501 aa, Artificial Sequence
  SARS-CoV-2__MT533204.1__non-structural protein 4 (NSP4)
MKIVNNWLKQLIKVTLVFLFVAAIFYLITPVHVMSKHTDFSSEIIGYKAIDGGVTRDIASTDTCFANKHADFDTWFSQRGGSYTNDKACPLIAAVITREVGFVVPGLPGTILRTTNGDFLHFLPRVFSAVGNICYTPSKLIEYTDFATSACVLAAECTIFKDASGRPVPYCYDTNVLEGSVAYESLRPDTRYVLMDGSIIQFPNTYLEGSVRVVTTFDSEYCRHGTCERSEAGVCVSTSGRWVLNNDYYRSLPGVFCGVDAVNLLTNMFTPLIQPIGALDISASIVAGGIVAIVVTCLAYYFMRFRRAFGEYSHVVAFNTLLFLMSFTVLCLTPVYSFLPGVYSVIYLYLTFYLTNDVSFLAHIQWMVMFTPLVPFWITIAYIICISTKHFYWFFSNYLKRRVVFNGVSFSTFEEAALCTFLLNKEMYLKLRSDVLLPLTQYNRYLALYNKYKYFSGAMDTTSYREAACCHLAKALNDFSNSGSDVLYQPPQTSITSAVLQ

SEQ ID NO: 16542 - protein, 501 aa, Artificial Sequence
  SARS-CoV-2__MT512440.1__non-structural protein 4 (NSP4)
MKIVNNWLKQLIKVTLVFLFVAAIFYLITPVHVMSKHTDFSSEIIGYKAIDGGVTRDIASTDTCFANKHADFDTWFSQRGGSYTNDKACPLIAAVITREVGFVVPGLPGTILRTTNGDFLHFLPRVFSAVGNICYTPSKLIEYTDFATSACVLAAECTIFKDASGKPVPYCYDTNVLEGSVAYESLRPDTRYVLMDGSIIQFPNTYLEGSVRVVTTFDSEYCRHGTCERSEAGVCVSTSGRWVLNNDYYRSLPGVFCGVDAVNLLTNMFTPLIQPIGALDISASIVAGGIVAIVVTCLAYYFMRFRRAFGEYSHVVAFNTLLFLMSFTVLCLTPVYSFLPGVYSVIYLYLTFYLTNDVSFLAHIQWMVMFTPLVPFWITIAYIICTSTKHFYWFFSNYLKRRVVFNGVSFSTFEEAALCTFLLNKEMYLKLRSDVLLPLTQYNRYLALYNKYKYFSGAMDTTSYREAACCHLAKALNDFSNSGSDVLYQPPQTSITSAVLQ

SEQ ID NO: 16543 - protein, 501 aa, Artificial Sequence
  SARS-CoV-2__MT509489.1__non-structural protein 4 (NSP4)
MKIVNNWLKQLIKVTLVFLFVAAIFYLITPVHVMSKHTDFSSEIIGYKVIDGGVTRDIASTDTCFANKHADFDTWFSQRGGSYTNDKACPLIAAVITREVGFVVPGLPGTILRTTNGDFLHFLPRVFSAVGNICYTPSKLIEYTDFATSACVLAAECTIFKDASGKPVPYCYDTNVLEGSVAYESLRPDTRYVLMDGSIIQFPNTYLEGSVRVVTTFDSEYCRHGTCERSEAGVCVSTSGRWVLNNDYYRSLPGVFCGVDAVNLLTNMFTPLIQPIGALDISASIVAGGIVAIVVTCLAYYFMRFRRAFGEYSHVVAFNTLLFLMSFTVLCLTPVYSFLPGVYSVIYLYLTFYLTNDVSFLAHIQWMVMFTPLVPFWITIAYIICISTKHFYWFFSNYLKRRVVFNGVSFSTFEEAALCTFLLNKEMYLKLRSDVLLPLTQYNRYLALYNKYKYFSGAMDTTSYREAACCHLAKALNDFSNSGSDVLYQPPQTSITSAVLQ

SEQ ID NO: 16544 - protein, 501 aa, Artificial Sequence
  SARS-CoV-2__MT506886.1__non-structural protein 4 (NSP4)
MKIVNNWLKQLIKVTLVFLFVAAIFYLITPVHVMSKHTDFSSEIIGYKAIDGGVTRDIASTDTCFANKHADFDTWFSQRGGSYTNDKACPLIAAVITREVGFVVPGLPGTILRTTNGDFLHFLPRVFSAVGNICYTPSKLVEYTDFATSACVLAAECTIFKDASGKPVPYCYDTNVLEGSVAYESLRPDTRYVLMDGSIIQFPNTYLEGSVRVVTTFDSEYCRHGTCERSEAGVCVSTSGRWVLNNDYYRSLPGVFCGVDAVNLLTNMFTPLIQPIGALDISASIVAGGIVAIVVTCLAYYFMRFRRAFGEYSHVVAFNTLLFLMSFTVLCLTPVYSFLPGVYSVIYLYLTFYLTNDVSFLAHIQWMVMFTPLVPFWITIAYIICISTKHFYWFFSNYLKRRVVFNGVSFSTFEEAALCTFLLNKEMYLKLRSDVLLPLTQYNRYLALYNKYKYFSGAMDTTSYREAACCHLAKALNDFSNSGSDVLYQPPQTSITSAVLQ

SEQ ID NO: 16545 - protein, 501 aa, Artificial Sequence
  SARS-CoV-2__MT499188.1__non-structural protein 4 (NSP4)
MKIVNNWLKQLIKVTLVFLFVAAIFYLITPVHVMSKHTDFSSEIIGYKAIDGGVTRDIASTDTCFANKHADFDTWFSQRGGSYTNDKACPLIAAVITREVGFVVPGLPGTVLRTTNGDFLHFLPRVFSAVGNICYTPSKLIEYTDFATSACVLAAECTIFKDASGKPVPYCYDTNVLEGSVAYESLRPDTRYVLMDGSIIQFPNTYLEGSVRVVTTFDSEYCRHGTCERSEAGVCVSTSGRWVLNNDYYRSLPGVFCGVDAVNLLTNMFTPLIQPIGALDISASIVAGGIVAIVVTCLAYYFMRFRRAFGEYSHVVAFNTLLFLMSFTVLCLTPVYSFLPGVYSVIYLYLTFYLTNDVSFLAHIQWMVMFTPLVPFWITIAYIICISTKHFYWFFSNYLKRRVVFNGVSFSTFEEAALCTFLLNKEMYLKLRSDVLLPLTQYNRYLALYNKYKYFSGAMDTTSYREAACCHLAKALNDFSNSGSDVLYQPPQTSITSAVLQ

SEQ ID NO: 16546 - protein, 501 aa, Artificial Sequence
  SARS-CoV-2__MT499209.1__non-structural protein 4 (NSP4)
MKIVNNWLKQLIKVTLVFLFVAAIFYLITPVHVMSKHTDFSSEIIGYKAIDGGVTRDIASTDTCFANKHADFDTWFSQRGGSYTNDKACPLIAAVITREVGFVVPGLPGTILRTTNGDFLHFLPRVFSAVGNICYTPSKLIEYTDFATSACVLAAECTIFKDASGKPVPYCYDTNVLEGSVAYESLRPDTRYVLMDGSIIQFPNTYLESSVRVVTTFDSEYCRHGTCERSEAGVCVSTSGRWVLNNDYYRSLPGVFCGVDAVNLLTNMFTPLIQPIGALDISASIVAGGIVAIVVTCLAYYFMRFRRAFGEYSHVVAFNTLLFLMSFTVLCLTPVYSFLPGVYSVIYLYLTFYLTNDVSFLAHIQWMVMFTPLVPFWITIAYIICISTKHFYWFFSNYLKRRVVFNGVSFSTFEEAALCTFLLNKEMYLKLRSDVLLPLTQYNRYLALYNKYKYFSGAMDTTSYREAACCHLAKALNDFSNSGSDVLYQPPQTSITSAVLQ

SEQ ID NO: 16547 - protein, 501 aa, Artificial Sequence
  SARS-CoV-2__MT477852.1__non-structural protein 4 (NSP4)
MKIVNNWLKQLIKVTLLFLFVAAIFYLITPVHVMSKHTDFSSEIIGYKAIDGGVTRDIASTDTCFANKHADFDTWFSQRGGSYTNDKACPLIAAVITREVGFVVPGLPGTILRTTNGDFLHFLPRVFSAVGNICYTPSKLIEYTDFATSACVLAAECTIFKDASGKPVPYCYDTNVLEGSVAYESLRPDTRYVLMDGSIIQFPNTYLEGSVRVVTTFDSEYCRHGTCERSEAGVCVSTSGRWVLNNDYYRSLPGVFCGVDAVNLLTNMFTPLIQPIGALDISASIVAGGIVAIVVTCLAYYFMRFRRAFGEYSHVVAFNTLLFLMSFTVLCLTPVYSFLPGVYSVIYLYLTFYLTNDVSFLAHIQWMVMFTPLVPFWITIAYIICISTKHFYWFFSNYLKRRVVFNGVSFSTFEEAALCTFLLNKEMYLKLRSDVLLPLTQYNRYLALYNKYKYFSGAMDTTSYREAACCHLAKALNDFSNSGSDVLYQPPQTSITSAVLQ

SEQ ID NO: 16548 - protein, 501 aa, Artificial Sequence
  SARS-CoV-2__MT481932.1__non-structural protein 4 (NSP4)
MKIVNNWLKQLIKVTLVFLFVAAIFYLITPVHVMSKHTDFSSEIIGYKAIDGGVTRDIASTDTCFANKHADFDTWFSQRGGSYTNDKACPLIAAVITREVGFVVPGLPGTILRTTNGDFLHFLPRVFSAVGNICYTPSKLIEYTDFATSACVLAAECTIFKDASGKPVPYCYDTNVLEGSVAYESLRPDTRYVLMDGSIIQFPNTYLEGSVRVVTTFDSEYCRHGTCERSEAGVCVSTSGRWVLNNDYYRSLPGVFCGVDAVNLLTNMFTPLIQPIGALDISASIVAGGIVAIVVTCLAYYFMRFRRAFGEYSHVVAFNTLLFLMSFTVLCLTPVYLFLPGVYSVIYLYLTFYLTNDVSFLAHIQWMVMFTPLVPFWITIAYIICISTKHFYWFFSNYLKRRVVFNGVSFSTFEEAALCTFLLNKEMYLKLRSDVLLPLTQYNRYLALYNKYKYFSGAMDTTSYREAACCHLAKALNDFSNSGSDVLYQPPQTSITSAVLQ

SEQ ID NO: 16549 - protein, 501 aa, Artificial Sequence
  SARS-CoV-2__MT482148.1__non-structural protein 4 (NSP4)
MKIVNNWLKQLIKVTLVFLFVAAIFYLITPVHVMSKHTDFSSEIIGYKAIDGGVTRDIASTDTCFANKHADFDTWFSQRGGSYTNDKACPLIAAVITREVGFVVPGLPSTILRTTNGDFLHFLPRVFSAVGNICYTPSKLIEYTDFATSACVLAAECTIFKDASGKPVPYCYDTNVLEGSVAYESLRPDTRYVLMDGSIIQFPNTYLEGSVRVVTTFDSEYCRHGTCERSEAGVCVSTSGRWVLNNDYYRSLPGVFCGVDAVNLLTNMFTPLIQPIGALDISASIVAGGIVAIVVTCLAYYFMRFRRAFGEYSHVVAFNTLLFLMSFTVLCLTPVYSFLPGVYSVIYLYLTFYLTNDVSFLAHIQWMVMFTPLVPFWITIAYIICISTKHFYWFFSNYLKRRVVFNGVSFSTFEEAALCTFLLNKEMYLKLRSDVLLPLTQYNRYLALYNKYKYFSGAMDTTSYREAACCHLAKALNDFSNSGSDVLYQPPQISITSAVLQ

SEQ ID NO: 16550 - protein, 501 aa, Artificial Sequence
  SARS-CoV-2__MT079843.1__non-structural protein 4 (NSP4)
MKIVNNWLKQLIKVTLVFLFVAAIFYLITPVHVMSKHTDFSSEIIGYKAIDGGVTRDIASTDTCFANKHADFDTWFSQRGGSYTNDKACPLIAAVITREVGFVVPGLPGTISRTTNGDFLHFLPRVFSAVGNICYTPSKLIEYTDFATSACVLAAECTIFKDASGKPVPYCYDTNVLEGSVAYESLRPDTRYVLMDGSIIQFPNTYLEGSVRVVTTFDSEYCRHGTCERSEAGVCVSTSGRWVLNNDYYRSLPGVFCGVDAVNLLTNMFTPLIQPIGALDISASIVAGGIVAIVVTCLAYYFMRFRRAFGEYSHVVAFNTLLFLMSFTVLCLTPVYSFLPGVYSVIYLYLTFYLTNDVSFLAHIQWMVMFTPLVPFWITIAYIICISTKHFYWFFSNYLKRRVVFNGVSFSTFEEAALCTFLLNKEMYLKLRSDVLLPLTQYNRYLALYNKYKYFSGAMDTTSYREAACCHLAKALNDFSNSGSDVLYQPPQTSITSAVLQ

SEQ ID NO: 16551 - protein, 501 aa, Artificial Sequence
  SARS-CoV-2__MT459878.1__non-structural protein 4 (NSP4)
MKIVNNWLKQLIKVTLVFLFVAAIFYLITPVHVMSKHTDFSSEIIGYKAIDGGVTRDIASTDTCFANKHADFDTWFSQRGGSYTNDKACPLIAAVITREVGFVVPGLPGTILRTTNGDFLHFLPRVFSAVGNICYTPSKLIEYTDFATSACVLAAECTIFKDVSGKPVPYCYDTNVLEGSVAYESLRPDTRYVLMDGSIIQFPNTYLEGSVRVVTTFDSEYCRHGTCERSEAGVCVSTSGRWVLNNDYYRSLPGVFCGVDAVNLLTNMFTPLIQPIGALDISASIVAGGIVAIVVTCLAYYFMRFRRAFGEYSHVVAFNTLLFLMSFTVLCLTPVYSFLPGVYSVIYLYLTFYLTNDVSFLAHIQWMVMFTPLVPFWITIAYIICISTKHFYWFFSNYLKRRVVFNGVSFSTFEEAALCTFLLNKEMYLKLRSDVLLPLTQYNRYLALYNKYKYFSGAMDTTSYREAACCHLAKALNDFSNSGSDVLYQPPQTSITSAVLQ

SEQ ID NO: 16552 - protein, 501 aa, Artificial Sequence
  SARS-CoV-2__MT459985.1__non-structural protein 4 (NSP4)
MKIVNNWLKQLIKVTLVFLFVAAIFYLITPVHVMSKHTDFSSEIIGYKAIDGGVTRDIASTDTCFANKHADFDTWFSQRGGSYTNDKACPLIAAVITREVGLVVPGLPGTILRTTNGDFLHFLPRVFSAVGNICYTPSKLIEYTDFATSACVLAAECTIFKDASGKPVPYCYDTNVLEGSVAYESLRPDTRYVLMDGSIIQFPNTYLEGSVRVVTTFDSEYCRHGTCERSEAGVCVSTSGRWVLNNDYYRSLPGVFCGVDAVNLLTNMFTPLIQPIGALDISASIVAGGIVAIVVTCLAYYFMRFRRAFGEYSHVVAFNTLLFLMSFTVLCLTPVYSFLPGVYSVIYLYLTFYLTNDVSFLAHIQWMVMFTPLVPFWITIAYIICISTKHFYWFFSNYLKRRVVFNGVSFSTFEEAALCTFLLNKEMYLKLRSDVLLPLTQYNRYLALYNKYKYFSGAMDTTSYREAACCHLAKALNDFSNSGSDVLYQPPQTSITSAVLQ

SEQ ID NO: 16553 - protein, 501 aa, Artificial Sequence
  SARS-CoV-2__MT451244.1__non-structural protein 4 (NSP4)
MKIVNNWLKQLIKVTLVFLFVAAIFYLITPVHVMSKYTDFSSEIIGYKAIDGGVTRDIASTDTCFANKHADFDTWFSQRGGSYTNDKACPLIAAVITREVGFVVPGLPGTILRTTNGDFLHFLPRVFSAVGNICYTPSKLIEYTDFATSACVLAAECTIFKDASGKPVPYCYDTNVLEGSVAYESLRPDTRYVLMDGSIIQFPNTYLEGSVRVVTTFDSEYCRHGTCERSEAGVCVSTSGRWVLNNDYYRSLPGVFCGVDAVNLLTNMFTPLIQPIGALDISASIVAGGIVAIVVTCLAYYFMRFRRAFGEYSHVVAFNTLLFLMSFTVLCLTPVYSFLPGVYSVIYLYLTFYLTNDVSFLAHIQWMVMFTPLVPFWITIAYIICISTKHFYWFFSNYLKRRVVFNGVSFSTFEEAALCTFLLNKEMYLKLRSDVLLPLTQYNRYLALYNKYKYFSGAMDTTSYREAACCHLAKALNDFSNSGSDVLYQPPQTSITSAVLQ

SEQ ID NO: 16554 - protein, 501 aa, Artificial Sequence
  SARS-CoV-2__MT451712.1__non-structural protein 4 (NSP4)
MKIVNNWLKQLIKVTLVFLFVAAIFYLITPVHVMSKHTDFSSEIIGYKAIDGGVTRDIASTDTCFANKHADFDTWFSQRGGSYTNDKACPLIAAVITREVSFVVPGLPGTILRTTNGDFLHFLPRVFSAVGNICYTPSKLIEYTDFATSACVLAAECTIFKDASGKPVPYCYDTNVLEGSVAYESLRPDTRYVLMDGSIIQFPNTYLEGSVRVVTTFDSEYCRHGTCERSEAGVCVSTSGRWVLNNDYYRSLPGVFCGVDAVNLLTNMFTPLIQPIGALDISASIVAGGIVAIVVTCLAYYFMRFRRAFGEYSHVVAFNTLLFLMSFTVLCLTPVYSFLPGVYSVIYLYLTFYLTNDVSFLAHIQWMVMFTPLVPFWITIAYIICISTKHFYWFFSNYLKRRVVFNGVSFSTFEEAALCTFLLNKEMYLKLRSDVLLPLTQYNRYLALYNKYKYFSGAMDTTSYREAACCHLAKALNDFSNSGSDVLYQPPQTSITSAVLQ

SEQ ID NO: 16555 - protein, 501 aa, Artificial Sequence
  SARS-CoV-2__MT451755.1__non-structural protein 4 (NSP4)
MKIVNNWLKQLIKVTLVFLFVAAIFYLITPVHVMSKHTDFSSEIIGYKAIDGGVTRDIASTDTCFANKHADFDTWFSQRGGSYTNDKACPLIAAVITREVGFVVPGLPGTILRTTNGDFLHFLPRVFSAVGNICYTPSKLIEYTDFATSACVLAAECTIFKDASGKPVPYCYDTNVLEGSVAYESLRPDTRYVLMDGSIIQFPNTYLEGSVRVVTTFDSEYCRHGTCERSEAGVCVSTSGRWVLNNDYYRSLPGVFCGVDAVNLLTNMFTPLIQPIGALDISASIVAGGIVAIVVTCLAYYFMRFRRAFGEYSHVVAFNTLLFLMSFTVLCLTPVYSFLPGVYSVIYLYLTFYLTNDVSFLAHIQWMVMFTPLVPFWITIAYIICVSTKHFYWFFSNYLKRRVVFNGVSFSTFEEAALCTFLLNKEMYLKLRSDVLLPLTQYNRYLALYNKYKYFSGAMDTTSYREAACCHLAKALNDFSNSGSDVLYQPPQTSITSAVLQ

SEQ ID NO: 16556 - protein, 501 aa, Artificial Sequence
  SARS-CoV-2__MT276600.1__non-structural protein 4 (NSP4)
MKIVNNWLKQLIKVTLVFLFVAAIFYLITPVHVMSKHTDFSSEIIGYKAIDGGVTRDIASTDTCFANKHADFDTWFSQRGGSYTNDKACPLIAAVITREVGFVVPGLPGTILRTTNGDFLHFLPRVFSAVGNICYTPSKLIEYTDFATSACVLAAECTIFKDASGKPVPYCYDTNVLEGSVAYESLRPDTRYVLMDGSIIQFPNTYLEGSVRVVTTFDSEYCRHGTCERSEAGVCVSTSGRWVLNNDYYRSLPGVFCGVDAVNLLTNMFTPLIQPIGALDISASIVAGGIVAIVVTCLAYYFMRFRRAFGEYSHVVAFNTLLFLMSFTVLCLTPVYSFLPGVYSVIYLYLTFYLTNDVSFLAHIQWMVMFTPLVPFWITIAYIICISTKHFYWFFSNYLKRRVVFNGVSFSTFEEAALCTFLLNKEMYLKLRSDVLLPLTQYNRYLALYNKYKYFSGAMDTTSYREAACCYLAKALNDFSNSGSDVLYQPPQTSITSAVLQ

SEQ ID NO: 16557 - protein, 501 aa, Artificial Sequence
  SARS-CoV-2__MT412337.1__non-structural protein 4 (NSP4)
MKIVNNWLKQLIKVTLVFLFVAAIFYLITPVHVMSKHTDFSSEIIGYKAIDGGVTRDIASTDTCFANKHADFDTWFSQRGGSYTNDKACPLIAAVITREVGFVVPGLPGTILRTTNGDFLHFLPRVFSAVGNICYTPSKLIEYTDFATSACVLAAECTIFKDASGKPVPYCYDTNVLEGSVAYESLRPDTRYVLMDGSIIQFPNTYLEGSVRVVTTFDSEYCRHGTCERSEAGVCVSTSGRWVLNNDYYRSLPGVFCGVDAVNLLTNMFIPLIQPIGALDISASIVAGGIVAIVVTCLAYYFMRFRRAFGEYSHVVAFNTLLFLMSFTVLCLTPVYSFLPGVYSVIYLYLTFYLTNDVSFLAHIQWMVMFTPLVPFWITIAYIICISTKHFYWFFSNYLKRRVVFNGVSFSTFEEAALCTFLLNKEMYLKLRSDVLLPLTQYNRYLALYNKYKYFSGAMDTTSYREAACCHLAKALNDFSNSGSDVLYQPPQTSITSAVLQ

SEQ ID NO: 16558 - protein, 501 aa, Artificial Sequence
  SARS-CoV-2__MT385450.1__non-structural protein 4 (NSP4)
MKIVNNWLKQLIKVTLVFLFVAAIFYLITPVHVMSKHTDFSSEIIGYKAIDGGVTRDIASTDTCFANKHADFDTWFSQRGGSYTNDKACPLIAAVITREVGFVVPGLPGTILRTTNGDFLHFLPRVFSAVGNICYTPSKLIEYTDFATSACVLAAECTIFKDASGNPVPYCYDTNVLEGSVAYESLRPDTRYVLMDGSIIQFPNTYLEGSVRVVTTFDSEYCRHGTCERSEAGVCVSTSGRWVLNNDYYRSLPGVFCGVDAVNLLTNMFTPLIQPIGALDISASIVAGGIVAIVVTCLAYYFMRFRRAFGEYSHVVAFNTLLFLMSFTVLCLTPVYSFLPGVYSVIYLYLTFYLTNDVSFLAHIQWMVMFTPLVPFWITIAYIICISTKHFYWFFSNYLKRRVVFNGVSFSTFEEAALCTFLLNKEMYLKLRSDVLLPLTQYNRYLALYNKYKYFSGAMDTTSYREAACCHLAKALNDFSNSGSDVLYQPPQTSITSAVLQ

SEQ ID NO: 16559 - protein, 501 aa, Artificial Sequence
  SARS-CoV-2__MT252823.1__non-structural protein 4 (NSP4)
MKIVNNWLKQLIKVTLVFLFVAAIFYLITPVHVMSKHTDFSSEIIGYKAIDGGVTRDIASTDTCFANKHADFDTWFSQRGGSYTNDKACPLIAAVITREVGFVVPGLPGTILRTTNGDFLHFLPRVFSAVGNICYTPSKLIEYTDFATSACVLAAECTIFKDASGKPVPYCYDTNVLEGSVAYESLRPDTRYVLMDGSIIQFPNTYLEGSVRVVTTFDSEYCRHGTCERSEAGVCVSTSGRWVLNNDYYRSLPGVFCGVDAVNLLTNMFTPLIQPIGALDISASIVAGGIVAIVVTCLAYYFMRFRRAFGEYSHVVAFNTLLFLMSFTVLCLTPVYSFLPGVYSVIYLYLTFYLTNDVSFLAHIQWMVMFTPLVPFWITIAYIILISTKHFYWFFSNYLKRRVVFNGVSFSTFEEAALCTFLLNKEMYLKLRSDVLLPLTQYNRYLALYNKYKYFSGAMDTTSYREAACCHLAKALNDFSNSGSDVLYQPPQTSITSAVLQ

SEQ ID NO: 16560 - protein, 501 aa, Artificial Sequence
  SARS-CoV-2__MT358730.1__non-structural protein 4 (NSP4)
MKIVNNWLKQLIKVTLVFLFVAAIFYLITPVHVMSKHTDFSSEIIGYKAIDGGVTRDIASTDTCFANKHADFDTWFSQRGGSYTNDKACPLIAAVITREVGFVVPGLPGTTKRTTNGDFLHFLPRVFSAVGNICYTPSKLIEYTDFATSACVLAAECTIFKDASGKPVPYCYDTNVLEGSVAYESLRPDTRYVLMDGSIIQFPNTYLEGSVRVVTTFDSEYCRHGTCERSEAGVCVSTSGRWVLNNDYYRSLPGVFCGVDAVNLLTNMFTPLIQPIGALDISASIVAGGIVAIVVTCLAYYFMRFRRAFGEYSHVVAFNTLLFLMSFTVLCLTPVYSFLPGVYSVIYLYLTFYLTNDVSFLAHIQWMVMFTPLVPFWITIAYIICISTKHFYWFFSNYLKRRVVFNGVSFSTFEEAALCTFLLNKEMYLKLRSDVLLPLTQYNRYLALYNKYKYFSGAMDTTSYREAACCHLAKALNDFSNSGSDVLYQPPQTSITSAVLQ

SEQ ID NO: 16561 - protein, 501 aa, Artificial Sequence
  SARS-CoV-2__MT345830.1__non-structural protein 4 (NSP4)
MKIVNNWLKQLIKVTLVFLFVAAIFYLITPVHVMSKHTDFSSEIIGYKAIDGGVTRDIASTDTCFANKHADFDTWFSQRGGSYTNDKACPLIAAVITREVGFVVPGLPGTILRTTNGDFLHFLPRVFSAVGNICYTPSKLIEYTDFATSACVLAAECTIFKDASGKPVPYCYDTNVLEGSVAYESLRPDTRYVLMDGSIIQFPNTYLEGSVRVVTTFDSEYCRHGTCERSEAGVCVSTSGRWVLNNDYYRSLPGVFCGVDAVNLLTNMFTPLIQPIGALDISASIVAGGIVAIVVTCLAYYFMRFRRAFGEYSHVVAFNTLLFLMSFTVLCLTPVYSFLPGVYSVIYLYLTFYLTNDVSFLAHIQWMVMFTPLVPFWITIAYIICISTKHFYWFFSNYLKRRVVFNGVSFSTFEEAALCTFLLNKEMYLKLRSDVLLPLTQYNRYLALYNKYKYFSGAMDTTSYREVACCHLAKALNDFSNSGSDVLYQPPQTSITSAVLQ

SEQ ID NO: 16562 - protein, 501 aa, Artificial Sequence
  SARS-CoV-2__MT345869.1__non-structural protein 4 (NSP4)
MKIVNNWLKQLIKVTLVFLFVAAIFYLITPVHVMSKHTDFSSEIIGYKAIDGGVTRDIASTDTCFANKHADFDTWFSQRGGSYTNDKACPLIAAVITREVGFVVPGLPGTILRTTNGDFLHFLPRVFSAVGNICYTPSKLIEYTDFATSACVLAAECTIFKDASGKPVPYCYDTNVLEGSVAYESLRPDTRYVLMDGSIIQFPNTYLEGSVRVVTTFDSEYCRHGTCERSEAGVCVSTSGRWVLNNDYYRSLPGVFCGVDAVNLLTNMFTPLIQPIGALDISASIVAGGIVAIVVTCLAYYFMRFRRAFGEYSHVVAFNTLLFLMSFTVLCLTPVYSFLPGVYSVIYLYLTFYLTNDVSFLAHIQWMVMFTPLVPFWITIAYIICISTKHFYWFFSNYLKRRVVFNGVSFSTFEEAALCTFLLNKEMYLKLRSDVLLPLTQYNRYLALYNKYKYFSGAMDTTSYREAACCHLAKALNDFSNAGSDVLYQPPQTSITSAVLQ

SEQ ID NO: 16563 - protein, 501 aa, Artificial Sequence
  SARS-CoV-2__MT326052.1__non-structural protein 4 (NSP4)
MKIVNNWLKQLIKVTLVFLFVAAIFYLITPVHVMSKHTDFSSEIIGYKAIDGGVTRDIASTDTCFANKHADFDTWFSQRGGSYTNDKACPLIAAVITREVGFVVPGLPGTILRTTNGDFLHFLPRVFSAVGNICYTPSKLIEYTDFATSACVLAAECTIFKDASGKPVPYCYDTNVLEGSVAYESLRPDTRYVLMDGSIIQFPNTYLEGSVRVVTTFDSEYCRHGTCERSEAGVCVSTSGRWVLNNDYYRSLPGVFCGVDAVNLLTNMFTPLIQPIGALDISASIVAGGIVAIVVTCLAYYFMRFRRAFGEYSHVVAFNTLLFLMSFTVLCLTPVYSFLPGVYSVIYLYLTFYLTNDVSFLAHIQWMVMFTPLVPFWITIAYIICISTKHFYWFFSNYLKRRVVFNGVSFSTFEEAALCTFLLNKEMYLKLRSDVLLPLTQYNRYLALYNKYKYFSGAMDTTSYREAACCHLAKALNDFSNSGFDVLYQPPQTSITSAVLQ

SEQ ID NO: 16564 - protein, 501 aa, Artificial Sequence
  SARS-CoV-2__MT293186.1__non-structural protein 4 (NSP4)
MKIVNNWLKQLIKVTLVFLFVAAIFYLITPVHVMSKHTDFSSEIIGYKAIDGGVTRDIASTDTCFANKHADFDTWFSQRGGSYTNDKACPLIAAVITREVGFVVPGLPGTILRTTNGDFLHFLPRVFSAVGNICYTPSKLIEYTDFATSACVLAAECTIFKDASGKPVPYCYDTNVLEGSVAYESLRPDTRYVLMDGSIIQFPNTYLEGSVRVVTTFDSEYCRHGTCERSEAGVCVSTSGRWVLNNDYYRSLPGVFCGVDAVNLLTNMFTPLIQPIGALDISASIVAGGIVAIVVTCLAYYFMRFRRAFGEYSHVVAFNTLLFLMSFTVLCLTPVYSFLPGVYSVIYLYLTFYLTNDVSFFAHIQWMVMFTPLVPFWITIAYIICISTKHFYWFFSNYLKRRVVFNGVSFSTFEEAALCTFLLNKEMYLKLRSDVLLPLTQYNRYLALYNKYKYFSGAMDTTSYREAACCHLAKALNDFSNSGSDVLYQPPQTSITSAVLQ

SEQ ID NO: 16565 - protein, 501 aa, Artificial Sequence
  SARS-CoV-2__MT262993.1__non-structural protein 4 (NSP4)
MKIVNNWLKQLIKVTLVFLFVAAIFYLITPVHVMSKHTDFSSEIIGYKAIDGGVTRDIASTDTCFANKHADFDTWFSQRGGSYTNDKACPLIAAVITREVGFVVPGLPGTILRTTNGDFLHFLPRVFSAVGNICYTPSKLIEYTDFATSACVLAAECTIFKDASGKPVPYCYDTNVLEGSVAYESLRPDTRYVLMDGSIIQFPNTYLEGSVRVVTTFDSEYCRHGTCERSEAGVCVSTSGRWVLNNDYYRSLPGVFCGVDAVNLLTNMFTPLIQPIGALDISASIVAGGIVAIVVTCLAYYFMRFRRAFGEYSHVVAFNTLLFLMSFTVLCLTPVYSFLPGVYSVIYLYLTFYLTNDVSFLAHIQWMVMFTPLVPFWITIAYIICISTKHSNYLKRRVVFNGVSFSTFEEAALCTFLLNKEMYLKLRSDVLLPLTQYNRYLALYNKYKYFSGAMDTTSYREAACCHLAKALNDFSNSGSDVLYQPPQTSITSAVLQSGFRK

SEQ ID NO: 16566 - protein, 501 aa, Artificial Sequence
  SARS-CoV-2__MT263074.1__non-structural protein 4 (NSP4)
MKIVNNWLKQLIKVTLVFLFVAAIFYLITPVHVMSKHTDFSSEIIGYKAIDGGVTRDIASTDTCFANKHADFDTWFSQRGGSYTNDKACPLIAAVITREVGFVVPGLPGTILRTTNGDFLHFLPRVFSAVGDICYTPSKLIEYTDFATSACVLAAECTIFKDASGKPVPYCYDTNVLEGSVAYESLRPDTRYVLMDGSIIQFPNTYLEGSVRVVTTFDSEYCRHGTCERSEAGVCVSTSGRWVLNNDYYRSLPGVFCGVDAVNLLTNMFTPLIQPIGALDISASIVAGGIVAIVVTCLAYYFMRFRRAFGEYSHVVAFNTLLFLMSFTVLCLTPVYSFLPGVYSVIYLYLTFYLTNDVSFLAHIQWMVMFTPLVPFWITIAYIICISTKHFYWFFSNYLKRRVVFNGVSFSTFEEAALCTFLLNKEMYLKLRSDVLLPLTQYNRYLALYNKYKYFSGAMDTTSYREAACCHLAKALNDFSNSGSDVLYQPPQTSITSAVLQ

SEQ ID NO: 16567 - protein, 501 aa, Artificial Sequence
  SARS-CoV-2__MT263411.1__non-structural protein 4 (NSP4)
MKIVNNWLKQLIKVTLVFLFVAAIFYLITPVHVMSKHTDFSSEIIGYKAIDGGVTRDIASTDTCFANKHADFDTWFSQRGGSYTNDKACPLIAAVITREVGFVVPGLPGTILRTTNGDFLHFLPRVFSAVGNICYTPSKLIEYTDFATSACVLAAECTIFKDASGKPVPYCYDTNVLEGSVAYESLRPDTRYVLMDGSIIQFPNTYLEGSVRVVTTFDSEYCRHGTCERSEAGVCVSTSGRWVLNNDYYRSLPGVFCGVDAVNLLTNMFTPLIQPIGALDISASIVAGGIVAIVVTCLAYYFMRFRRAFGEYSHVVAFNTLLFLMSFNVLCLTPVYSFLPGVYSVIYLYLTFYLTNDVSFLAHIQWMVMFTPLVPFWITIAYIICISTKHFYWFFSNYLKRRVVFNGVSFSTFEEAALCTFLLNKEMYLKLRSDVLLPLTQYNRYLALYNKYKYFSGAMDTTSYREAACCHLAKALNDFSNSGSDVLYQPPQTSITSAVLQ

SEQ ID NO: 16568 - protein, 501 aa, Artificial Sequence
  SARS-CoV-2__MT240479.1__non-structural protein 4 (NSP4)
MKIVNNWLKQLIKVTLVFLFVAAIFYLITPVHVMSKHTDFSSEIIGYKAIDGGVTRDIASTDTCFANKHADFDTWFSQRGGSYTNDKACPLIAAVITREVGFVVPGLPGTILRTTNGDFLHFLPRVFSAVGNICYTPSKLIEYTDFATSACVLAAECTIFKDASGKPVPYCYDTNVLEGSVAYESLRPDTRYVLMDGSIIQFLNTYLEGSVRVVTTFDSEYCRHGTCERSEAGVCVSTSGRWVLNNDYYRSLPGVFCGVDAVNLLTNMFTPLIQPIGALDISASIVAGGIVAIVVTCLAYYFMRFRRAFGEYSHVVAFNTLLFLMSFTVLCLTPVYSFLPGVYSVIYLYLTFYLTNDVSFLAHIQWMVMFTPLVPFWITIAYIICISTKHFYWFFSNYLKRRVVFNGVSFSTFEEAALCTFLLNKEMYLKLRSDVLLPLTQYNRYLALYNKYKYFSGAMDTTSYREAACCHLAKALNDFSNSGSDVLYQPPQTSITSAVLQ

SEQ ID NO: 16569 - protein, 293 aa, Artificial Sequence
  MERS-CoV/MERS-CoV-Jeddah-human-1__KF958702.1__non-structural protein 6 (NSP6)
MSGVRKVTYGTAHWLFATLVSTYVIILQATKFTLWNYLFETIPTQLFPLLFVTMAFVMLLVKHKHTFLTLFLLPVAICLTYANIVYEPTTPISSALIAVANWLAPTNAYMRTTHTDIGVYISMSLVLVIVVKRLYNPSLSNFALALCSGVMWLYTYSIGEASSPIAYLVFVTTLTSDYTITVFVTVNLAKVCTYAIFAYSPQLTLVFPEVKMILLLYTCLGFMCTCYFGVFSLLNLKLRAPMGVYDFKVSTQEFRFMTANNLTAPRNSWEAMALNFKLIGIGGTPCIKVAAMQ

SEQ ID NO: 16570 - protein, 293 aa, Artificial Sequence; identical to SEQ ID NO: 16569
  MERS-CoV/Al-Hasa_4_2013__KF186564.1__non-structural protein 6 (NSP6)

SEQ ID NO: 16571 - protein, 293 aa, Artificial Sequence; identical to SEQ ID NO: 16569
  MERS-CoV/Riyadh_14_2013__KJ156934.1__non-structural protein 6 (NSP6)

SEQ ID NO: 16572 - protein, 293 aa, Artificial Sequence; identical to SEQ ID NO: 16569
  MERS-CoV/England 1__NC_038294.1__non-structural protein 6 (NSP6)

SEQ ID NO: 16573 - protein, 291 aa, Artificial Sequence
  SARS-CoV/Tor2__NC_004718.3__non-structural protein 6 (NSP6)
MGKFKKIVKGTHHWMLLTFLTSLLILVQSTQWSLFFFVYENAFLPFTLGIMAIAACAMLLVKHKHAFLCLFLLPSLATVAYFNMVYMPASWVMRIMTWLELADTSLSGYRLKDCVMYASALVLLILMTARTVYDDAARRVWTLMNVITLVYKVYYGNALDQAISMWALVISVTSNYSGVVTTIMFLARAIVFVCVEYYPLLFITGNTLQCIMLVYCFLGYCCCCYFGLFCLLNRYFRLTLGVYDYLVSTQEFRYMNSQGLLPPKSSIDAFKLNIKLLGIGGKPCIKVATVQ

SEQ ID NO: 16574 - protein, 288 aa, Artificial Sequence
  HCoV/OC43__NC_006213.1__non-structural protein 6 (NSP6)
MSKRTRLFKGTVCWIMASTFLFSCIITAFVKWTMFMYVTTNMFSITFCALCVISLAMLLVKHKHLYLTMYITPVLFTLLYNNYLVVYKHTFRGYVYAWLSYYVPSVEYTYTDEVIYGMLLLVGMVFVTLRSINHDLFSFIMFVGRLISVFSLWYKGSNLEEEILLMLASLFGTYTWTTVLSMAVAKVIAKWVAVNVLYFTDIPQIKIVLLCYLFIGYIISCYWGLFSLMNSLFRMPLGVYNYKISVQELRYMNANGLRPPKNSFEALMLNFKLLGIGGVPIIEVSQFQ

SEQ ID NO: 16575 - protein, 288 aa, Artificial Sequence
  HCoV/HKU1__NC_006577.2__non-structural protein 6 (NSP6)
MSKTKRFIKETIYWILISTFLFSCIISAFVKWTIFMYINTHMIGVTLCVLCFVSFMMLLVKHKHFYLTMYIIPVLCTLFYVNYLVVYKEGFRGFTYVWLSYFVPAVNFTYVYEVFYGCILCVFAIFITMHSINHDIFSLMFLVGRIVTLISMWYFGSNLEEDVLLFITAFLGTYTWTTILSLAIAKIVANWLSVNIFYFTDVPYIKLILLSYLFIGYILSCYWGFFSLLNSVFRMPMGVYNYKISVQELRYMNANGLRPPRNSFEAILLNLKLLGIGGVPVIEVSQIQ

SEQ ID NO: 16576 - protein, 280 aa, Artificial Sequence
  HCoV/229E/BN1/GER/2015__KU291448.1__non-structural protein 6 (NSP6)
MSGKTTSMFKSISLFAGFFVMFWAELFVYTTTIWVNPGFLTPFMILLVALSLCLTFVVKHKVLFLQVFLLPSIIVAAIQNCAWDYHITKVLAEKFDYNVSVMQMDIQGFVNIFICLFVALLHTWRFAKERCTHWCTYLFSLIAVLYTALYSYDYVSLLVMLLCAISNEWYIGAIIFRICRFGVAFLPVEYVSYFDGVKTVLLFYMLLGFVSCMYYGLLYWINRFCKCTLGVYDFCVSPAEFKYMVANGLNAPNGPFDALFLSFKLMGIGGPRTIKVSTVQ

SEQ ID NO: 16577 - protein, 280 aa, Artificial Sequence
  HCoV/NL63/RPTEC/2004__JX504050.1__non-structural protein 6 (NSP6)
MSGKVIFGLKTMFLFSVFFTMFWAELFIYTNTIWINPVILTPIFCLLLFLSLVLTMFLKHKFLFLQVFLLPTVIATALYNCVLDYYIVKFLADHFNYNVSVLQMDVQGLVNVLVCLFVVFLHTWRFSKERFTHWFTYVCSLIAVAYTYFYSGDFLSLLVMFLCAISSDWYIGAIVFRLSRLIVFFSPESVFSVFGDVKLTLVVYLICGYLVCTYWGILYWFNRFFKCTMGVYDFKVSAAEFKYMVANGLHAPHGPFDALWLSFKLLGIGGDRCIKISTVQ

SEQ ID NO: 16578 - protein, 291 aa, Artificial Sequence
  Bat SARS-like CoV/WIV1__KF367457.1__non-structural protein 6 (NSP6)
MGKFKKIVKGTHHWMLLTFLTSLLILVQSTQWSLFFFVYENAFLPFTLGIMAIAACAMLLVKHKHAFLCLFLLPSLATVAYFNMVYMPASWVMRIMTWFELADTSLSGYRLKDCVMYASALVLLILMTARTVYDDAARRVWTLMNVITLVYKVYYGNALDQAISMWALVISVTSNYSGVVTTIMFLARAIVFVCVEYYPLLFITGNTLQCIMLVYCFLGYCCCCYFGLFCLLNRYFRLTLGVYDYLVSTQEFRYMNSQGLLPPKSSIDAFKLNIKLLGIGGKPCIKVATVQ

SEQ ID NO: 16579 - protein, 291 aa, Artificial Sequence
  BatCoV/HKU9-1 BF_005I__NC_009021.1__non-structural protein 6 (NSP6)
MGKFQSMFRWTLQWFAIIFVLTILILLQLAQWTFVGALPFTLLLPLIGFVAVCVGFVSLLIKHKHTYLTVYLLPVAMVTAYYNFQYTPEGVQGYLLSLYNYVNPGRIDVIGTDLLTMLIISVACTLLSVRMVRTDAYSRIWYVCTAVGWLYNCWTGSADTVAISYLTFMVSVFTNYTGVACASLYAAQFMVWVLKFLDPTILLLYGRFRCVLVCYLLVGYLCTCYFGVFNLINRLFRCTLGNYEYVVSSQELRYMNSHGLLPPTNSWQALMLNIKLAGIGGIPIYRVSTIQ

SEQ ID NO: 16580 - protein, 281 aa, Artificial Sequence
  PEDV/NPL-PEDv/2013/P10__KJ778616.1__non-structural protein 6 (NSP6)
MSGYVSRACRNVLLVGSFLTFFWSELVSYTKFFWVNPGYVTPMFACLSLLSSLLMFTLKHKTLFFQVFLIPALIVTSCINLAFDVEVYNYLAEHFDYHVSLMGFNAQGLVNIFVCFVVTILHGTYTWRFFNTPVSSVTYVVALLTAAYNYFYASDILSCAMTLFASVTGNWFVGAVCYKAAVYMALRFPTFVAIFGDIKSVMFCYLVLGYFTCCFYGILYWFNRFFKVSVGVYDYTVSAAEFKYMVANGLRAPTGTLDSLLLSAKLIGIGGERNIKISSVQ

SEQ ID NO: 16581 - protein, 288 aa, Artificial Sequence
  MHV/A59__NC_048217.1__non-structural protein 6 (NSP6)
MSKRTRVIKGTCCWILASTFLFCSIISAFVKWTMFMYVTTHMLGVTLCALCFVSFAMLLIKHKHLYLTMYIMPVLCTLFYTNYLVVYKQSFRGLAYAWLSHFVPAVDYTYMDEVLYGVVLLVAMVFVTMRSINHDVFSIMFLVGRLVSLVSMWYFGANLEEEVLLFLTSLFGTYTWTTMLSLATAKVIAKWLAVNVLYFTDVPQIKLVLLSYLCIGYVCCCYWGILSLLNSIFRMPLGVYNYKISVQELRYMNANGLRPPRNSFEALMLNFKLLGIGGVPVIEVSQIQ

SEQ ID NO: 16582 - protein, 291 aa, Artificial Sequence
  SARS-CoV-2/Wuhan-Hu-1__NC_045512.2/MN908947.2/EPI_ISL_402128__non -structural protein 6 (NSP6)
MSAVKRTIKGTHHWLLLTILTSLLVLVQSTQWSLFFFLYENAFLPFAMGIIAMSAFAMMFVKHKHAFLCLFLLPSLATVAYFNMVYMPASWVMRIMTWLDMVDTSLSGFKLKDCVMYASAVVLLILMTARTVYDDGARRVWTLMNVLTLVYKVYYGNALDQAISMWALIISVTSNYSGVVTTVMFLARGIVFMCVEYCPIFFITGNTLQCIMLVYCFLGYFCTCYFGLFCLLNRYFRLTLGVYDYLVSTQEFRYMNSQGLLPPKNSIDAFKLNIKLLGVGGKPCIKVATVQ

SEQ ID NO: 16583 - protein, 291 aa, Artificial Sequence
  SARS-CoV-2__MT919768.1__non-structural protein 6 (NSP6)
MSAVKRTIKGTHHWLLLTILTSLLVLVQSTQWSLFFFFYENAFLPFAMGIIAMSAFAMMFVKHKHAFLCLFLLPSLATVAYFNMVYMPASWVMRIMTWLDMVDTSLSGFKLKDCVMYASAVVLLILMTARTVYDDGARRVWTLMNVLTLVYKVYYGNALDQAISMWALIISVTSNYSGVVTTVMFLARGIVFMCVEYCPIFFITGNTLQCIMLVYCFLGYFCTCYFGLFCLLNRYFRLTLGVYDYLVSTQEFRYMNSQGLLPPKNSIDAFKLNIKLLGVGGKPCIKVATVQ

SEQ ID NO: 16584 - protein, 291 aa, Artificial Sequence
  SARS-CoV-2__MT920039.1__non-structural protein 6 (NSP6)
MSAVKRTIKGTHHWLLLTILTSLLVLVQSTQWSLFFFLYENAFLPFAMGIIAMSAFAMMFVKHKHAFLCLFLLPSLATVAYFNMVYMPASWVMRIMTWLDMVDTSLSGFKLKDCVMYASAVVLLILVTARTVYDDGARRVWTLMNVLTLVYKVYYGNALDQAISMWALIISVTSNYSGVVTTVMFLARGIVFMCVEYCPIFFITGNTLQCIMLVYCFLGYFCTCYFGLFCLLNRYFRLTLGVYDYLVSTQEFRYMNSQGLLPPKNSIDAFKLNIKLLGVGGKPCIKVATVQ

SEQ ID NO: 16585 - protein, 291 aa, Artificial Sequence
  SARS-CoV-2__MT913118.1__non-structural protein 6 (NSP6)
MSAVKRTIKGTHHWLLLTILTSLLVLVQSTQWSLFFFLYENAFLPFAMGIIAMSAFAMMFVKHKHAFLCLFLLPSLATVAYFNVVYMPASWVMRIMTWLDMVDTSLSGFKLKDCVMYASAVVLLILMTARTVYDDGARRVWTLMNVLTLVYKVYYGNALDQAISMWALIISVTSNYSGVVTTVMFLARGIVFMCVEYCPIFFITGNTLQCIMLVYCFLGYFCTCYFGLFCLLNRYFRLTLGVYDYLVSTQEFRYMNSQGLLPPKNSIDAFKLNIKLLGVGGKPCIKVATVQ

SEQ ID NO: 16586 - protein, 291 aa, Artificial Sequence
  SARS-CoV-2__MT913130.1__non-structural protein 6 (NSP6)
MSAVKRTIKGTHHWLLLTILTSLLVLVQSTQWSLFFFLYENAFLPFAMGIIAMSAFAMMFVKHKHAFLCLFLLPSLATVAYFNMVYMPASWVMRIMTWLDMVDTSLSGFKLKDCVMYASAVVLLILMTARTVYDDGARRVWTLMNVLTLVYKVYYGNALDQAISMWALIISVTSNYSGVVTTVMFLARGIVFMCVEYCPIFFITGNTLQCIMLVYCFLGYFCTCYFGLFCLLNRYFRLTLGVYDYLVSTQEFRYMNSQGLLPPKNSIDAFRLNIKLLGVGGKPCIKVATVQ

SEQ ID NO: 16587 - protein, 291 aa, Artificial Sequence
  SARS-CoV-2__MT893668.1__non-structural protein 6 (NSP6)
MSAVKRTIKGTHHWLLLTILTSLLVLVQSTQWSLFFFLYENAFLPFAMGIIAMSAFAMMFVKHKHAFLCLFLLPSLATVAYFNMVYMPASWVMRIMTWLDMVDTSLSGFKLKDCVMYASAVVLLILMTARTVYDDGARRVWTLMNVLTLVYKVYYGNALDQAISMWALIISVTSNYSGVVTTVMFLARGIVFMCVEYCPIFFITGNTLQCIMLVYCFLGYFCTCYFGLFCLLNRYLRLTLGVYDYLVSTQEFRYMNSQGLLPPKNSIDAFKLNIKLLGVGGKPCIKVATVQ

SEQ ID NO: 16588 - protein, 291 aa, Artificial Sequence
  SARS-CoV-2__MT890238.1__non-structural protein 6 (NSP6)
MSAVKRTIKGTHHWLLLTILTSLLVLVQSTQWSLFFFLYENAFLPFAMGIIAMSAFAMMFVKHKHAFLCLFLLPSLATVAYFNMVYIPASWVMRIMTWLDMVDTSLSGFKLKDCVMYASAVVLLILMTARTVYDDGARRVWTLMNVLTLVYKVYYGNALDQAISMWALIISVTSNYSGVVTTVMFLARGIVFMCVEYCPIFFITGNTLQCIMLVYCFLGYFCTCYFGLFCLLNRYFRLTLGVYDYLVSTQEFRYMNSQGLLPPKNSIDAFKLNIKLLGVGGKPCIKVATVQ

SEQ ID NO: 16589 - protein, 291 aa, Artificial Sequence
  SARS-CoV-2__MT890355.1__non-structural protein 6 (NSP6)
MSAVKRTIKGTHHWLLLTILTSLLVLVQSTQWSLFFFLYENAFLPFAMGIIAMSAFAMMFVKHKHAFLCLFLLPSLATVAYFNMVYMPASWVMRIMTWLDMVDTSLSGFKLKDCVMYASAVVLLILMTARTVYDDGARRVWTLMNVLTLVYKVYYGNALDQAISMWALIISVTSNYSGVVTTVMFLARGIVFMCVEYCPIFFITGNTLHCIMLVYCFLGYFCTCYFGLFCLLNRYFRLTLGVYDYLVSTQEFRYMNSQGLLPPKNSIDAFKLNIKLLGVGGKPCIKVATVQ

SEQ ID NO: 16590 - protein, 291 aa, Artificial Sequence
  SARS-CoV-2__MT889692.1__non-structural protein 6 (NSP6)
MSAVKRTIKGTHHWLLLTILTSLLVLVQSTQWSLFFFLYENAFLPFAMGIIAMSAFAMMFVKHKNAFLCLFLLPSLATVAYFNMVYMPASWVMRIMTWLDMVDTSLSGFKLKDCVMYASAVVLLILMTARTVYDDGARRVWTLMNVLTLVYKVYYGNALDQAISMWALIISVTSNYSGVVTTVMFLARGIVFMCVEYCPIFFITGNTLQCIMLVYCFLGYFCTCYFGLFCLLNRYFRLTLGVYDYLVSTQEFRYMNSQGLLPPKNSIDAFKLNIKLLGVGGKPCIKVATVQ

SEQ ID NO: 16591 - protein, 291 aa, Artificial Sequence
  SARS-CoV-2__MT886314.1__non-structural protein 6 (NSP6)
MSAVKRTIKGTHHWLLLTILTSLLVLVQSTQWSLFFFLYENAFLPFAMGIIAMSAFAMMFVKHKHAFLCLFLLPSLATVAYFNMVYMPASWVMRIMTWLDMVDTSLSGFKLKDCVMYASAVVLLILMTARTVYDDGARRVWTLMNVLTLVYKVYYGNALDQAISMWALIISVTSNYSGVVTTVMFLARSIVFMCVEYCPIFFITGNTLQCIMLVYCFLGYFCTCYFGLFCLLNRYFRLTLGVYDYLVSTQEFRYMNSQGLLPPKNSIDAFKLNIKLLGVGGKPCIKVATVQ

SEQ ID NO: 16592 - protein, 291 aa, Artificial Sequence
  SARS-CoV-2__MT886376.1__non-structural protein 6 (NSP6)
MSAVKRTIKGTHHWLLLTILTSLLVLVQSTQWSLFFFLYENAFLPFAMGIIAMSAFAMMFVKHKHAFLCLFLLPSLATVAYFNMFYMPASWVMRIMTWLDMVDTSLSGFKLKDCVMYASAVVLLILMTARTVYDDGARRVWTLMNVLTLVYKVYYGNALDQAISMWALIISVTSNYSGVVTTVMFLARGIVFMCVEYCPIFFITGNTLQCIMLVYCFLGYFCTCYFGLFCLLNRYFRLTLGVYDYLVSTQEFRYMNSQGLLPPKNSIDAFKLNIKLLGVGGKPCIKVATVQ

SEQ ID NO: 16593 - protein, 291 aa, Artificial Sequence
  SARS-CoV-2__MT873090.1__non-structural protein 6 (NSP6)
MSAVKRTIKGTHHWLLLTILTSLLVLVQSTQWSLFFFLYENAFLPFAMGIIAMSAFAMMFVKHKHAFLCLFLLPSLATVAYFNMVYMPASWVMRIMTWLDMVDTSLSGFKLKDCVMYASAVVLLILMTARTVYDDGARRVWTLMNVLTLVYKVYYGNALDQVISMWALIISVTSNYSGVVTTVMFLARGIVFMCVEYCPIFFITGNTLQCIMLVYCFLGYFCTCYFGLFCLLNRYFRLTLGVYDYLVSTQEFRYMNSQGLLPPKNSIDAFKLNIKLLGVGGKPCIKVATVQ

SEQ ID NO: 16594 - protein, 291 aa, Artificial Sequence
  SARS-CoV-2__MT873137.1__non-structural protein 6 (NSP6)
MSAVKRTIKGTHHWLLLTILTSLLVLVQSTQWSLFFFLYENAFLPFAMGIIAMSAFAMMFVKHKHAFLCLFLLPSLATVAYFNMVYMPASWVMRIMTWLDMVDTSLSGFKLKDCVMYASAVVLLILMTARTVYDDGARRVWTLMNVLTLFYKVYYGNALDQAISMWALIISVTSNYSGVVTTVMFLARGIVFMCVEYCPIFFITGNTLQCIMLVYCFLGYFCTCYFGLFCLLNRYFRLTLGVYDYLVSTQEFRYMNSQGLLPPKNSIDAFKLNIKLLGVGGKPCIKVATVQ

SEQ ID NO: 16595 - protein, 291 aa, Artificial Sequence
  SARS-CoV-2__MT873178.1__non-structural protein 6 (NSP6)
MSAVKRTIKGTHHWLLLTILTSLLVLVQSTQWSLFFFLYENAFLPFAMGIIAMSAFAMMFVKHKHAFLCLFLLPSLATVAYFNMVYMPASWVMRIMTWLDMVDTSLSGFKLKDCVMYASAVVLLILMTARTVYDDGARRVWTLMNVLTLVYKVYYGNALDQAISMWALIISVTSNYSGVVTTVMFLARGIVFMCVEYCPIFFITGNTLQCIMLVYCFLGYFCTCYFGLFCLLNRYFRLTLGVYDYLVSTQEFRYMNSQGLLPPKNSIGAFKLNIKLLGVGGKPCIKVATVQ

SEQ ID NO: 16596 - protein, 291 aa, Artificial Sequence
  SARS-CoV-2__MT873456.1__non-structural protein 6 (NSP6)
MSAVKRTIKGTHHWLLLTILTSLLVLVQSTQWSLFFFLYENAFLPFAMGIIAMSAFAMMFVKHKHAFLCLFLLPSLATVAYFNMVYMPASWVMRIMTWLDMVDTSLSGFKLKDCVMYASAVVLLILMTARTVYDDGARRVWTLMNVLTLVYKVYYGNALNQAISMWALIISVTSNYSGVVTTVMFLARGIVFMCVEYCPIFFITGNTLQCIMLVYCFLGYFCTCYFGLFCLLNRYFRLTLGVYDYLVSTQEFRYMNSQGLLPPKNSIDAFKLNIKLLGVGGKPCIKVATVQ

SEQ ID NO: 16597 - protein, 291 aa, Artificial Sequence
  SARS-CoV-2__MT876554.1__non-structural protein 6 (NSP6)
MSAVKRTIKGTHHWLLLTILTSLLFLVQSTQWSLFFFLYENAFLPFAMGIIAMSAFAMMFVKHKHAFLCLFLLPSLATVAYFNMVYMPASWVMRIMTWLDMVDTSLSGFKLKDCVMYASAVVLLILMTARTVYDDGARRVWTLMNVLTLVYKVYYGNALDQAISMWALIISVTSNYSGVVTTVMFLARGIVFMCVEYCPIFFITGNTLQCIMLVYCFLGYFCTCYFGLFCLLNRYFRLTLGVYDYLVSTQEFRYMNSQGLLPPKNSIDAFKLNIKLLGVGGKPCIKVATVQ

SEQ ID NO: 16598 - protein, 291 aa, Artificial Sequence
  SARS-CoV-2__MT876555.1__non-structural protein 6 (NSP6)
MSAVKRTIKGTHHWLLLTILTSILVLVQSTQWSLFFFLYENAFLPFAMGIIAMSAFAMMFVKHKHAFLCLFLLPSLATVAYFNMVYMPASWVMRIMTWLDMVDTSLSGFKLKDCVMYASAVVLLILMTARTVYDDGARRVWTLMNVLTLVYKVYYGNALDQAISMWALIISVTSNYSGVVTTVMFLARGIVFMCVEYCPIFFITGNTLQCIMLVYCFLGYFCTCYFGLFCLLNRYFRLTLGVYDYLVSTQEFRYMNSQGLLPPKNSIDAFKLNIKLLGVGGKPCIKVATVQ

SEQ ID NO: 16599 - protein, 291 aa, Artificial Sequence
  SARS-CoV-2__MT877304.1__non-structural protein 6 (NSP6)
MSAVKRTIKGTHHWLLLTILTSLLVLVQSTQWSLFFFLYENAFLPFAMGIIAMSAFAMMFIKHKHAFLCLFLLPSLATVAYFNMVYMPASWVMRIMTWLDMVDTSLSGFKLKDCVMYASAVVLLILMTARTVYDDGARRVWTLMNVLTLVYKVYYGNALDQAISMWALIISVTSNYSGVVTTVMFLARGIVFMCVEYCPIFFITGNTLQCIMLVYCFLGYFCTCYFGLFCLLNRYFRLTLGVYDYLVSTQEFRYMNSQGLLPPKNSIDAFKLNIKLLGVGGKPCIKVATVQ

SEQ ID NO: 16600 - protein, 291 aa, Artificial Sequence
  SARS-CoV-2__MT873803.1__non-structural protein 6 (NSP6)
MSAVKRTIKGTHHWLLLTILTSLLVLVQSTQWSLFFFLYENAFLPFAMGIIAMSAFAMMFVKHKHAFLCLFLLPSLATVAYFNMVYMPASWVMRIMTWLDMVDTSLSGFKLKDCVMYASAVVLLILMTARTVYDDGVRRVWTLMNVLTLVYKVYYGNALDQAISMWALIISVTSNYSGVVTTVMFLARGIVFMCVEYCPIFFITGNTLQCIMLVYCFLGYFCTCYFGLFCLLNRYFRLTLGVYDYLVSTQEFRYMNSQGLLPPKNSIDAFKLNIKLLGVGGKPCIKVATVQ

SEQ ID NO: 16601 - protein, 291 aa, Artificial Sequence
  SARS-CoV-2__MT856453.1__non-structural protein 6 (NSP6)
MSAVKRTIKGTHHWLLLTILTSLLVLVQSTQWSLFFFLYENAFLPFAMGIIAMSAFAMMFVKHKHAFLCLFLLPSLATVAYFNMVYMPASWVMRIMTWLDMVDTSLSGFKLKDCVMYASAVVLLTLMTARTVYDDGARRVWTLMNVLTLVYKVYYGNALDQAISMWALIISVTSNYSGVVTTVMFLARGIVFMCVEYCPIFFITGNTLQCIMLVYCFLGYFCTCYFGLFCLLNRYFRLTLGVYDYLVSTQEFRYMNSQGLLPPKNSIDAFKLNIKLLGVGGKPCIKVATVQ

SEQ ID NO: 16602 - protein, 291 aa, Artificial Sequence
  SARS-CoV-2__MT856455.1__non-structural protein 6 (NSP6)
MSAVKRTIKGTHHWLLLTILTSLLVLVQSTQWSLFFFLYENAFLPFAMGIIAMSAFAMMFVKHKHAFLCLFLLPSLATVAYFNMVYMPASWVMRIMTWLDMVDTSLSGFKLKDCVMYASAVVLLILMTARTVYDDGARRVWTLMNVLTLVYKVYYGNALDQAISMWALIISVTSNYSGVVTTVMFLARGIVFMCVEYCPIFFITGNTLQCVMLVYCFLGYFCTCYFGLFCLLNRYFRLTLGVYDYLVSTQEFRYMNSQGLLPPKNSIDAFKLNIKLLGVGGKPCIKVATVQ

SEQ ID NO: 16603 - protein, 291 aa, Artificial Sequence
  SARS-CoV-2__MT846438.1__non-structural protein 6 (NSP6)
MSAVKRTIKGTHHWLLLTILTSLLVLVQSTQWSLFFFLYENAFLPFAMGIIVMSAFAMMFVKHKHAFLCLFLLPSLATVAYFNMVYMPASWVMRIMTWLDMVDTSLSGFKLKDCVMYASAVVLLILMTARTVYDDGARRVWTLMNVLTLVYKVYYGNALDQAISMWALIISVTSNYSGVVTTVMFLARGIVFMCVEYCPIFFITGNTLQCIMLVYCFLGYFCTCYFGLFCLLNRYFRLTLGVYDYLVSTQEFRYMNSQGLLPPKNSIDAFKLNIKLLGVGGKPCIKVATVQ

SEQ ID NO: 16604 - protein, 291 aa, Artificial Sequence
  SARS-CoV-2__MT846506.1__non-structural protein 6 (NSP6)
MSAVKRTIKGTHHWLLLTILTSLLVLVQSTQWSLFFFLYENAFLPFAMGIIAMSAFAMMFVKHKHAFLCLFLLPSLATVAYFNMVYMPASWVMRIMTWLDMVDTSLSGFKLKDCVMYASAVVLLILMTARTVYDDGARRVWTLMNVLTLVYKVYYGNALDQAISMWALIISVTSNYSGVVTTVMFLARGIVFMCVEYCPIFFITGNTLQCIMLVYCFLGYFCTCYFGLFCLLNRYFRLTLGVYDYLVSTQEFRYMNSQGLLPPKNSIEAFKLNIKLLGVGGKPCIKVATVQ

SEQ ID NO: 16605 - protein, 291 aa, Artificial Sequence
  SARS-CoV-2__MT846514.1__non-structural protein 6 (NSP6)
MSAVKRTIKGTHHWLLLTILTSLLVLVQSTQWSLFFFLYENAFLPFAMGIIAMSAFAMMFVKHKHAFLCLFLLPSLATVAYFNMVYMPASWVMRIMTWLDMVDTSLSGFKLKDCVMYASAVVLLILMTARTVYDDGARRVWTLMNVLTLVYKVYYGNALDQAISMWALIISVTSNYSGVVTTVMFLARGIVFMCVEYCPIFFITGNTLQCIMLVYCFLGYFCTCYFGLFCLLNRYFRLTLGVYDYLVSTQEFRYMNSQGLLPPNNSIDAFKLNIKLLGVGGKPCIKVATVQ

SEQ ID NO: 16606 - protein, 291 aa, Artificial Sequence
  SARS-CoV-2__MT843314.1__non-structural protein 6 (NSP6)
MSAVKRTIKGTHHWLLLTILTSLLVLVQSTQWSLFFFLYENAFLPFVMGIIAMSAFAMMFVKHKHAFLCLFLLPSLATVAYFNMVYMPASWVMRIMTWLDMVDTSLSGFKLKDCVMYASAVVLLILMTARTVYDDGARRVWTLMNVLTLVYKVYYGNALDQAISMWALIISVTSNYSGVVTTVMFLARGIVFMCVEYCPIFFITGNTLQCIMLVYCFLGYFCTCYFGLFCLLNRYFRLTLGVYDYLVSTQEFRYMNSQGLLPPKNSIDAFKLNIKLLGVGGKPCIKVATVQ

SEQ ID NO: 16607 - protein, 291 aa, Artificial Sequence
  SARS-CoV-2__MT831149.1__non-structural protein 6 (NSP6)
MSAVKRTIKGTHHWLLLTILTSLLVLVQSTQWSLFFFLYENAFLPFAMGIIAMSAFAMMFVKHKHAFLCLFLLPSLATVAYFNMVYMPASWVMRIMTWLDMVDTSLSGFKLKDCVMYASAVVLLILMTARTVYDDGARRVWTLMNVLTLVYKVYYGNALDQAISMWAFIISVTSNYSGVVTTVMFLARGIVFMCVEYCPIFFITGNTLQCIMLVYCFLGYFCTCYFGLFCLLNRYFRLTLGVYDYLVSTQEFRYMNSQGLLPPKNSIDAFKLNIKLLGVGGKPCIKVATVQ

SEQ ID NO: 16608 - protein, 291 aa, Artificial Sequence
  SARS-CoV-2__MT831152.1__non-structural protein 6 (NSP6)
MSAVKRTINGTHHWLLLTILTSLLVLVQSTQWSLFFFLYENAFLPFAMGIIAMSAFAMMFVKHKHAFLCLFLLPSLATVAYFNMVYMPASWVMRIMTWLDMVDTSLSGFKLKDCVMYASAVVLLILMTARTVYDDGARRVWTLMNVLTLVYKVYYGNALDQAISMWALIISVTSNYSGVVTTVMFLARGIVFMCVEYCPIFFITGNTLQCIMLVYCFLGYFCTCYFGLFCLLNRYFRLTLGVYDYLVSTQEFRYMNSQGLLPPKNSIDAFKLNIKLLGVGGKPCIKVATVQ

SEQ ID NO: 16609 - protein, 291 aa, Artificial Sequence
  SARS-CoV-2__MT831226.1__non-structural protein 6 (NSP6)
MSAVKRTIKGTHHWLLLTNLTSLLVLVQSTQWSLFFFLYENAFLPFAMGIIAMSAFAMMFVKHKHAFLCLFLLPSLATVAYFNMVYMPASWVMRIMTWLDMVDTSLSGFKLKDCVMYASAVVLLILMTARTVYDDGARRVWTLMNVLTLVYKVYYGNALDQAISMWALIISVTSNYSGVVTTVMFLARGIVFMCVEYCPIFFITGNTLQCIMLVYCFLGYFCTCYFGLFCLLNRYFRLTLGVYDYLVSTQEFRYMNSQGLLPPKNSIDAFKLNIKLLGVGGKPCIKVATVQ

SEQ ID NO: 16610 - protein, 291 aa, Artificial Sequence
  SARS-CoV-2__MT831341.1__non-structural protein 6 (NSP6)
MSAVKRTIKGTHHWLLLTILTSLLVLVQSTQWSLFFFFYENAFLPFAMGIIAMSAFAMMFVKHKHAFLCLFLLPSLATVAYFNMVYMPASWVMRIMTWLDMVDTSLSGFKLKDCVMYASAVVLLILMTARTVYDDGARRVWTLMNVLTLFYKVYYGNALDQAISMWALIISVTSNYSGVVTTVMFLARGIVFMCVEYCPIFFITGNTLQCIMLVYCFLGYFCTCYFGLFCLLNRYFRLTLGVYDYLVSTQEFRYMNSQGLLPPKNSIDAFKLNIKLLGVGGKPCIKVATVQ

SEQ ID NO: 16611 - protein, 291 aa, Artificial Sequence
  SARS-CoV-2__MT831729.1__non-structural protein 6 (NSP6)
MSAVKRTIKGTHHWLLLTILTSLLVLVQSTQWSLFFFLYENAFLPFAMGIIAMSAFAMMFVKHKHAFLCLFLLPSLATVAYFNMVYMPASWVMRIMTWLDMVDTSLSGFKLKDCVMYVSAVVLLILMTARTVYDDGARRVWTLMNVLTLVYKVYYGNALDQAISMWALIISVTSNYSGVVTTVMFLARGIVFMCVEYCPIFFITGNTLQCIMLVYCFLGYFCTCYFGLFCLLNRYFRLTLGVYDYLVSTQEFRYMNSQGLLPPKNSIDAFKLNIKLLGVGGKPCIKVATVQ

SEQ ID NO: 16612 - protein, 291 aa, Artificial Sequence
  SARS-CoV-2__MT834038.1__non-structural protein 6 (NSP6)
MSAVKRTIKGTHHWLLLTILTSLLVLVQSTQWSLFFFLYENAFLPFAMGIIAMSAFAMMFVKHKHAFLCLFLLPSLATVAYFNMVYMPASWVMRIMTWLDMVDTSLSGFKLKDCGMYASAVVLLILMTARTVYDDGARRVWTLMNVLTLVYKVYYGNALDQAISMWALIISVTSNYSGVVTTVMFLARGIVFMCVEYCPIFFITGNTLQCIMLVYCFLGYFCTCYFGLFCLLNRYFRLTLGVYDYLVSTQEFRYMNSQGLLPPKNSIDAFKLNIKLLGVGGKPCIKVATVQ

SEQ ID NO: 16613 - protein, 291 aa, Artificial Sequence
  SARS-CoV-2__MT834100.1__non-structural protein 6 (NSP6)
MSAVKRTIKGTYHWLLLTILTSLLVLVQSTQWSLFFFLYENAFLPFAMGIIAMSAFAMMFVKHKHAFLCLFLLPSLATVAYFNMVYMPASWVMRIMTWLDMVDTSLSGFKLKDCVMYASAVVLLILMTARTVYDDGARRVWTLMNVLTLVYKVYYGNALDQAISMWALIISVTSNYSGVVTTVMFLARGIVFMCVEYCPIFFITGNTLQCIMLVYCFLGYFCTCYFGLFCLLNRYFRLTLGVYDYLVSTQEFRYMNSQGLLPPKNSIDAFKLNIKLLGVGGKPCIKVATVQ

SEQ ID NO: 16614 - protein, 291 aa, Artificial Sequence
  SARS-CoV-2__MT834849.1__non-structural protein 6 (NSP6)
MSAVKRTIKGTHHWLLLTILTSLLVLVQSTQWSLFFFLYENAFLPFAMGIIAMSAFAMMFVKHKHAFLCLFLLPSLATVAYFNMVYMPASWVMRIMTWLDMVDTSLSGFKLKDCVMYASAVVLLILMTARTVYDDGARRVWTLMNVLTLAYKVYYGNALDQAISMWALIISVTSNYSGVVTTVMFLARGIVFMCVEYCPIFFITGNTLQCIMLVYCFLGYFCTCYFGLFCLLNRYFRLTLGVYDYLVSTQEFRYMNSQGLLPPKNSIDAFKLNIKLLGVGGKPCIKVATVQ

SEQ ID NO: 16615 - protein, 291 aa, Artificial Sequence
  SARS-CoV-2__MT825091.1__non-structural protein 6 (NSP6)
MSAVKRTIKGTHHWLLLTILTSLLVLVQSTQWSLFFFLYENAFLPFAMDIIAMYAFAMMFVKHKNAFLYLYLLPSLATVAYFNMVYMLASWVMRIMTWLDMGDTSLSGFKLKDCVMYASGVVLLILMTARTVYDDGARRVLTLMNVLTLVYKVYYGNALDQAISMWALIISVTSNYSGVVTTVMSLARDIVFMCVEYCPIFFITGNTLQCIMLVYCFLGYSYTCYFGLFCLLNRYFRLTLGVYDYLVSTQEFRYMNSQGLLPPKNSIDAFKLNIKLLGVGGKPCIKVATVQ

SEQ ID NO: 16616 - protein, 291 aa, Artificial Sequence
  SARS-CoV-2__MT821674.1__non-structural protein 6 (NSP6)
MSAVKRTIKGTHHWLLLTILTSLLVLVQSTQWSLFFFLYENVFLPFAMGIIAMSAFAMMFVKHKHAFLCLFLLPSLATVAYFNMVYMPASWVMRIMTWLDMVDTSLSGFKLKDCVMYASAVVLLILMTARTVYDDGARRVWTLMNVLTLVYKVYYGNALDQAISMWALIISVTSNYSGVVTTVMFLARGIVFMCVEYCPIFFITGNTLQCIMLVYCFLGYFCTCYFGLFCLLNRYFRLTLGVYDYLVSTQEFRYMNSQGLLPPKNSIDAFKLNIKLLGVGGKPCIKVATVQ

SEQ ID NO: 16617 - protein, 291 aa, Artificial Sequence
  SARS-CoV-2__MT821782.1__non-structural protein 6 (NSP6)
MSAVKRTIKGTHHWLLLTILTSFLVLVQSTQWSLFFFLYENAFLPFAMGIIAMSAFAMMFVKHKHAFLCLFLLPSLATVAYFNMVYMPASWVMRIMTWLDMVDTSLSGFKLKDCVMYASAVVLLILMTARTVYDDGARRVWTLMNVLTLVYKVYYGNALDQAISMWALIISVTSNYSGVVTTVMFLARGIVFMCVEYCPIFFITGNTLQCIMLVYCFLGYFCTCYFGLFCLLNRYFRLTLGVYDYLVSTQEFRYMNSQGLLPPKNSIDAFKLNIKLLGVGGKPCIKVATVQ

SEQ ID NO: 16618 - protein, 291 aa, Artificial Sequence
  SARS-CoV-2__MT821787.1__non-structural protein 6 (NSP6)
MSAVKRTIKGTHHWLLLTILTSLLVLVQSTQWSLFFFLYENAFLPFAMGIIAMSAFAMMFVKHKHAFLCLFLLPSLATVVYFNMVYMPASWVMRIMTWLDMVDTSLSGFKLKDCVMYASAVVLLILMTARTVYDDGARRVWTLMNVLTLVYKVYYGNALDQAISMWALIISVTSNYSGVVTTVMFLARGIVFMCVEYCPIFFITGNTLQCIMLVYCFLGYFCTCYFGLFCLLNRYFRLTLGVYDYLVSTQEFRYMNSQGLLPPKNSIDAFKLNIKLLGVGGKPCIKVATVQ

SEQ ID NO: 16619 - protein, 291 aa, Artificial Sequence
  SARS-CoV-2__MT810523.1__non-structural protein 6 (NSP6)
MSAVKRTIKGTHHWLLLTILTSLLVLVQSTQWSLFFFLYENAFLPFAMGIIAMSAFSMMFVKHKHAFLCLFLLPSLATVAYFNMVYMPASWVMRIMTWLDMVDTSLSGFKLKDCVMYASAVVLLILMTARTVYDDGARRVWTLMNVLTLVYKVYYGNALDQAISMWALIISVTSNYSGVVTTVMFLARGIVFMCVEYCPIFFITGNTLQCIMLVYCFLGYFCTCYFGLFCLLNRYFRLTLGVYDYLVSTQEFRYMNSQGLLPPKNSIDAFKLNIKLLGVGGKPCIKVATVQ

SEQ ID NO: 16620 - protein, 291 aa, Artificial Sequence
  SARS-CoV-2__MT810568.1__non-structural protein 6 (NSP6)
MSAVKRTIKGTHHWLLLTILTSLLVLVQSTQWSLFFFLYENAFLSFAMGIIAMSAFAMMFVKHKHAFLCLFLLPSLATVAYFNMVYMPASWVMRIMTWLDMVDTSLSGFKLKDCVMYASAVVLLILMTARTVYDDGARRVWTLMNVLTLVYKVYYGNALDQAISMWALIISVTSNYSGVVTTVMFLARGIVFMCVEYCPIFFITGNTLQCIMLVYCFLGYFCTCYFGLFCLLNRYFRLTLGVYDYLVSTQEFRYMNSQGLLPPKNSIDAFKLNIKLLGVGGKPCIKVATVQ

SEQ ID NO: 16621 - protein, 291 aa, Artificial Sequence
  SARS-CoV-2__MT810731.1__non-structural protein 6 (NSP6)
MSAVKRTIKGTHHWLLLTILTSLLVLVQSTQWSLFFFLYENAFLPFAMGIIAMSAFAMMFVKHKHAFLCLFLLPSLATVAYFNMVYMPASWVMRIMTWLDMVDTSLFGFKLKDCVMYASAVVLLILMTARTVYDDGARRVWTLMNVLTLVYKVYYGNALDQAISMWALIISVTSNYSGVVTTVMFLARGIVFMCVEYCPIFFITGNTLQCIMLVYCFLGYFCTCYFGLFCLLNRYFRLTLGVYDYLVSTQEFRYMNSQGLLPPKNSIDAFKLNIKLLGVGGKPCIKVATVQ

SEQ ID NO: 16622 - protein, 291 aa, Artificial Sequence
  SARS-CoV-2__MT811234.1__non-structural protein 6 (NSP6)
MSAVKRTIKGTHHWLLLTILTSLLVLVQSTQWSLFFFLYENAFLPFAMGIIAMSAFAMMFVKHKHAFLCLFLLPSLATVAYFNMVYMPASWLMRIMTWLDMVDTSLSGFKLKDCVMYASAVVLLILMTARTVYDDGARRVWTLMNVLTLVYKVYYGNALDQAISMWALIISVTSNYSGVVTTVMFLARGIVFMCVEYCPIFFITGNTLQCIMLVYCFLGYFCTCYFGLFCLLNRYFRLTLGVYDYLVSTQEFRYMNSQGLLPPKNSIDAFKLNIKLLGVGGKPCIKVATVQ

SEQ ID NO: 16623 - protein, 291 aa, Artificial Sequence
  SARS-CoV-2__MT811513.1__non-structural protein 6 (NSP6)
MSAVKRTIKGTHHWLLLTILTSLLVLVQSTQWFLFFFLYENAFLPFAMGIIAMSAFAMMFVKHKHAFLCLFLLPSLATVAYFNMVYMPASWVMRIMTWLDMVDTSLSGFKLKDCVMYASAVVLLILMTARTVYDDGARRVWTLMNVLTLVYKVYYGNALDQAISMWALIISVTSNYSGVVTTVMFLARGIVFMCVEYCPIFFITGNTLQCIMLVYCFLGYFCTCYFGLFCLLNRYFRLTLGVYDYLVSTQEFRYMNSQGLLPPKNSIDAFKLNIKLLGVGGKPCIKVATVQ

SEQ ID NO: 16624 - protein, 291 aa, Artificial Sequence
  SARS-CoV-2__MT811530.1__non-structural protein 6 (NSP6)
MSAVKRTIKGTHHWLLLTILTSLLVLVQSTQWSLFFFLYENAFLPFAMGIIAMSAFAMMFVKHKHAFLCLFLLPSLATVAYFNMVYMPASWVMRIMTWLDMVDTSLSGFKLKDCVMYASAVVLLILMTARTVYDDGARRVWTLMNVLTLVYKVYYGNALDQAISMWALIISVTSNYSGVVTTVMFLARGIVFMCVEYCPIFFITGNTLQCIMLVYCFLGYFCTCYFGLFCLLNRYFRLTLGVYDYLVSTQEFRYMNSHGLLPPKNSIDAFKLNIKLLGVGGKPCIKVATVQ

SEQ ID NO: 16625 - protein, 291 aa, Artificial Sequence
  SARS-CoV-2__MT811552.1__non-structural protein 6 (NSP6)
MSAVKRTIKGTHHWLLLTILTSLLVLVQSTQWSLFFFFFYENAFLPFAMGIIAMSAFAMMFVKHKHAFLCLFLLPSLATVAYFNMVYMPASWVMRIMTWLDMVDTSLSGFKLKDCVMYASAVVLLILMTARTVYDDGARRVWTLMNVLTLVYKVYYGNALDQAISMWALIISVTSNYSGVVTTVMFLARGIVFMCVEYCPIFFITGNTLQCIMLVYCFLGYFCTCYFGLFCLLNRYFRLTLGVYDYLVSTQEFRYMNSQGLLPPKNSIDAFKLNIKLLGVGGKPCIKVATV

SEQ ID NO: 16626 - protein, 291 aa, Artificial Sequence
  SARS-CoV-2__MT800794.1__non-structural protein 6 (NSP6)
MSAVKRTIKGTHHWLLLTILTSLLVLVQSTQWSLFFFLYENAFLPFAMGIIAMSAFAMMFVKHKHAFLCLFLLPSLATVAYFNMVYMPASWVMRIMTWLDMVDTSLSGFKLKDCVMYASAVVLLILMTARTVYDDGARRVWTFMNVLTLVYKVYYGNALDQAISMWALIISVTSNYSGVVTTVMFLARGIVFMCVEYCPIFFITGNTLQCIMLVYCFLGYFCTCYFGLFCLLNRYFRLTLGVYDYLVSTQEFRYMNSQGLLPPKNSIDAFKLNIKLLGVGGKPCIKVATVQ

SEQ ID NO: 16627 - protein, 291 aa, Artificial Sequence
  SARS-CoV-2__MT786438.1__non-structural protein 6 (NSP6)
MSAVKRTIKGTYHWLLLTILTSLLVLVQSTQWSLFFFFYENAFLPFAMGIIAMSAFAMMFVKHKHAFLCLFLLPSLATVAYFNMVYMPASWVMRIMTWLDMVDTSLSGFKLKDCVMYASAVVLLILMTARTVYDDGARRVWTLMNVLTLVYKVYYGNALDQAISMWALIISVTSNYSGVVTTVMFLARGIVFMCVEYCPIFFITGNTLQCIMLVYCFLGYFCTCYFGLFCLLNRYFRLTLGVYDYLVSTQEFRYMNSQGLLPPKNSIDAFKLNIKLLGVGGKPCIKVATVQ

SEQ ID NO: 16628 - protein, 291 aa, Artificial Sequence
  SARS-CoV-2__MT786845.1__non-structural protein 6 (NSP6)
MSAVKRTIKGTHHWLLLTILTSLLVLVQSTQWSLFFFLYENAFLPFAMGIIAMSAFAMMFVKHKHAFLCLFLLPSLATVAYFNMVYMPASWVMRIMTWLDMVDTSLSGFKLKDCVMYASAVVLLILMTARTVYDDGARRVWTLMNVLTLVYKVYYGNALDQAISMWALIISVTSNYSGVVTTVMFLARGIVFMCVEYCPIFFITGNTLQCIMLVYCFLGYFCTCYFGLFCLLNRYFRLTLGVYDYLVSTQEFRYMNSQGLFPPKNSIDAFKLNIKLLGVGGKPCIKVATVQ

SEQ ID NO: 16629 - protein, 291 aa, Artificial Sequence
  SARS-CoV-2__MT764170.1__non-structural protein 6 (NSP6)
MSAVKRTIKGTHHWLLLTILTSLLVLVQSTQWSLFFFLYENAFLPFAMGIIAMSAFAMMFVKHKHAFLCLFLLPSLATVAYFNMVYMPASWVMRIMTWLDMVDTSLSGFKLKDCVMYASAVVLLILMTARTVYDDGARRVWTLMNVLTLVYKVYYGNALDQAISMWALIISVTSNYSGVVTTVIFLARGIVFMCVEYCPIFFITGNTLQCIMLVYCFLGYFCTCYFGLFCLLNRYFRLTLGVYDYLVSTQEFRYMNSQGLLPPKNSIDAFKLNIKLLGVGGKPCIKVATVQ

SEQ ID NO: 16630 - protein, 291 aa, Artificial Sequence
  SARS-CoV-2__MT755837.1__non-structural protein 6 (NSP6)
MSAVKRTIKGTHHWLLLTILTSLLVLVQSTQWSLFFFLYENAFLPFAMGIIAMSAFAMMFVKHKHAFLCLFLLPSLATVAYFNMVYMPASWVMRIMTWLDMVDTSLSGFKLKDCVMYASAVVLLILMTARTVYDDGARRVWTLMNVLTLVYKVYYGNALDQAISMWALIISVTSNYSGVVTTVMFLTRGIVFMCVEYCPIFFITGNTLQCIMLVYCFLGYFCTCYFGLFCLLNRYFRLTLGVYDYLVSTQEFRYMNSQGLLPPKNSIDAFKLNIKLLGVGGKPCIKVATVQ

SEQ ID NO: 16631 - protein, 291 aa, Artificial Sequence
  SARS-CoV-2__MT755955.1__non-structural protein 6 (NSP6)
MSAVKRTIKGTHHWLLLTILTSLLVLVQSTQWSLFFFLYENAFLPFAMGIIAMSAFAMMFVKHKHAFLCLFLLPSLATVAYFNMVYMPASWVMRIMTWLDMVDTSLSGFKLKDCVMYASAVVLLILMTARTVYDDGARRVWTLMNVLTLVYKVYYGNALDQAISMWALIISVTSNYSGVVTTVMFLARGIVFMCVEYCPIFFITGNTLQCIMLVYCFLGYFCTCYFGLFCLLNRYFRLTLGVYDYLVSTQEFRYMNSQGLLPPKNSIDAFELNIKLLGVGGKPCIKVATVQ

SEQ ID NO: 16632 - protein, 291 aa, Artificial Sequence
  SARS-CoV-2__MT757073.1__non-structural protein 6 (NSP6)
MSAVKRTIKGTHHWLLLTILTSLLVLVQSTQWSLFFFLYENAFLPFAMGIIAMSAFAMMFVKHKHAFLCLFLLPSFATVAYFNMVYMPASWVMRIMTWLDMVDTSLSGFKLKDCVMYASAVVLLILMTARTVYDDGARRVWTLMNVLTLVYKVYYGNALDQAISMWALIISVTSNYSGVVTTVMFLARGIVFMCVEYCPIFFITGNTLQCIMLVYCFLGYFCTCYFGLFCLLNRYFRLTLGVYDYLVSTQEFRYMNSQGLLPPKNSIDAFKLNIKLLGVGGKPCIKVATVQ

SEQ ID NO: 16633 - protein, 291 aa, Artificial Sequence
  SARS-CoV-2__MT745644.1__non-structural protein 6 (NSP6)
MSAAKRTIKGTHHWLLLTILTSLLVLVQSTQWSLFFFLYENAFLPFAMGIIAMSAFAMMFVKHKHAFLCLFLLPSLATVAYFNMVYMPASWVMRIMTWLDMVDTSLSGFKLKDCVMYASAVVLLILMTARTVYDDGARRVWTLMNVLTLVYKVYYGNALDQAISMWALIISVTSNYSGVVTTVMFLARGIVFMCVEYCPIFFITGNTLQCIMLVYCFLGYFCTCYFGLFCLLNRYFRLTLGVYDYLVSTQEFRYMNSQGLLPPKNSIDAFKLNIKLLGVGGKPCIKVATVQ

SEQ ID NO: 16634 - protein, 291 aa, Artificial Sequence
  SARS-CoV-2__MT750188.1__non-structural protein 6 (NSP6)
MSAVKRTIKGTHHWLLLTILTSLLVLVQSTQWSLFFFLYENAFLPFAMGIIAMSAFAMMFVKHKHAFLCLFLLPSLATIAYFNMVYMPASWVMRIMTWLDMVDTSLSGFKLKDCVMYASAVVLLILMTARTVYDDGARRVWTLMNVLTLVYKVYYGNALDQAISMWALIISVTSNYSGVVTTVMFLARGIVFMCVEYCPIFFITGNTLQCIMLVYCFLGYFCTCYFGLFCLLNRYFRLTLGVYDYLVSTQEFRYMNSQGLLPPKNSIDAFKLNIKLLGVGGKPCIKVATVQ

SEQ ID NO: 16635 - protein, 291 aa, Artificial Sequence
  SARS-CoV-2__MT740392.1__non-structural protein 6 (NSP6)
MSAVKRTIKGTHHWLLLTILTSLLVLVQSTQWSLFFFLYENAFLPFAMGIIAMSAFAMMFVKHKHAFLCLFLLPSLATVAYFNMVYMPASWVMRIMTWLDMVDTSLSGFKLKDCVMYASALVLLILMTARTVYDDGARRVWTLMNVLTLVYKVYYGNALDQAISMWALIISVTSNYSGVVTTVMFLARGIVFMCVEYCPIFFITGNTLQCIMLVYCFLGYFCTCYFGLFCLLNRYFRLTLGVYDYLVSTQEFRYMNSQGLLPPKNSIDAFKLNIKLLGVGGKPCIKVATVQ

SEQ ID NO: 16636 - protein, 291 aa, Artificial Sequence
  SARS-CoV-2__MT738101.1__non-structural protein 6 (NSP6)
MSAVKRTIKGTHHWLLLIILTSLLVLVQSTQWSLFFFLYENAFLPFAMGIIAMSAFAMMFVKHKHAFLCLFLLPSLATVAYFNMVYMPASWVMRIMTWLDMVDTSLSGFKLKDCVMYASAVVLLILMTARTVYDDGARRVWTLMNVLTLVYKVYYGNALDQAISMWALIISVTSNYSGVVTTVMFLARGIVFMCVEYCPIFFITGNTLQCIMLVYCFLGYFCTCYFGLFCLLNRYFRLTLGVYDYLVSTQEFRYMNSQGLLPPKNSIDAFKLNIKLLGVGGKPCIKVATVQ

SEQ ID NO: 16637 - protein, 291 aa, Artificial Sequence
  SARS-CoV-2__MT706176.1__non-structural protein 6 (NSP6)
MSAVKRTIRGTHHWLLLTILTSLLVLVQSTQWSLFFFLYENAFLPFAMGIIAMSAFAMMFVKHKHAFLCLFLLPSLATVAYFNMVYMPASWVMRIMTWLDMVDTSLSGFKLKDCVMYASAVVLLILMTARTVYDDGARRVWTLMNVLTLVYKVYYGNALDQAISMWALIISVTSNYSGVVTTVMFLARGIVFMCVEYCPIFFITGNTLQCIMLVYCFLGYFCTCYFGLFCLLNRYFRLTLGVYDYLVSTQEFRYMNSQGLLPPKNSIDAFKLNIKLLGVGGKPCIKVATVQ

SEQ ID NO: 16638 - protein, 291 aa, Artificial Sequence
  SARS-CoV-2__MT706225.1__non-structural protein 6 (NSP6)
MSAVKRTIKGTHHWLLLTILTSLLVLVQSTQWSLFFFLYENAFLPFAMGIIAMSAFAMMFVKHKHAFLCLFLLPSLATVAYFNMVYMPASWVMRIMTWLDMVDTSLSGFKLKDCVMYASAVVLLILMTARTVYDDGARRVWTLMNVLTLVYKVYYGNALDQAISMWALIISVTSNYSGVVTTVMFLARGIVFMCVEYCPIFFITGNTFQCIMLVYCFLGYFCTCYFGLFCLLNRYFRLTLGVYDYLVSTQEFRYMNSQGLLPPKNSIDAFKLNIKLLGVGGKPCIKVATVQ

SEQ ID NO: 16639 - protein, 291 aa, Artificial Sequence
  SARS-CoV-2__MT703973.1__non-structural protein 6 (NSP6)
MSAVKRTIKGTHHWLLITILTSLLVLVQSTQWSLFFFLYENAFLPFAMGIIAMSAFAMMFVKHKHAFLCLFLLPSLATVAYFNMVYMPASWVMRIMTWLDMVDTSLSGFKLKDCVMYASAVVLLILMTARTVYDDGARRVWTLMNVLTLVYKVYYGNALDQAISMWALIISVTSNYSGVVTTVMFLARGIVFMCVEYCPIFFITGNTLQCIMLVYCFLGYFCTCYFGLFCLLNRYFRLTLGVYDYLVSTQEFRYMNSQGLLPPKNSIDAFKLNIKLLGVGGKPCIKVATVQ

SEQ ID NO: 16640 - protein, 291 aa, Artificial Sequence
  SARS-CoV-2__MT704049.1__non-structural protein 6 (NSP6)
MSAVKRTIKGTHHWLLLTILTSLLVLVQSTQWSLFFFLYENAFLPFAMGIIAMSAFAMMFVKHKHAFLCLFLLPSLATVAYFNMVYMPASWVMRIMTWLDMVDTSLSGFKLKDCVMYASAVVLLILMTARTVYDDGARRVWTLMNVLTLVYKVYYGNALDQAISMWALIISVTSNYSGVVTTVMFLARGIVFMCVEYCPIFFIAGNTLQCIMLVYCFLGYFCTCYFGLFCLLNRYFRLTLGVYDYLVSTQEFRYMNSQGLLPPKNSIDAFKLNIKLLGVGGKPCIKVATVQ

SEQ ID NO: 16641 - protein, 291 aa, Artificial Sequence
  SARS-CoV-2__MT678839.1__non-structural protein 6 (NSP6)
MSAVKRTIKGTHHWLLLTILTSLLVLVQSTQWSLFFFFYENAFLPFAMGIIAMSAFAMMFVKHKHAFLCLFLLPSLATVAYFNMVYMPASWVMRIMTWLDMVITSLSGFKLKDCVMYASAVVLLILMTARTVYDDGARRVWTLMNVLTLVYKVYYGNALDQAISMWALIISVTSNYSGVVTTVMFLARGIVFMCVEYCPIFFITGNTLQCIMLVYCFLGYFCTCYFGLFCLLNRYFRLTLGVYDYLVSTQEFRYMNSQGLLPPKNSIDAFKLNIKLLGVGGKPCIKVATVQ

SEQ ID NO: 16642 - protein, 291 aa, Artificial Sequence
  SARS-CoV-2__MT664169.1__non-structural protein 6 (NSP6)
MSAVKRTIKGTHHWLLLTILTSLLVLVQSTQWSLFFFLYENAFLPFAMGTIAMSAFAMMFVKHKHAFLCLFLLPSLATVAYFNMVYMPASWVMRIMTWLDMVDTSLSGFKLKDCVMYASAVVLLILMTARTVYDDGARRVWTLMNVLTLVYKVYYGNALDQAISMWALIISVTSNYSGVVTTVMFLARGIVFMCVEYCPIFFITGNTLQCIMLVYCFLGYFCTCYFGLFCLLNRYFRLTLGVYDYLVSTQEFRYMNSQGLLPPKNSIDAFKLNIKLLGVGGKPCIKVATVQ

SEQ ID NO: 16643 - protein, 291 aa, Artificial Sequence
  SARS-CoV-2__MT646087.1__non-structural protein 6 (NSP6)
MSAVKRTIKGTHHWLLLTILTSLLVLVQSTQWSLFFFLYENAFLPFAMGIIAMSAFAMMFVKHKHAFLCLFLLPSLATVAYFNMVYMPASWVMRIMTWLDMVDTSLSGFKLKDCVMYASAVVLLILMTARTVYDDGARRVWTLINVLTLVYKVYYGNALDQAISMWALIISVTSNYSGVVTTVMFLARGIVFMCVEYCPIFFITGNTLQCIMLVYCFLGYFCTCYFGLFCLLNRYFRLTLGVYDYLVSTQEFRYMNSQGLLPPKNSIDAFKLNIKLLGVGGKPCIKVATVQ

SEQ ID NO: 16644 - protein, 291 aa, Artificial Sequence
  SARS-CoV-2__MT641533.1__non-structural protein 6 (NSP6)
MSAVKRTIKGTHHWLLLTILTSLLVLVQSTQWSLFFFLYENAFLPFAMGIIAMSAFAMMFVKHKHAFLCLFLLPSLATVAYFNMVYMPASWVMRIMTWLDMVDTSLSGFKLKDCVMYASAVVLLILMTARTVYDDGARRVWTLMNVLTLVYKVYYGNALDQAIYMWALIISVTSNYSGVVTTVMFLARGIVFMCVEYCPIFFITGNTLQCIMLVYCFLGYFCTCYFGLFCLLNRYFRLTLGVYDYLVSTQEFRYMNSQGLLPPKNSIDAFKLNIKLLGVGGKPCIKVATVQ

SEQ ID NO: 16645 - protein, 291 aa, Artificial Sequence
  SARS-CoV-2__MT641630.1__non-structural protein 6 (NSP6)
MSAVKRTIKGTHHWLLLTILTSLLVLVQSTQWSLFFFLYENAFLPFAMGIIAMSAFAMMFVKHKHAFLCLFLLPSLATVAYFNMVYMPASWVMRIMTWLDMVDTSLSGFKLKDCVMYASAVVLLILMTARTVYDDGARRVWTLMNVLTLVYKVYYGNALDQAISMWALIISVTSNYSGVVTTVMFLARGIVFMCVEYRPIFFITGNTLQCIMLVYCFLGYFCTCYFGLFCLLNRYFRLTLGVYDYLVSTQEFRYMNSQGLLPPKNSIDAFKLNIKLLGVGGKPCIKVATVQ

SEQ ID NO: 16646 - protein, 291 aa, Artificial Sequence
  SARS-CoV-2__MT641677.1__non-structural protein 6 (NSP6)
MSAVKRTIKGTHHWLLLTILTSLLVLVQSTQWSLFFFLYENAFLPFAMGIIAMSAFAMMFVKHKHAFLCLFLLPSLATVAYFNMVYMPASWVMRIMTWLDMVDTSLSGFKLKDCVMYASAVVLLILMTARTVYDDGARRVWTLMNVLTLVYKVYYGNALDQAISMWALIISVTSNYSGVVTTVMFLARVIVFMCVEYCPIFFITGNTLQCIMLVYCFLGYFCTCYFGLFCLLNRYFRLTLGVYDYLVSTQEFRYMNSQGLLPPKNSIDAFKLNIKLLGVGGKPCIKVATVQ

SEQ ID NO: 16647 - protein, 291 aa, Artificial Sequence
  SARS-CoV-2__MT642305.1__non-structural protein 6 (NSP6)
MSAVKRTIKGTHHWLLLTILTSLLVLVQSTQWSLFFFFYENAFLPFAMGIIAMSAFAMMFVKHKHAFLCLFLLPSLATVAYFNMVYMPASWVMRIMTWLDMVDTSLSGFKLKDCVMYASAVVLLILMTARTVYDDGARRVWTLMNVLTLVYKFYYGNALDQAISMWALIISVTSNYSGVVTTVMFLARGIVFMCVEYCPIFFITGNTLQCIMLVYCFLGYFCTCYFGLFCLLNRYFRLTLGVYDYLVSTQEFRYMNSQGLLPPKNSIDAFKLNIKLLGVGGKPCIKVATVQ

SEQ ID NO: 16648 - protein, 291 aa, Artificial Sequence
  SARS-CoV-2__MT635270.1__non-structural protein 6 (NSP6)
MSAVKRTIKGTHHWLLLTILTSLLVLVQSTQWSLFFFLYENAFLPFAMGIIAMSAFAMMFVKHKHAFLCLFLLPSLATVAYFNMVYMPASWVMRIMTWLDMVDTSLSGFKLKDCVMYASAVVLLILMTARTVYDDGARRVWTLMNVLTLVYKVYYGNALDQAISMWALIISVTSNYSGVVTTVMFLARGIFFMCVEYCPIFFITGNTLQCIMLVYCFLGYFCTCYFGLFCLLNRYFRLTLGVYDYLVSTQEFRYMNSQGLLPPKNSIDAFKLNIKLLGVGGKPCIKVATVQ

SEQ ID NO: 16649 - protein, 291 aa, Artificial Sequence
  SARS-CoV-2__MT627427.1__non-structural protein 6 (NSP6)
MSAVKRTIKGTHHWLLLTILTSLLVLVQSTQWSLFFFFYENAFLPFSMGIIAMSAFAMMFVKHKHAFLCLFLLPSLATVAYFNMVYMPASWVMRIMTWLDMVDTSLSGFKLKDCVMYASAVVLLILMTARTVYDDGARRVWTLMNVLTLVYKVYYGNALDQAISMWALIISVTSNYSGVVTTVMFLARGIVFMCVEYCPIFFITGNTLQCIMLVYCFLGYFCTCYFGLFCLLNRYFRLTLGVYDYLVSTQEFRYMNSQGLLPPKNSIDAFKLNIKLLGVGGKPCIKVATVQ

SEQ ID NO: 16650 - protein, 291 aa, Artificial Sequence
  SARS-CoV-2__MT632596.1__non-structural protein 6 (NSP6)
MSAVKRTIKGTHHWLLLTILTSLLVLVQSTQWSLFFFLYENAFLPFAMGIIAMSAFAMMFVKHKHAFLCLFLLPSLATVAYFNMVYMPASWVMRIMTWLDMVDTSLSGFKLKDCVMYASAVVLLILMTARTVYDDGARRVWTLMNVLTLVYKVYYGNALDQAISMWALIISVTSNYSGVVTTVMFLARGIVFMCVEYCPIFFITGNTLQCIMLVYCFLGYFCTCYFGLFCLLNRYFRLTLGVYDYLVSTQEFRYMNSQGLLPPKNSIDAFKLNVKLLGVGGKPCIKVATVQ

SEQ ID NO: 16651 - protein, 291 aa, Artificial Sequence
  SARS-CoV-2__MT632820.1__non-structural protein 6 (NSP6)
MSAVKRTIKGTHHWLLLTILTSLLVLVQSTQWSLFFFLYENAFLPFAMGIIAMSAFAMMFVKHKHAFLCLFLLPSLATVAYFNMVYMPASWVMRIMTWLDMVDTSLSGFKLKDCVMYASAVVLLILMTARTVYDDGARRVWTLMNVLTLVYKVYYGNALDQAISMWALIISVTSNYSGVVTTVMFLARGIVFMCVEYCPIFFITGNTLRCIMLVYCFLGYFCTCYFGLFCLLNRYFRLTLGVYDYLVSTQEFRYMNSQGLLPPKNSIDAFKLNIKLLGVGGKPCIKVATVQ

SEQ ID NO: 16652 - protein, 291 aa, Artificial Sequence
  SARS-CoV-2__MT614531.1__non-structural protein 6 (NSP6)
MSAVKRTIKGTHHWLLLTILTSLLVLVQSTQWSLFFFLYENAFLPFAMGIIAMSAFATMFVKHKHAFLCLFLLPSLATVAYFNMVYMPASWVMRIMTWLDMVDTSLSGFKLKDCVMYASAVVLLILMTARTVYDDGARRVWTLMNVLTLVYKVYYGNALDQAISMWALIISVTSNYSGVVTTVMFLARGIVFMCVEYCPIFFITGNTLQCIMLVYCFLGYFCTCYFGLFCLLNRYFRLTLGVYDYLVSTQEFRYMNSQGLLPPKNSIDAFKLNIKLLGVGGKPCIKVATVQ

SEQ ID NO: 16653 - protein, 291 aa, Artificial Sequence
  SARS-CoV-2__MT609566.1__non-structural protein 6 (NSP6)
MSAVKRTIKGTHHWLLLTILTSLLVLVQSTQWSLFFFLYENAFLPFAMGIIAMSAFAMMFVKHKHAFLCLFLLPSLATVAYFNMVYMPASWVMRIMTWLDMVDTSLSGFKLKDCVMYASAVVLLILMTVRTVYDDGARRVWTLMNVLTLVYKVYYGNALDQAISMWALIISVTSNYSGVVTTVMFLARGIVFMCVEYCPIFFITGNTLQCIMLVYCFLGYFCTCYFGLFCLLNRYFRLTLGVYDYLVSTQEFRYMNSQGLLPPKNSIDAFKLNIKLLGVGGKPCIKVATVQ

SEQ ID NO: 16654 - protein, 291 aa, Artificial Sequence
  SARS-CoV-2__MT585032.1__non-structural protein 6 (NSP6)
MSAVKRTIKGTHHWLLLTILTSLLVLVQSTQWSLFFFLYENAFLPFAMGIIAMSAFAMMFVKHKHAFLCLFLLPSLATVAYFNMVYMPASWVMRIMTWLDMVDTSLSGFKLKDCVMYASAVVLLILMTARTVYDDGARRVWTLMNVLTLVYKVYYGSALDQAISMWALIISVTSNYSGVVTTVMFLARGIVFMCVEYCPIFFITGNTLQCIMLVYCFLGYFCTCYFGLFCLLNRYFRLTLGVYDYLVSTQEFRYMNSQGLLPPKNSIDAFKLNIKLLGVGGKPCIKVATVQ

SEQ ID NO: 16655 - protein, 291 aa, Artificial Sequence
  SARS-CoV-2__MT585090.1__non-structural protein 6 (NSP6)
MSAVKRTIKGTHHWLLLTILTSLLVLVQSTQWSLFFFLYENAFLPFAMGIIAMSAFAMMFVKHKHAFLCLFLLPSLATVAYFNMVYMPASWVMRIMTWLGMVDTSLSGFKLKDCVMYASAVVLLILMTARTVYDDGARRVWTLMNVLTLVYKVYYGNALDQAISMWALIISVTSNYSGVVTTVMFLARGIVFMCVEYCPIFFITGNTLQCIMLVYCFLGYFCTCYFGLFCLLNRYFRLTLGVYDYLVSTQEFRYMNSQGLLPPKNSIDAFKLNIKLLGVGGKPCIKVATVQ

SEQ ID NO: 16656 - protein, 291 aa, Artificial Sequence
  SARS-CoV-2__MT576056.1__non-structural protein 6 (NSP6)
MSAVKRTIKGTHHWLLLTILTSLLVLVQSTQWSLFFFLYENAFLPFAMGIIAMSAFAMMFVKHKHAFLCLFLLPSLATVAYFNMVYMPASWVMRIMTWLDMVDTSLSGFKLKDCVMYASAVVLLILMTARTVYDDGARRVWTLMNVLTLVYKVYYGNALDQATSMWALIISVTSNYSGVVTTVMFLARGIVFMCVEYCPIFFITGNTLQCIMLVYCFLGYFCTCYFGLFCLLNRYFRLTLGVYDYLVSTQEFRYMNSQGLLPPKNSIDAFKLNIKLLGVGGKPCIKVATVQ

SEQ ID NO: 16657 - protein, 291 aa, Artificial Sequence
  SARS-CoV-2__MT520221.1__non-structural protein 6 (NSP6)
MSAVKRTIKGTHHWLLLTILTSLLVLVQSTQWSLFFFLYENAFLPFAMGIIAMSAFAMMFVKHKHAFLCLFLLPSLATVAYFNMVYMPASWVMRIMTWLDMVDTSLSGFKLKDCVMYASAVVLLILMTARTVYDDGARRVWTLMNVLTLVYKVYYGNALDQAISMWALIISVTSNYSGVVTTVMFSARGIVFMCVEYCPIFFITGNTLQCIMLVYCFLGYFCTCYFGLFCLLNRYFRLTLGVYDYLVSTQEFRYMNSQGLLPPKNSIDAFKLNIKLLGVGGKPCIKVATVQ

SEQ ID NO: 16658 - protein, 291 aa, Artificial Sequence
  SARS-CoV-2__MT520402.1__non-structural protein 6 (NSP6)
MSAVKRTIKGTHHWLLLTILTSLLVLVQSTQWSLFFFLYENAFLPFAMGIIAMSAFAMMFVKHKHAFLCLFLLPSLATVAYFNMVYMPASWVMRIMTWLDMVDTSLSGFKLKDCVMYASAVVLLILMTARTVYDDGARRVWTLMNVLTLVYKVYYGNALDQAISMWALIISVTSNYSGVVTTVMFLARGVVFMCVEYCPIFFITGNTLQCIMLVYCFLGYFCTCYFGLFCLLNRYFRLTLGVYDYLVSTQEFRYMNSQGLLPPKNSIDAFKLNIKLLGVGGKPCIKVATVQ

SEQ ID NO: 16659 - protein, 291 aa, Artificial Sequence
  SARS-CoV-2__MT520437.1__non-structural protein 6 (NSP6)
MSAVKRTIKGTHHWLLLTILTSLLVLVQSTQWSLFFFFYENAFLPFAMGIIAMSAFAMMFVKHKHAFLCLFLLPSLATVAYFNMVYMPASWVMRIMTWLDMVDTSLSGFKLKDCVMYASAVVLLILMTARTVYDDGARRVWTLMNVLTLVYKVYYGNALDQAISMWALIISVTSNYSGVVTTVMFLARSIVFMCVEYCPIFFITGNTLQCIMLVYCFLGYFCTCYFGLFCLLNRYFRLTLGVYDYLVSTQEFRYMNSQGLLPPKNSIDAFKLNIKLLGVGGKPCIKVATVQ

SEQ ID NO: 16660 - protein, 291 aa, Artificial Sequence
  SARS-CoV-2__MT558680.1__non-structural protein 6 (NSP6)
MSAVKRTIKGTHHWLLLTILTSLLVLVQSTQWSLFFFLYENAFLPFAMGIIAMSAFAMMFVKHKHAFLCLFLLPSLATVAYFNMVYMPASWVMRIMTWLDMVDTSLSGFKLKDCVMYASAVVLLILMTARTVYDDGARRVWTLMNVLTLVYKVYYGNALDQAISMWALIISVTSNYSGVVTTVMFLARGIVFMCVEYCPIFFITGNTLQCIMLVYCFLGYFCTCYFGLFCLLNRYFRLTLGVYDYLVSTQEFRYMNSQGLLPPKNSIDAFKLNIKLLGVGGKPCIKVAIVQ

SEQ ID NO: 16661 - protein, 291 aa, Artificial Sequence
  SARS-CoV-2__MT539174.1__non-structural protein 6 (NSP6)
MSAVKRTIKGTHHWLLLTILTSLLVLVQSTQWSLFFFLYENAFLPFAMGIIAMSAFAMMFVKHKHAFLCLFLLPSLATVAYFNMVYMPASWVMRIMTWLDMVDTSLSGFKLKNCVMYASAVVLLILMTARTVYDDGARRVWTLMNVLTLVYKVYYGNALDQAISMWALIISVTSNYSGVVTTVMFLARGIVFMCVEYCPIFFITGNTLQCIMLVYCFLGYFCTCYFGLFCLLNRYFRLTLGVYDYLVSTQEFRYMNSQGLLPPKNSIDAFKLNIKLLGVGGKPCIKVATVQ

SEQ ID NO: 16662 - protein, 291 aa, Artificial Sequence
  SARS-CoV-2__MT461620.1__non-structural protein 6 (NSP6)
MSAVKRIIKGTHHWLLLTILTSLLVLVQSTQWSLFFFLYENAFLPFAMGIIAMSAFAMMFVKHKHAFLCLFLLPSLATVAYFNMVYMPASWVMRIMTWLDMVDTSLSGFKLKDCVMYASAVVLLILMTARTVYDDGARRVWTLMNVLTLVYKVYYGNALDQAISMWALIISVTSNYSGVVTTVMFLARGIVFMCVEYCPIFFITGNTLQCIMLVYCFLGYFCTCYFGLFCLLNRYFRLTLGVYDYLVSTQEFRYMNSQGLLPPKNSIDAFKLNIKLLGVGGKPCIKVATVQ

SEQ ID NO: 16663 - protein, 291 aa, Artificial Sequence
  SARS-CoV-2__MT461630.1__non-structural protein 6 (NSP6)
MSAVKRTIKGTHHWLLLTILTSLLVLVQSTQWSLFFFLYENAFLPFAMGIIAMSAFAMMFVKHKHAFLCLFLLPSLATVAYFNMVYMPASWVMRIMTWLDMVDTSLSGFKLKDCVMYASAVVLLILMTARTVYDDGARRVWTLMNVLTLVYKVYYGNALDQAISMWALIISVTSNYSGVVTTVMFLARGIVFMCVEYCPIFFITGNTLQCIMLVYCFLGYFCTCYFGLFCLLNRYFRLTLGVYDYLVSTQEFRYMNSQGLLPPKNSIDAFKLNIKLLGVSGKPCIKVATVQ

SEQ ID NO: 16664 - protein, 291 aa, Artificial Sequence
  SARS-CoV-2__MT451074.1__non-structural protein 6 (NSP6)
MSAVKRTIKGTHHWLLLTILTSLLVLVQSTQWSLFFFFYENAFLPFAMGIIAMSAFAMMFVKHKHAFLCLFLLPSLATVAYFNMVYMPASWVMRIMTWLDMVDTSLSGFKLKDCVMYASAVVLLILMTARTVYDDVARRVWTLMNVLTLVYKVYYGNALDQAISMWALIISVTSNYSGVVTTVMFLARGIVFMCVEYCPIFFITGNTLQCIMLVYCFLGYFCTCYFGLFCLLNRYFRLTLGVYDYLVSTQEFRYMNSQGLLPPKNSIDAFKLNIKLLGVGGKPCIKVATVQ

SEQ ID NO: 16665 - protein, 291 aa, Artificial Sequence
  SARS-CoV-2__MT434803.1__non-structural protein 6 (NSP6)
MSAVKRTIKGTHHWLLLTILTSLLVLVQSTQWSLFFFLYENAFLPFAMGIIAMSAFAMMFVKHKHAFLCLFLLPSLATVAYFNMVYMPASWVMRIMTWLDMVDTSLSSFKLKDCVMYASAVVLLILMTARTVYDDGARRVWTLMNVLTLVYKVYYGNALDQAISMWALIISVTSNYSGVVTTVMFLARGIVFMCVEYCPIFFITGNTLQCIMLVYCFLGYFCTCYFGLFCLLNRYFRLTLGVYDYLVSTQEFRYMNSQGLLPPKNSIDAFKLNIKLLGVGGKPCIKVATVQ

SEQ ID NO: 16666 - protein, 291 aa, Artificial Sequence
  SARS-CoV-2__MT434813.1__non-structural protein 6 (NSP6)
MSAVKRTIKGTHHWLLLTILTSLLVLVQSTQWSLFFFLYENAFLPFAMGIIAMSAFAMMFVKHKHAFLCLFLLPSLATVAYFSMVYMPASWVMRIMTWLDMVDTSLSGFKLKDCVMYASAVVLLILMTARTVYDDGARRVWTLMNVLTLVYKVYYGNALDQAISMWALIISVTSNYSGVVTTVMFLARGIVFMCVEYCPIFFITGNTLQCIMLVYCFLGYFCTCYFGLFCLLNRYFRLTLGVYDYLVSTQEFRYMNSQGLLPPKNSIDAFKLNIKLLGVGGKPCIKVATVQ

SEQ ID NO: 16667 - protein, 291 aa, Artificial Sequence
  SARS-CoV-2__MT385437.1__non-structural protein 6 (NSP6)
MSAVKRTIKGTHHWLLLTILTSLLVLVQSTQWSLFFFLYENAFLPFAMGIIAMSAFAMMFVKHKHAFLCLFLLPSLATVAYFNMVYMPASWVMRIMTWLDMVDTSLSGFKLKDCVMYASAVVLLILMTARTVYDDSARRVWTLMNVLTLVYKVYYGNALDQAISMWALIISVTSNYSGVVTTVMFLARGIVFMCVEYCPIFFITGNTLQCIMLVYCFLGYFCTCYFGLFCLLNRYFRLTLGVYDYLVSTQEFRYMNSQGLLPPKNSIDAFKLNIKLLGVGGKPCIKVATVQ

SEQ ID NO: 16668 - protein, 291 aa, Artificial Sequence
  SARS-CoV-2__MT358678.1__non-structural protein 6 (NSP6)
MSAVKRTIKGTHHWLLLTILTSLLVLVQSTQWSLFFFLYENAFLPFAMGIIAMSAFAMMFVKHKHAFLCLFLLPSLATVAYFNMVYMPASWVMRIMTWLDMVDTSLSGFKLKDCVMYASAVVLLILMTARTVYDDGARRVWTLMNVLTLVYKVYYGNALDQAISMWALIISVTSNYSGVVTTVMFLARGIVFMCVEYCPIFFITGNTLQCIMLVYCFLGYFCTCYFGLFCLLNRYFRLTLGVYDYLVSTQEFRYMNSLGLLPPKNSIDAFKLNIKLLGVGGKPCIKVATVQ

SEQ ID NO: 16669 - protein, 291 aa, Artificial Sequence
  SARS-CoV-2__MT358402.1__non-structural protein 6 (NSP6)
MSAVKRTIKGTHHWLLLTILTSLLVLVQSTQWSLFFFLYENAFLPFAMGITAMSAFAMMFVKHKHAFLCLFLLPSLATVAYFNMVYMPASWVMRIMTWLDMVDTSLSGFKLKDCVMYASAVVLLILMTARTVYDDGARRVWTLMNVLTLVYKVYYGNALDQAISMWALIISVTSNYSGVVTTVMFLARGIVFMCVEYCPIFFITGNTLQCIMLVYCFLGYFCTCYFGLFCLLNRYFRLTLGVYDYLVSTQEFRYMNSQGLLPPKNSIDAFKLNIKLLGVGGKPCIKVATVQ

SEQ ID NO: 16670 - protein, 291 aa, Artificial Sequence
  SARS-CoV-2__MT326071.1__non-structural protein 6 (NSP6)
MSAVKRTIKGTHHWLLLTILTSLLVLVQSTQWSLFFFLYENAFLPFAMGIIAMSAFAMMFVKHKHAFLCLFLLPSLATVAYFNMVYMPASWVMRIMTWLDTSLSGFKLKDCVMYASAVVLLILMTARTVYDDGARRVWTLMNVLTLVYKVYYGNALDQAISMWALIISVTSNYSGVVTTVMFLARGIVFMCVEYCPIFFITGNTLQCIMLVYCFLGYFCTCYFGLFCLLNRYFRLTLGVYDYLVSTQEFRYMNSQGLLPPKNSIDAFKLNIKLLGVGGKPCIKVATVQSKM

SEQ ID NO: 16671 - protein, 291 aa, Artificial Sequence
  SARS-CoV-2__MT326117.1__non-structural protein 6 (NSP6)
MSAVKRTIKGTHHWLLLTILTSLLVLVQSTQWSLFFFFYENAFLPFAMGIIAMSAFAMMFVKHKHAFLCLFLLPSLATVAYFNMVYMPASWVMRIMTWLDMVDTSLSGFKLKDCVMYASAVVLLILMTARTVYDDGARRVWTLMNVLTLVYKVYYGNALDQAISMWALIISVTSNYSGVVTTVMFLARGIVMCVEYCPIFFITGNTLQCIMLVYCFLGYFCTCYFGLFCLLNRYFRLTLGVYDYLVSTQEFRYMNSQGLLPPKNSIDAFKLNIKLLGVGGKPCIKVATVQS

SEQ ID NO: 16672 - protein, 103 aa, Artificial Sequence
  MERS-CoV/MERS-CoV-Jeddah-human-1__KF958702.1__ORF3 protein
MRVQRPPTLLLVFSLSLLVTAFSKPLYVPEHCQNYSGCMLRACIKTAQADTAGLYTNFRIDVPSAESTGTQSVSVDRESTSTHDGPNEHVTIVNLLDVGYSVN

SEQ ID NO: 16673 - protein, 103 aa, Artificial Sequence
  MERS-CoV/Al-Hasa_4_2013__KF186564.1__ORF3 protein
MRVQRPPTLLLVFSLSLLVTAFSKPLYVPEHCQNYSGCMLRACIKTAQADTAGLYTNSRIDVPSAESTGTQSVSVDRESTSTHDGPTEHVTSVNLFDVGYSVN

SEQ ID NO: 16674 - protein, 103 aa, Artificial Sequence
  MERS-CoV/Riyadh_14_2013__KJ156934.1__ORF3 protein
MRVQRPPTLLLVFSLSLLVIAFSKPLYVPEHCQNYSGCMLRACIKTAQADTAGLYTNFRIDVPSAESTGTQSVSVDRESTSTHDGPTEHVTSVNLFDVGYSVN

SEQ ID NO: 16675 - protein, 103 aa, Artificial Sequence
  MERS-CoV/England 1__NC_038294.1__ORF3 protein
MRVQRPPTLLLVFSLSLLVTAFSKPLYVPEHCQNYSGCMLRACIKTAQADTAGLYTNFRIDVPSAESTGTQSVSVDRESTSTHDGPTEHVTSVNLFDVGYSVN

SEQ ID NO: 16676 - protein, 274 aa, Artificial Sequence
  SARS-CoV/Tor2__NC_004718.3__ORF3a protein
MDLFMRFFTLRSITAQPVKIDNASPASTVHATATIPLQASLPFGWLVIGVAFLAVFQSATKIIALNKRWQLALYKGFQFICNLLLLFVTIYSHLLLVAAGMEAQFLYLYALIYFLQCINACRIIMRCWLCWKCKSKNPLLYDANYFVCWHTHNYDYCIPYNSVTDTIVVTEGDGISTPKLKEDYQIGGYSEDRHSGVKDYVVVHGYFTEVYYQLESTQITTDTGIENATFFIFNKLVKDPPNVQIHTIDGSSGVANPAMDPIYDEPTTTTSVPL

SEQ ID NO: 16677 - protein, 109 aa, Artificial Sequence
  HCoV/OC43__NC_006213.1__ORF3 protein
MDIWRPEKKYLRYINGFNVSELEDACFKFNYQFPKVGYCRVPSHAWCRNQGRFCATFTLYGKSKHYDKYFGVINGFTAFANTVEDAVNKLVFLAVDFITWRRQELNVYG

SEQ ID NO: 16678 - protein, 109 aa, Artificial Sequence
  HCoV/HKU1__NC_006577.2__ORF3 protein
MDVWRPSYTHSLVIREFGVTNLEDLCLKYNYCQPIVGYCIVPLNVWCRKFGKFASHFTLRSHDISHSNNFGVVTSFTTYGNTVSEAVSRLVESASEFIVWRAEALNKYG

SEQ ID NO: 16679 - protein, 219 aa, Artificial Sequence
  HCoV/229E/BN1/GER/2015__KU291448.1__ORF3 protein
MALGLFTLQFVSAVNQSLIKSKVSAEVSRQVIQDVKDGTVTFNLLAYTLMSLFVVYFALFKARSHRGRSALIVFKILILFVYVPLLYWSQAYIDATLIAVILLGRFFHTAWHCWLYKTWDFIVFNVTTLCYVQGKCWFLENKALKPFVCFYGGDQFLYIGDRIVTYLSTNDLYVALRGRIDKDLSLSRKVELYNGECVYLFCEHPAVGIVNTDFKLEIH

SEQ ID NO: 16680 - protein, 225 aa, Artificial Sequence
  HCoV/NL63/RPTEC/2004__JX504050.1__ORF3 protein
MPFGGLFQLTLESTINKSVANLKLPPHDVTVLRDNLKPVTTLSTITAYLLVSLFVTYFALFKPLTARGRVACFVLKLLTLFVYVPLLVLFGMYLDSFIIFSTLLFRFIHVGYYAYLYKNFSFVLFNVTKLCFVSGKCWYLEQSFYENRFAAIYGGDHYVVLGGETITFVSFDDLYVAIRGSCEKNLQLMRKVDLYNGAVIYIFAEEPVVGIVYSSQLYEDVPSIN

SEQ ID NO: 16681 - protein, 274 aa, Artificial Sequence
  Bat SARS-like CoV/WIV1__KF367457.1__ORF3 protein
MDLFMRIFTLGPITAQPGKIDNASPASTVHATATIPLQASLPFGWLVIGVAFLAVFQSATKIISLNKRWQLALYKGFQFICNLLLLFVTIYSHLLLVAAGMEAQFLYLYALIYFLQCINACRIIMRCWLCWKCKSKNPLLYDANYFVCWHTHNYDYCIPYNSVTDTIVVTAGDGISTPKLKEDYQIGGYSENWHSGVKDYVVVHGYFTEVYYQLESTQITTDTGIENATFFIFNKLVKDPPNVQIHTIDGSSGVVNPAMDPIYDEPTTTTSVPL

SEQ ID NO: 16682 - protein, 220 aa, Artificial Sequence
  BatCoV/HKU9-1 BF_005I__NC_009021.1__ORF3 protein
MNLYNLVRDALRPSYATVSPSVDEPTVDNNFVALSCYATLSVLLYYLQRVKQPYLSMLFHILFCLSQVCMVIWLIFSANFYVSLFAQCMLVVCALGCFLERTILSIKLRSMAPFMSMADNFAIIKTTCNNYVFPVERSSDNLVVLTTSRGIYSNGVFMKGAITVSDNALVVSLFKSHSLLLDRVEHGYDYTVFIYINSVILQNIKPTVSVVNTEFTDVEL

SEQ ID NO: 16683 - protein, 224 aa, Artificial Sequence
  PEDV/NPL-PEDv/2013/P10__KJ778616.1__ORF3 protein
MFLGLFQYTIDTVVKDVSKSANLSLDAVQELELNVVPIRQASNVTGFLFTSVFIYFFALFKASSLRRNYIMLAARFAVIVLYCPLLYYCGAFLDATIICCTLIGRLCLVCFYSWRYKNALFIIFNTTTLSFLNGKAAYYDGKSIVILEGGDHYITFGNSFVAFVSSIDLYLAIRGRQEADLQLLRTVELLDGKKLYVFSQHQIVGITNAAFDSIQLDEYATISE

SEQ ID NO: 16684 - protein, 275 aa, Artificial Sequence
  SARS-CoV-2/Wuhan-Hu-1__NC_045512.2/MN908947.2/EPI_ISL_402128__ORF 3a protein (ORF3a)
MDLFMRIFTIGTVTLKQGEIKDATPSDFVRATATIPIQASLPFGWLIVGVALLAVFQSASKIITLKKRWQLALSKGVHFVCNLLLLFVTVYSHLLLVAAGLEAPFLYLYALVYFLQSINFVRIIMRLWLCWKCRSKNPLLYDANYFLCWHTNCYDYCIPYNSVTSSIVITSGDGTTSPISEHDYQIGGYTEKWESGVKDCVVLHSYFTSDYYQLYSTQLSTDTGVEHVTFFIYNKIVDEPEEHVQIHTIDGSSGVVNPVMEPIYDEPTTTTSVPL

SEQ ID NO: 16685 - protein, 275 aa, Artificial Sequence
  SARS-CoV-2__MT919525.1__ORF3a protein
MDLFMRIFTIGTVTLKQGEIKDATPSDFVRATATIPIQASLPFGWLIVGVALLAVFQSASKIITLKKRWQLALSKGVHFVCNLLLLFVTVYSHLLLVAAGLEAPFLYLYALVYFLQSINFVRIIMRLWLCWKCRSKNPLLYDANYFLCWHTNCYDYCIPYNSVTSSIVITSGDGTTSPISEYDYQIGGYTEKWESGVKDCVVLHSYFTSDYYQLYSTQLSTDTGVEHVTFFIYNKIVDEPEEHVQIHTIDGSSGVVNPVMEPIYDEPTTTTSVPL

SEQ ID NO: 16686 - protein, 275 aa, Artificial Sequence
  SARS-CoV-2__MT919995.1__ORF3a protein
MDLFMRIFTIGTVTLKQGEIKDATPSDFVRATATIPIQASLPFVWLIVGVALLAVFHSASKIITLKKRWQLALSKGVHFVCNLLLLFVTVYSHLLLVAAGLEAPFLYLYALVYFLQSINFVRIIMRLWLCWKCRSKNPLLYDANYFLCWHTNCYDYCIPYNSVTSSIVITSGDGTTSPISEHDYQIGGYTEKWESGVKDCVVLHSYFTSDYYQLYSTQLSTDTGVEHVTFFIYNKIVDEPEEHVQIHTIDGSSGVVNPVMEPIYDEPTTTTSVPL

SEQ ID NO: 16687 - protein, 275 aa, Artificial Sequence
  SARS-CoV-2__MT919996.1__ORF3a protein
MDLFMRIFTIGTVTLKQGEIKDATPSDFVRATATIPIQASLPFGWLIVGVALLAVFHSASKIITLKKRWQLALSKGVHFVCNLLLLFVTVYSHLLLVAAGLEAPFLYLYALVYFLQSINFVRIIMRLWLCWKCRSKNPLLYDANYFLCWHTNCYDYCIPYNSVTSSIVITSGDGTTSPISEHDYQIGGYTEKWESGVKDCVVLHSYFTSDYYQLYSTQLSTDTGVEHVTFFIYNKIVDEPEEHVQIHTIDGSSGVVNPVMEPIYDEPTTTTSVPL

SEQ ID NO: 16688 - protein, 275 aa, Artificial Sequence
  SARS-CoV-2__MT920030.1__ORF3a protein
MDLFMRIFTIGTVTLKQGEIKDATPSDFVRATATIPIQASLPFGWLIVGVALLAVFQSASKIITLKKRWQLALSKGVHFVCNLLLLFVTVYSHLLLVAAGLEAPFLYLYALVYFLQSINFVRIIMRLWLCWKCRSKNPLLYDANYFLCWHTNCYDYCIPYNSVTSSIVITSGDGTTSPISEHDYQIGGYTEKWESGVKDCVVLHSYFTSDYYQLYSTQLSTDTGVEHVTFFIYNKIVDEPEEHVQIHTIDVSSGVVNPVMEPIYDEPTTTTSVPL

SEQ ID NO: 16689 - protein, 275 aa, Artificial Sequence
  SARS-CoV-2__MT913045.1__ORF3a protein
MDLFMRIFTIGTVTLKQGEIKDATPSDFVRATATIPIQASLPFGWLIVGVALLAVFHSASKIITLKKRWQLALSKGVHFVCNFLLLFVTVYSHLLLVAAGLEAPFLYLYALVYFLQSINFVRIIMRLWLCWKCRSKNPLLYDANYFLCWHTNCYDYCIPYNSVTSSIVITSGDGTTSPISEHDYQIGGYTEKWESGVKDCVVLHSYFTSDYYQLYSTQLSTDTGVEHVTFFIYNKIVDEPEEHVQIHTIDGSSGVVNPVMEPIYDEPTTTTSVPL

SEQ ID NO: 16690 - protein, 275 aa, Artificial Sequence
  SARS-CoV-2__MT913078.1__ORF3a protein
MDLFMRIFTIGTVTLKQGEIKDATPSDFVRATATIPIQASLPFGWLIVGAALLAVFHSASKIITLKKRWQLALSKGVHFVCNLLLLFVTVYSHLLLVAAGLEAPFLYLYALVYFLQSINFVRIIMRLWLCWKCRSKNPLLYDANYFLCWHTNCYDYCIPYNSVTSSIVITSGDGTTSPISEHDYQIGGYTEKWESGVKDCVVLHSYFTSDYYQLYSTQLSTDTGVEHVTFFIYNKIVDEPEEHVQIHTIDGSSGVVNPVMEPIYDEPTTTTSVPL

SEQ ID NO: 16691 - protein, 273 aa, Artificial Sequence
  SARS-CoV-2__MT913086.1__ORF3a protein
MDLFMRIFTIGTVTLKQGEIKDATPSDFVRATATIQASLPFGWLIVGVALLAVFHSASKIITLKKRWQLALSKGVHFVCNLLLLFVTVYSHLLLVAAGLEAPFLYLYALVYFLQSINFVRIIMRLWLCWKCRSKNPLLYDANYFLCWHTNCYDYCIPYNSVTSSIVITSGDGTTSPISEHDYQIGGYTEKWESGVKDCVVLHSYFTSDYYQLYSTQLSTDTGVEHVTFFIYNKIVDEPEEHVQIHTIDGSSGVVNPVMEPIYDEPTTTTSVPL

SEQ ID NO: 16692 - protein, 275 aa, Artificial Sequence
  SARS-CoV-2__MT913089.1__ORF3a protein
MDLFMRIFTIGTVTLKQGEIKDATPSDFVRATATIPIQASLPFGWLIVGVALLAVFQSASKIITLKKRWQLALSKGVHFVCNLLLLFVTVYSYLLLVAAGLEAPFLYLYALVYFLQSINFVRIIMRLWLCWKCRSKNPLLYDANYFLCWHTNCYDYCIPYNSVTSSIVITSGDGTTSPISEHDYQIGGYTEKWESGVKDCVVLHSYFTSDYYQLYSTQLSTDTGVEHVTFFIYNKIVDEPEEHVQIHTIDGSSGVVNPVMEPIYDEPTTTTSVPL

SEQ ID NO: 16693 - protein, 275 aa, Artificial Sequence
  SARS-CoV-2__MT913110.1__ORF3a protein
MDLFMRIFTIGTVTLKQGEIKDSTPSDFVRATATIPIQASLPFGWLIVGVALLAFFHSASKIITLKKRWQLALSKGVHFVCNLLLLFVTVYSHLLLVAAGLEAPFLYLYALVYFLQSINFVRIIMRLWLCWKCRSKNPLLYDANYFLCWHTNCYDYCIPYNSVTSSIVITSGDGTTSPISEHDYQIGGYTEKWESGVKDCVVLHSYFTSDYYQLYSTQLSTDTGVEHVTFFIYNKIVDEPEEHVQIHTIDGSSGVVNPVMEPIYDEPTTTTSVPL

SEQ ID NO: 16694 - protein, 275 aa, Artificial Sequence
  SARS-CoV-2__MT913118.1__ORF3a protein
MDLFMRIFTIGTVTLKQGEIKDATPSDFVRATATIPIQASLPFGWLIVGVALLAVFHSASKIITLKKRWQLALSKGVHFVCNLLLLLVTVYSHLLLVAAGLEAPFLYLYALVYFLQSINFVRIIMRLWLCWKCRSKNPLLYDANYFLCWHTNCYDYCIPYNSVTSSIVITSGDGTTSPISEHDYQIGGYTEKWESGVKDCVVLHSYFTSDYYQLYSTQLSTDTGVEHVTFFIYNKIVDEPEEHVQIHTIDGSSGVVNPVMEPIYDEPTTTTSVPL

SEQ ID NO: 16695 - protein, 275 aa, Artificial Sequence
  SARS-CoV-2__MT913122.1__ORF3a protein
MDLFMRIFTIGTVTLKQGEIKDATPSDFVRATATIPIQASLPFGWLIVGVALLAVFHSASKIITLKKRWQLALSKGVHFVCNLLLLFVTVYSHLLLVAAGLEAPFLYLYALVYFLQSINFVRIIMRLWLCWKCRSKNPLLYDANYFLCWHTNCYDYCIPYNSVTSSIVITSGDGTTSPISEHDYHIGGYTEKWESGVKDCVVLHSYFTSDYYQLYSTQLSTDTGVEHVTFFIYNKIVDEPEEHVQIHTIDGSSGVVNPVMEPIYDEPTTTTSVPL

SEQ ID NO: 16696 - protein, 275 aa, Artificial Sequence
  SARS-CoV-2__MT913127.1__ORF3a protein
MDLFMRIFTIGTVTLKQGEIKDATPSDFVRATATIPIQASLPFGWLIVGVALLAVFQSASKIITLKKRWQLALSKGVHFVCNLLLLFVTVYSHLLLVAAGLEAPFFYLYALVYFLQSINFVRIIMRLWLCWKCRSKNPLLYDANYFLCWHTNCYDYCIPYNSVTSSIVITSGDGTTSPISEHDYQIGGYTEKWESGVKDCVVLHSYFTSDYYQLYSTQLSTDTGVEHVTFFIYNKIVDEPEEHVQIHTIDGSSGVVNPVMEPIYDEPTTTTSVPL

SEQ ID NO: 16697 - protein, 275 aa, Artificial Sequence
  SARS-CoV-2__MT913129.1__ORF3a protein
MDLFMRIFTIGTVTLKQGEIKDATPSDFVRATATIPIQASLPFGWLIVGVALLAVFHSASKIITLKKRWQLALSKGVHFVCNLLLLFVTVYSHLLLVAAGLEAPFLYLYALVYFLQSINFVRIIMRLWLCWKCRSKNPLLYDANYFLCWHTNCYDYCIPYNSLTSSIVITSGDGTTSPISEHDYQIGGYTEKWESGVKDCVVLHSYFTSDYYQLYSTQLSTDTGVEHVTFFIYNKIVDEPEEHVQIHTIDGSSGVVNPVMEPIYDEPTTTTSVPL

SEQ ID NO: 16698 - protein, 275 aa, Artificial Sequence
  SARS-CoV-2__MT913131.1__ORF3a protein
MDLFMRIFTIGTVTLKQGEIKDATPSDFVRATATIPIQASLPFGWLIVGVALLAVFHSASKIITLKKRWQLALSKGVHFVCNLLLLFVIVYSHLLLVAAGLEAPFLYLYALVYFLQSINFVRIIMRLWLCWKCRSKNPLLYDANYFLCWHTNCYDYCIPYNSVTSSIVITSGDGTTSPISEHDYQIGGYTEKWESGVKDCVVLHSYFTSDYYQLYSTQLSTDTGVEHVTFFIYNKIVDEPEEHVQIHTIDGSSGVVNPVMEPIYDEPTTTTSVPL

SEQ ID NO: 16699 - protein, 275 aa, Artificial Sequence
  SARS-CoV-2__MT913141.1__ORF3a protein
MDLFMRIFTIGTVTLKQGEIKDATPSDFVRATATIPIPASLPFGWLIVGVALLAVFQSASKIITLKKRWQLALSKGVHFVCNLLLLFVTVYSHLLLVAAGLEAPFLYLYALVYFLQSINFVRIIMRLWLCWKCRSKNPLLYDANYFLCWHTNCYDYCIPYNSVTSSIVITSGDGTTSPISEHDYQIGGYTEKWESGVKDCVVLHSYFTSDYYQLYSTQLSTDTGVEHVTFFIYNKIVDEPEEHVQIHTIDGSSGVVNPVMEPIYDEPTTTTSVPL

SEQ ID NO: 16700 - protein, 275 aa, Artificial Sequence
  SARS-CoV-2__MT907515.1__ORF3a protein
MDLFMRIFTIGTVTLKQGEIKDATPSDFVRATATIPIQASLPFGWLIVGVALLAVFQSASKIITLKKRWQLALSKGVHFVCNLLLLFVTVYSHLLLVAAGLEAPFLYLYALVYFLQSINFVRIIMRLWLCWKCRSKNPLLYDANYFLCWHTNCYDYCIPYNSVTSSIVITSGDGTTSPISEHDYQIGGYTEKWESVVKDCVVLHSYFTSDYYQLYSTQLSTDTGVEHVTFFIYNKIVDEPEEHVQIHTIDGSSGVVNPVMEPIYDEPTTTTSVPL

SEQ ID NO: 16701 - protein, 275 aa, Artificial Sequence
  SARS-CoV-2__MT907518.1__ORF3a protein
MDLFMRIFTIGTVTLKQGEIKDATPSDFVRATATIPIQASLPFGWLIVGVALLAVFQSASKIITLKKRWQLALSKGVHFVCNLLLLFVTVYSHLLLVAAGLEAPFLYLYSLVYFLQSINFVRIIMRLWLCWKCRSKNPLLYDANYFLCWHTNCYDYCIPYNSVTSSIVITSGDGTTSPISEHDYQIGGYTEKWESGVKDCVVLHSYFTSDYYQLYSTQLSTDTGVEHVTFFIYNKIVDEPEEHVQIHTIDGSSGVVNPVMEPIYDEPTTTTSVPL

SEQ ID NO: 16702 - protein, 275 aa, Artificial Sequence
  SARS-CoV-2__MT911811.1__ORF3a protein
MDLFMRIFTIGTVTLKQGEIKDATPSDFVRATATIPIQASLPFGRLIVGVALLAVFHSASKIITLKKRWQLALSKGVHFVCNLLLLFVIVYSHLLLVAAGLEAPFLYLYALVYFLQSINFVRIIMRLWLCWKCRSKNPLLYDANYFLCWHTNCYDYCIPYNSVTSSIVITSGDGTTSPISEHDYQIGGYTEKWESGVKDCVVLHSYFTSDYYQLYSTQLSTDTGVEHVTFFIYNKIVDEPEEHVQIHTIDGSSGVVNPVMEPIYDEPTTTTSVPL

SEQ ID NO: 16703 - protein, 275 aa, Artificial Sequence
  SARS-CoV-2__MT483876.1__ORF3a protein
MDLFMRIFTIGTVTLKQGEIKDATPSDFVRATATIPIQASLPFGWLIVGVALLAVFQSASKIITLKKRWQLALSKGVHFVCNLLLLFVTVYSHLLLVAAGLEAPFLYLYALVYFLQSINFVRIIMRLWLCWKCRSKNPLLYDANYFLCWHTNCYDYCIPYNSVTSSIVITSGDGTTSPISEHDYQIGGYTEKWESGVKDCVVLHSYFTSDYYQLYSTQLSTGTGVEHVTFFIYNKIVDEPEEHVQIHTIDGSSGVVNPVMEPIYDEPTTTTSVPL

SEQ ID NO: 16704 - protein, 275 aa, Artificial Sequence
  SARS-CoV-2__MT893659.1__ORF3a protein
MDLFMRIFTIGTVTLKQGEIKDATPSDFVRATATIPIQASLPFGWLIVGVALLAVFHSASKIITLKKRWQLALSKGVHFVCNLLLLFVTVYSHLLLVAAGLEAPFLYLYALVYFLQSINFVRIIMRLWLCWKCRSKNPLLYDANYFLCWHTNCYDYCIPYNSVTSSIVITSGDGTTSPISEHDYQIGGYTEKWESGVKDCVLLHSYFTSDYYQLYSTQLSTDTGVEHVTFFIYNKIVDEPEEHVQIHTIDGSSGVVNPVMEPIYDEPTTTTSVPL

SEQ ID NO: 16705 - protein, 275 aa, Artificial Sequence
  SARS-CoV-2__MT893667.1__ORF3a protein
MDLFMRIFTIGTVTFKQGEIKDATPSDFVRATATIPIQASLPFGWLIVGVALLAVFQSASKIITLKKRWQLALSKGVHFVCNLLLLFVTVYSHLLLVAAGLEAPFLYLYALVYFLQSINFVRIIMRLWLCWKCRSKNPLLYDANYFLCWHTNCYDYCIPYNSVTSSIVITSGDGTTSPISEHDYQIGGYTEKWESGVKDCVVLHSYFTSDYYQLYSTQLSTDTGVEHVTFFIYNKIVDEPEEHVQIHTIDGSSGVVNPVMEPIYDEPTTTTSVPL

SEQ ID NO: 16706 - protein, 275 aa, Artificial Sequence
  SARS-CoV-2__MT893675.1__ORF3a protein
MDLFMRIFTIGTVTLKQGEIKDATPSDFVRATATIPIQASLPFGWLIVGVALLAVFQSASKIITLKKRWQLALSKGVHFVCNLLLLFVTVYSHLLLVAAGLEAPFLYLYALVYFLQSINFVRIIMRLWLCWKCRSKNPLLYDANYFLCWHTNCYDYCIPYNSVTSSIVITSGDGITSPISEHDYQIGGYTEKWESGVKDCVVLHSYFTSDYYQLYSTQLSTDTGVEHVTFFIYNKIVDEPEEHVQIHTIDGSSGVVNPVMEPIYDEPTTTTSVPL

SEQ ID NO: 16707 - protein, 275 aa, Artificial Sequence
  SARS-CoV-2__MT897460.1__ORF3a protein
MDLFMRIFTIGTVTLNQGEIKDATPSDFVRATATIPIQASLPFGWLIVGVALLAVFHSASKIITLKKRWQLALSKGVHFVCNLLLLFVTVYSHLLLVAAGLEAPFLYLYALVYFLQSINFVRIIMRLWLCWKCRSKNPLLYDANYFLCWHTNCYDYCIPYNSVTSSIVITSGDGTTSPISEHDYQIGGYTEKWESGVKDCVVLHSYFTSDYYQLYSTQLSTDTGVEHVTFFIYNKIVDEPEEHVQIHTIDGSSGVVNPVMEPIYDEPTTTTSVPL

SEQ ID NO: 16708 - protein, 273 aa, Artificial Sequence
  SARS-CoV-2__MT890280.1__ORF3a protein
MDLFMRIFTIGTVTLKQGEIKDATPSDFVRATATIPIQASLPFGWLIVGVALLAVFQSASKIITLKKRWQLALSKGVHFVCNLLLLFVTVYSHLLLVAAGLEAPFLYALVYFLQSINFVRIIMRLWLCWKCRSKNPLLYDANYFLCWHTNCYDYCIPYNSVTSSIVITSGDGTTSPISEHDYQIGGYTEKWESGVKDCVVLHSYFTSDYYQLYSTQLSTDTGVEHVTFFIYNKIVDEPEEHVQIHTIDGSSGVVNPVMEPIYDEPTTTTSVPL

SEQ ID NO: 16709 - protein, 275 aa, Artificial Sequence
  SARS-CoV-2__MT890290.1__ORF3a protein
MDLFMRIFTIGTVTLKQGEIKDATPSDFVRATATIPIQASLPFGWLIVGVALLAVFHSASKIITLKKRWQLALSKGVHFVCNLLLLFVTVYSHLLLVAAGLEAPFLYLYALVYFLQSINFVRIIMRLWLCWKCRSKNPLLYDANYFLCWHTNCYDYCIPYNSVTSSIVITSGDGTTSPISEHDYQIGGYTEKWESGVKDCVVLHSYFTSDYYHLYSTQLSTDTGVEHVTFFIYNKIVDEPEEHVQIHTIDGSSGVVNPVMEPIYDEPTTTTSVPL

SEQ ID NO: 16710 - protein, 275 aa, Artificial Sequence
  SARS-CoV-2__MT890292.1__ORF3a protein
MDLFMRIFTIGTVTLKQGEIKDATPSDFVRATATIPIQASLPFGWLIVGVALLAVFHSASKIITLKKRWQLALSKGVHFVCNLLLLFVTVYSHLLLVAAGLEAPFLYLYALVYFLQSINFVRIIMRLWLCWKCRSKNPLLYDANYFLCWHTNCYDYCIPYNSVTSSIVITSCDGTTSPISEHDYQIGGYTEKWESGVKDCVVLHSYFTSDYYQLYSTQLSTDTGVEHVTFFIYNKIVDEPEEHVQIHTIDGSSGVVNPVMEPIYDEPTTTTSVPL

SEQ ID NO: 16711 - protein, 275 aa, Artificial Sequence
  SARS-CoV-2__MT890294.1__ORF3a protein
MDLFMRIFTIGTVTLKQGEIKDATPSHFVRATATIPIQASLPFGWLIVGVALLAVFHSASKIITLKKRWQLALSKGVHFVCNLLLLFVTVYSHLLLVAAGLEAPFLYLYALVYFLQSINFVRIIMRLWLCWKCRSKNPLLYDANYFLCWHTNCYDYCIPYNSVTSSIVITSGDGTTSPISEHDYQIGGYTEKWESGVKDCVVLHSYFTSDYYQLYSTQLSTDTGVEHVTFFIYNKIVDEPEEHVQIHTIDGSSGVVNPVMEPIYDEPTTTTSVPL

SEQ ID NO: 16712 - protein, 275 aa, Artificial Sequence
  SARS-CoV-2__MT890296.1__ORF3a protein
MDLFMRIFTIGTVTLKQGEIKDATPSDFVRATATIPIQASLPFGWLIVGVALLAVFHSASKIITLKKRWQLALSKGVHFVCNLLLLFVTVYSHLLLVAAGLEAPFLYLYALVYFLQSINFVRIIMRLWFCWKCRSKNPLLYDANYFLCWHTNCYDYCIPYNSVTSSIVITSGDGTTSPISEHDYQIGGYTEKWESGVKDCVVLHSYFTSDYYQLYSTQLSTDTGVEHVTFFIYNKIVDEPEEHVQIHTIDGSSGVVNPVMEPIYDEPTTTTSVPL

SEQ ID NO: 16713 - protein, 275 aa, Artificial Sequence
  SARS-CoV-2__MT890320.1__ORF3a protein
MDLFMRIFTIGTVTLKQGEIKDATPSDFVRATATIPIQASLPFGWLIVGVALLAVFHSASKIITLKKRWQLALSKGVHFVCNLLLLFVTVYSHLLLVAAGLEALFLYLYALVYFLQSINFVRIIMRLWLCWKCRSKNPLLYDANYFLCWHTNCYDYCIPYNSVTSSIVITSGDGTTSPISEHDYQIGGYTEKWESGVKDCVVLHSYFTSDYYQLYSTQLSTDTGVEHVTFFIYNKIVDEPEEHVQIHTIDGSSGVVNPVMEPIYDEPTTTTSVPL

SEQ ID NO: 16714 - protein, 275 aa, Artificial Sequence
  SARS-CoV-2__MT890355.1__ORF3a protein
MDLFMRIFTIGTVTLKQGEIKDATPSDFVRATATIPIQASLPFGWLIVGVAFLAVFHSASKIITLKKRWQLALSKGVHFVCNLLLLFVTVYSHLLLVAAGLEAPFLYLYALVYFLQSINFVRIIMRLWLCWKCRSKNPLLYDANYFLCWHTNCYDYCIPYNSVTSSIVITSGDGTTSPISEHDYQIGGYTEKWESGVKDCVVLHSYFTSDYYQLYSTQLSTDTGVEHVTFFIYNKIVDEPEEHVQIHTIDGSSGVVNPVMEPIYDEPTTTTSVPL

SEQ ID NO: 16715 - protein, 275 aa, Artificial Sequence
  SARS-CoV-2__MT890356.1__ORF3a protein
MDLFMRIFTIGTVTLKQVEIKDATPSDFVRATATIPIQASLPFGWLIVGVALLAVFHSASKIITLKKRWQLALSKGVHFVCNLLLLFVTVYSHLLLVAAGLEAPFLYLYALVYFLQSINFVRIIMRLWLCWKCRSKNPLLYDANYFLCWHTNCYDYCIPYNSVTSSIVITSGDGTTSPISEHDYQIGGYTEKWESGVKDCVVLHSYFTSDYYQLYSTQLSTDTGVEHVTFFIYNKIVDEPEEHVQIHTIDGSSGVVNPVMEPIYDEPTTTTSVPL

SEQ ID NO: 16716 - protein, 275 aa, Artificial Sequence
  SARS-CoV-2__MT892981.1__ORF3a protein
MDLFMRIFTIGTVTLKQGEIKDATPSDFVRATATIPIQALLPFGWLIVGVALLAVFHSASKIITLKKRWQLALSKGVHFVCNLLLLFVTVYSHLLLVAAGLEAPFLYLYALVYFLQSINFVRIIMRLWLCWKCRSKNPLLYDANYFLCWHTNCYDYCIPYNSVTSSIVITSGDGTTSPISEHDYQIGGYTEKWESGVKDCVVLHSYFTSDYYQLYSTQLSTDTGVEHVTFFIYNKIVDEPEEHVQIHTIDGSSGVVNPVMEPIYDEPTTTTSVPL

SEQ ID NO: 16717 - protein, 275 aa, Artificial Sequence
  SARS-CoV-2__MT892985.1__ORF3a protein
MDLFMRIFTIGTVTLKQGEIKDATPSDFVRATATIPIQASLPFGWLIVGVALLAVFQSASKIITLKKRWQLALSKGVHFVCNLLLLFVTVYSHLLLVAAGLEAPFLYLYALVYFLQSINFVRIIMRLWLCWKCRSKNPLLYDANYFLCWHTNCYDYCIPYNSVTSSIVITSGDGTTSPISEHDYQIGGYTEKWESGVKDCVVLHSYFTSDYYQLYSTQLSTDTGVEHVTFFIYNKIVDEPEEHVQIHTIDGSSGVVNPVMESIYDEPTTTTSVPL

SEQ ID NO: 16718 - protein, 275 aa, Artificial Sequence
  SARS-CoV-2__MT892988.1__ORF3a protein
MDLFMRIFTIGTVTLKQGEIKDATPSDFVRATATIPIQASLPFGWLIVGVALLAVFQSASKIITLKKRWQLALSKGVHFVCNLLLLFVTVYSHLLLVAAGLEAPFLYLYALVYFLQSINFVRIIMRLWLCWKCRSKNPLIYDANYFLCWHTNCYDYCIPYNSVTSSIVITSGDGTTSPISEHDYQIGGYTEKWESGVKDCVVLHSYFTSDYYQLYSTQLSTDTGVEHVTFFIYNKIVDEPEEHVQIHTIDGSSGVVNPVMEPIYDEPTTTTSVPL

SEQ ID NO: 16719 - protein, 275 aa, Artificial Sequence
  SARS-CoV-2__MT892993.1__ORF3a protein
MDLFMRIFTIGTVTLKQGEIKDATPSDFVRATATIPIQASLPFGWLIVGVALFAVFQSASKIITLKKRWQLALSKGVHFVCNLLLLFVTVYSHLLLVAAGLEAPFLYLYALVYFLQSINFVRIIMRLWLCWKCRSKNPLLYDANYFLCWHTNCYDYCIPYNSVTSSIVITSGDGTTSPISEHDYQIGGYTEKWESGVKDCVVLHSYFTSDYYQLYSTQLSTDTGVEHVTFFIYNKIVDEPEEHVQIHTIDGSSGVVNPVMEPIYDEPTTTTSVPL

SEQ ID NO: 16720 - protein, 275 aa, Artificial Sequence
  SARS-CoV-2__MT893011.1__ORF3a protein
MDLFMRIFTIGTVTLKQGEIKDATPSDFVRATATIPIQASLPFGWLIVGVALLAVFQSASKIITLKKRWQLALSKGVHFVCNLLLLFVTVYSHLLLVAAGLEAPFLYLYALVYFLQSINFVRIIMRLWLCWKCRSKNPLFYDANYFLCWHTNCYDYCIPYNSVTSSIVITSGDGTTSPISEHDYQIGGYTEKWESGVKDCVVLHSYFTSDYYQLYSTQLSTDTGVEHVTFFIYNKIVDEPEEHVQIHTIDVSSGVVNPVMEPIYDEPTTTTSVPL

SEQ ID NO: 16721 - protein, 275 aa, Artificial Sequence
  SARS-CoV-2__MT883503.1__ORF3a protein
MDLFMRIFTIGTVTLKQGEIKDATPSDFVRATATIPIQASLPFGWLIVGVALLAVFQSASKIITLKKRWQLALSKGVHFVCNLLLLFVTVYSHLLLVAAGLEAPFLYLYALVYFLQSINFVRIIMRLWLCWKCRSKNPLLYDANYFLCWHTNCYDYCIPYNSVTSSIVITSGDGTTSPISEHDYQIGGYTEKWESGVKDCVVLHSYFTSDYYQLYSTQLSTDTGVEHVTFFIYNKIVDELEEHVQIHTIDGSSGVVNPVMEPIYDEPTTTTSVPL

SEQ ID NO: 16722 - protein, 275 aa, Artificial Sequence
  SARS-CoV-2__MT886294.1__ORF3a protein
MDLFMRIFTIGTVTLKQGEIKDATPSDFVRATATIPIQASLPFGWLIVGVALLAVFQSASKIITLKKRWQLALSKGVHFVCNLLLLFVTVYSHLLLVAAGLEAPFLYLYALVYFLQSINFVRIIMRLWLCWKCRSKNPLLYDANYFLCWHTNCYDYCVPYNSVTSSIVITSGDGTTSPISEHDYQIGGYTEKWESGVKDCVVLHSYFTSDYYQLYSTQLSTDTGVEHVTFFIYNKIVDEPEEHVQIHTIDGSSGVVNPVMEPIYDEPTTTTSVPL

SEQ ID NO: 16723 - protein, 275 aa, Artificial Sequence
  SARS-CoV-2__MT886301.1__ORF3a protein
MDLFMRIFTIGTVTLKQGEIKDATPSDFVRATATIPIQASLPFGWLIVGVALLAVFQSASKIITLKNRWQLALSKGVHFVCNLLLLFVTVYSHLLLVAAGLEAPFLYLYALVYFLQSINFVRIIMRLWLCWKCRSKNPLLYDANYFLCWHTNCYDYCIPYNSVTSSIVITSGDGTTSPISEHDYQIGGYTEKWESGVKDCVVLHSYFTSDYYQLYSTQLSTDTGVEHVTFFIYNKIVDEPEEHVQIHTIDGSSGVVNPVMEPIYDEPTTTTSVPL

SEQ ID NO: 16724 - protein, 275 aa, Artificial Sequence
  SARS-CoV-2__MT886348.1__ORF3a protein
MDLFMRIFTIGTVTLKQGEIKDATPSDFVRATATIPIQASLPFGWLIVGVALLAVFHSASKIITLKKRWQLALSKGVHFVCNLLLLFVTVYSHLLLVAAGFEAPFLYLYALVYFLQSINFVRIIMRLWLCWKCRSKNPLLYDANYFLCWHTNCYDYCIPYNSVTSSIVITSGDGTTSPISEHDYQIGGYTEKWESGVKDCVVLHSYFTSDYYQLYSTQLSTDTGVEHVTFFIYNKIVDEPEEHVQIHTIDGSSGVVNPVMEPIYDEPTTTTSVPL

SEQ ID NO: 16725 - protein, 275 aa, Artificial Sequence
  SARS-CoV-2__MT886385.1__ORF3a protein
MDLFMRIFTIGTVTLKQGEIKDATPSDFVRATATIPIQASLPFGWLIVGVALLAVFHSASKIITLKKRWQLALSKGVHFVCNLLLLFVTVYSHLLLVAAGLEASFLYLYALVYFLQSINFVRIIMRLWLCWKCRSKNPLLYDANYFLCWHTNCYDYCIPYNSVTSSIVITSGDGTTSPISEHDYQIGGYTEKWESGVKDCVVLHSYFTSDYYQLYSTQLSTDTGVEHVTFFIYNKIVDEPEEHVQIHTIDGSSGVVNPVMEPIYDEPTTTTSVPL

SEQ ID NO: 16726 - protein, 275 aa, Artificial Sequence
  SARS-CoV-2__MT873050.1__ORF3a protein
MDLFMRIFTIGTVTLKQGEIKDATPSDFVRATATIPIQASLPFGWLIVGVALLAVFQSASKIITLKKRWQLALSKGVHFVCNLLLLFVTVYSHLLLVAAGLEAPFLYFYALVYFLQSINFVRIIMRLWLCWKCRSKNPLLYDANYFLCWHTNCYDYCIPYNSVTSSIVITSGDGITSPISEHDYQIGGYTEKWESGVKDCVVLHSYFTSDYYQLYSTQLSTDTGVEHVTFFIYNKIVDEPEEHVQIHTIDGSSGVVNPVMEPIYDEPTTTTSVPL

SEQ ID NO: 16727 - protein, 275 aa, Artificial Sequence
  SARS-CoV-2__MT873062.1__ORF3a protein
MDLFVRIFTIGTVTLKQGEIKDATPSDFVRATATIPIQASLPFGWLIVGVALLAVFHSASKIITLKKRWQLALSKGVHFVCNLLLLFVTVYSHLLLVAAGLEAPFLYLYALVYFLQSINFVRIIMRLWLCWKCRSKNPLLYDANYFLCWHTNCYDYCIPYNSVTSSIVITSGDGTTSPISEHDYQIGGYTEKWESGVKDCVVLHSYFTSDYYQLYSTQLSTDTGVEHVTFFIYNKIVDEPEEHVQIHTIDGSSGVVNPVMEPIYDEPTTTTSVPL

SEQ ID NO: 16728 - protein, 275 aa, Artificial Sequence
  SARS-CoV-2__MT873078.1__ORF3a protein
MDLFMRIFTIGTVTLKQGEIKDATPSDFVRATATIPIQASLPFGWLIVGVALLAVFHSASKIITLKKRWQLALSKGVHFVCNLLLLFVTVYSHLLLVAAGLEAPFLYLYALVYFLQSINFVRIIMRLWLCCKCRSKNPLLYDANYFLCWHTNCYDYCIPYNSVTSSIVITSGDGTTSPISEHDYQIGGYTEKWESGVKDCVVLHSYFTSDYYQLYSTQLSTDTGVEHVTFFIYNKIVDEPEEHVQIHTIDGSSGVVNPVMEPIYDEPTTTTSVPL

SEQ ID NO: 16729 - protein, 275 aa, Artificial Sequence
  SARS-CoV-2__MT873085.1__ORF3a protein
MDLFMRIFTIGTVTLKQGEIKDATPSDFVRATATIPIQASLPFGWLIVGVALLAVFHSASKIITLKKRWQLALSKGVHFVCNLLLLFVTVYSHFLLVAAGLEAPFLYLYALVYFLQSINFVRIIMRLWLCWKCRSKNPLLYDANYFLCWHTNCYDYCIPYNSVTSSIVITSGDGTTSPISEHDYQIGGYTEKWESGVKDCVVLHSYFTSDYYQLYSTQLSTDTGVEHVTFFIYNKIVDEPEEHVQIHTIDGSSGVVNPVMEPIYDEPTTTTSVPL

SEQ ID NO: 16730 - protein, 274 aa, Artificial Sequence
  SARS-CoV-2__MT873087.1__ORF3a protein
MDLFMRIFTIGTVTLKQGEIKDATPSDFVRATATIPIQASLPFGWLIVGVALLAVFHSASKIITLKKRWQLALSKGVHFVCNLLLLFVTVYSHLLLVAAGLEAPFLYLYALVYFLQSINFVRIIMRLWLCWKCRSKNPLLYDANYFLCWHTNCYDYCIPYNSVTSSIVITSGDGTTSPISEHDYQIGGYTEKWESGVKDCVVLHSYFTSDYYQLYSTQLSTDTGVEHVTFFIYNKIVDEPEEHVQIHTIDGSSGVNPVMEPIYDEPTTTTSVPL

SEQ ID NO: 16731 - protein, 275 aa, Artificial Sequence
  SARS-CoV-2__MT873115.1__ORF3a protein
MDLFMRIFTIGTVTLKQGEIKDATPSDFVRATATIPIQASLPFGWLIVGVALLAVFHSASKIITLKKRWQLALSKGVHFVCNLLLLFVTVYSHLLLVAAGLEAPFLYLYALVYFLQSINFVRIIMRLWLCWKCRSKNPLLYDANYFLCWHTNCYDYCIPYNSVTSSIIITSGDGTTSPISEHDYQIGGYTEKWESGVKDCVVLHSYFTSDYYQLYSTQLSTDTGVEHVTFFIYNKIVDEPEEHVQIHTIDGSSGVVNPVMEPIYDEPTTTTSVPL

SEQ ID NO: 16732 - protein, 275 aa, Artificial Sequence
  SARS-CoV-2__MT873125.1__ORF3a protein
MDLFMRIFTIGTVTLKQGEIKDATPSDFVRATATIPIQASLPFGWLIVGVALLAVFHSASKIITLKKRWQLALSKGVHFVCNLLLLFVTVYSHLLLVAAGLEAPFLYLYALVYFLQSINFVRIIMRLWLCWKCRSKNPLLYDANYFLCWHTNCYDYCIPYNSVTSSIVITSGDGTTSPISEHDYQIGGYTEKWESGVKDCVVLHSYFTSDYYQLYSTQLSTDTGVEHVTFFIYNKIVDEPEEHVQIHTIDGSSRVVNPVMEPIYDEPTTTTSVPL

SEQ ID NO: 16733 - protein, 275 aa, Artificial Sequence
  SARS-CoV-2__MT873139.1__ORF3a protein
MDLFMRIFTIGTVTLKQGEIKDATPSDFVRATATIPIQASLPFGWLIVGVALLAVFHSASKIITLKKRWQLALSKGVHFVCNLLLLFVTVYSHLLLVAVGLEAPFLYLYALVYFLQSINFVRIIMRLWLCWKCRSKNPLLYDANYFLCWHTNCYDYCIPYNSVTSSIVITSGDGTTSPISEHDYQIGGYTEKWESGVKDCVVLHSYFTSDYYQLYSTQLSTDTGVEHVTFFIYNKIADEPEEHVQIHTIDGSSGVVNPVMEPIYDEPTTTTSVPL

SEQ ID NO: 16734 - protein, 275 aa, Artificial Sequence
  SARS-CoV-2__MT873208.1__ORF3a protein
MDLFMRIFTIGTVTLKQGEIKDATPSDFVRATATIPIQASLPFGWLIVGVALLAVFHSASKIITLKKRWQLALSKGVHFVCNLLLLFVTVYSHLLLVAAGLEAPFLYLYALVYFLQSINFVRIIMRLWLCWKCRSKNPLLYDANYFLCWHTNCYDYCIPHNSVTSSIVITSGDGTTSPISEHDYQIGGYTEKWESGVKDCVVLHSYFTSDYYQLYSTQLSTDTGVEHVTFFIYNKIVDEPEEHVQIHTIDGSSGVVNPVMEPIYDEPTTTTSVPL

SEQ ID NO: 16735 - protein, 275 aa, Artificial Sequence
  SARS-CoV-2__MT873256.1__ORF3a protein
MDLFMRIFTIGTVTLKQGEIKDATPSDFVRATATIPIQASLPFGWLIVGVALLAVFHSASKIITLKKRWQLALSKGVHFVCNLLLLFVTVYSHLLLVAAGLEAPFLYLYSLVYFLQSINFVRIIMRLWLCWKCRSKNPLLYDANYFLCWHTNCYDYCIPYNSVTSSIVITSGDGTTSPISEHDYQIGGYTEKWESGVKDCVVLHSYFTSDYYQLYSTQLSTDTGVEHVTFFIYNKIVDEPEEHVQIHTIDGSSGVVNPVMEPIYDEPTTTTSVPL

SEQ ID NO: 16736 - protein, 275 aa, Artificial Sequence
  SARS-CoV-2__MT873272.1__ORF3a protein
MDLFMRIFTIGTVTLKQGEIKDATPSDFVRATATIPIQASLPFGWLIVGVALLAVFHSASKIITLKKRWQLALSKGVHFVCNLLLLFVTVYSHLLLVAAGLEAPFLYLYALVYFLQSINFVRVIMRLWLCWKCRSKNPLLYDANYFLCWHTNCYDYCIPYNSVTSSIVITSGDGTTSPISEHDYQIGGYTEKWESGVKDCVVLHSYFTSDYYQLYSTQLSTDTGVEHVTFFIYNKIVDEPEEHVQIHTIDGSSGVVNPVMEPIYDEPTTTTSVPL

SEQ ID NO: 16737 - protein, 275 aa, Artificial Sequence
  SARS-CoV-2__MT873280.1__ORF3a protein
MDLFMRIFTIGTVTLKQGEIKDATPSDFVRATATIPIQASLPFGWLIVGVALLAVFHSASKIITLKKRWQLALSKGVHFVCNLLLLFVTVYSHLLLVAAGLEAPFLYLYALVYFLQSINFVRIIMRLWLCWKCRSKNPLLYDANYFLCWHTNCYDYCIPYNSVTSSIVITSGDGITSPISEHDYQIGGYTEKWESGVKDCVVLHSYFTSDYYQLYSTQLSTDTGVEHVTFFIYNKIVDEPEEHVQIHTIDGSSGVVNPVMEPIYDEPTTTTSVPL

SEQ ID NO: 16738 - protein, 275 aa, Artificial Sequence
  SARS-CoV-2__MT873282.1__ORF3a protein
MDLFMRIFTIGTLTLKQGEIKDATPSDFVRATATIPIQASLPFGWLIVGVALLAVFQSASKIITLKKRWQLALSKGVHFVCNLLLLFVTVYSHLLLVAAGLEAPFLYLYALVYFLQSINFVRIIMRLWLCWKCRSKNPLLYDANYFLCWHTNCYDYCIPYNSVTSSIVITSGDGTTSPISEHDYQIGGYTEKWESGVKDCVVLHSYFTSDYYQLYSTQLSTDTGVEHVTFFIYNKIVDEPEEHVQIHTIDGSSGVVNPVMEPIYDEPTTTTSVPL

SEQ ID NO: 16739 - protein, 275 aa, Artificial Sequence
  SARS-CoV-2__MT873298.1__ORF3a protein
MDLFMRIFTIGTVTLKQGEIKDATPSDFVRATATIPIQASLPFGWLIVGVALLAVFHSASKIITLKKRWQLALSKGVHFVCNLLLLFVTVYSHLLLVAAGLEAPLLYLYALVYFLQSINFVRIIMRLWLCWKCRSKNPLLYDANYFLCWHTNCYDYCIPYNSVTSSIVITSGDGTTSPISEHDYQIGGYTEKWESGVKDCVVLHSYFTSDYYQLYSTQLSTDTGVEHVTFFIYNKIVDEPEEHVQIHTIDGSSGVVNPVMEPIYDEPTTTTSVPL

SEQ ID NO: 16740 - protein, 275 aa, Artificial Sequence
  SARS-CoV-2__MT873299.1__ORF3a protein
MDLFMRIFTIGTVTLKQGEIKDATPSDFVRATATIPIQASLPFGWLIVGVALLAVFHSASKIITLKKRWQLALSKGVHFVCNLLLLFVTVYSHLLLVAAGLEAPFLYLYALVYFLQSINFVRIIMRLWLCWKCRSKNPLLYDANYFLCWHTNCYDYCIPYNSVTSSIVITSGDGKTSPISEHDYQIGGYTEKWESGVKDCVVLHSYFTSDYYQLYSTQLSTDTGVEHVTFFIYNKIVDEPEEHVQIHTIDGSSGVVNPVMEPIYDEPTTTTSVPL

SEQ ID NO: 16741 - protein, 275 aa, Artificial Sequence
  SARS-CoV-2__MT873363.1__ORF3a protein
MDLFMRIFTIGTVTLKQGEIKDATPSYFVRATATIPIQASLPFGWLIVGVALLAVFHSASKIITLKKRWQLALSKGVHFVCNLLLLFVTVYSHLLLVAAGLEAPFLYLYALVYFLQSINFVRIIMRLWLCWKCRSKNPLLYDANYFLCWHTNCYDYCIPYNSVTSSIVITSGDGTTSPISEHDYQIGGYTEKWESGVKDCVVLHSYFTSDYYQLYSTQLSTDTGVEHVTFFIYNKIVDEPEEHVQIHTIDGSSGVVNPVMEPIYDEPTTTTSVPL

SEQ ID NO: 16742 - protein, 275 aa, Artificial Sequence
  SARS-CoV-2__MT873375.1__ORF3a protein
MDLFMRIFTIGTVTLKQGEIKDATPSDFVRATATIPIQASLPFGWLIVGVALLAVFHSASKIITLKKRWQLALSKGVHFVCNLLLLFVTVYSHILLVAAGLEAPFLYLYALVYFLQSINFVRIIMRLWLCWKCRSKNPLLYDANYFLCWHTNCYDYCIPYNSVTSSIVITSGDGTTSPISEHDYQIGGYTEKWESGVKDCVVLHSYFTSDYYQLYSTQLSTDTGVEHVTFFIYNKIVDEPEEHVQIHTIDGSSGVVNPVMEPIYDEPTTTTSVPL

SEQ ID NO: 16743 - protein, 275 aa, Artificial Sequence
  SARS-CoV-2__MT876554.1__ORF3a protein
MDLFMRIFTIGTVTLKQGEIKDATPSDFVRATATIPIQASLPFGWLIVGVALLAVFQSASKIITLKKRWQLALSKGVHFVCNLLLLFVTVYSHLLLVAAGLEAPFLYLYALVYFLQSINFVRIIMRLWLCWKCRSKNPLLYDANYFLCLHTNCYDYCIPYNSVTSSIVITSGDGTTSPISEHDYQIGGYTEKWESGVKDCVVLHSYFTSDYYQLYSTQLSTDTGVEHVTFFIYNKIVDEPEEHVQIHTIDGSSGVVNPVMEPIYDEPTTTTSVPL

SEQ ID NO: 16744 - protein, 275 aa, Artificial Sequence
  SARS-CoV-2__MT872492.1__ORF3a protein
MDLFMRIFTIGTVTLKQGEIKDATPSDFVRATATIPIQASLPFGWLIVGVALLAVFQSASKIITLKKRWQLALSKGVHFVCNLLLLFVTVYSHLLLVAAGLEASFLYLYALVYFLQSINFVRIIMRLWLCWKCRSKNPLLYDANYFLCWHTNCYDYCIPYNSVTSSIVITSGDGTTSPISEHDYQIGGYTEKWESGVKDCVVLHSYFTSDYYQLYSTQLSTDTGVEHVTFFIYNKIVDEPEEHVQIHTIDGSSGVVNPVMEPIYDEPTTTTSVPL

SEQ ID NO: 16745 - protein, 275 aa, Artificial Sequence
  SARS-CoV-2__MT872494.1__ORF3a protein
MGLFMRIFTIGTVTLKQGEIKDATPSDFVRATATIPIQASLPFGWLIVGVALLAVFQSASKIITLKKRWQLALSKGVHFVCNLLLLFVTVYSHLLLVAAGLEAPFLYLYALVYFLQSINFVRIIMRLWLCWKCRSKNPLLYDANYFLCWHTNCYDYCIPYNSVTSSIVITSGDGTTSPISEHDYQIGGYTEKWESGVKDCVVLHSYFTSDYYQLYSTQLSTDTGVEHVTFFIYNKIVDEPEEHVQIHTIDGSSGVVNPVMEPIYDEPTTTTSVPL

SEQ ID NO: 16746 - protein, 274 aa, Artificial Sequence
  SARS-CoV-2__MT846012.1__ORF3a protein
MDLFMRIFTIGTVTLKQGEIKDATPSDFVRATATIPIQASLPFGWLIVGVALLAVFQSASKIITLKKRWQLALSKGVHFVCNLLLLFVTVYSHLLLVAAGLEAPFLYLYALVYFLQSINFVRIIMRLWLCWKCRSKNPLLYDANYFLCWHTNCYDYCIPYNSVTSSIVITSGDGTTSPISEHDYQIGGYTEKWESGVKDCVVLHSYFTSDYYQLYSTQLSTDTGVEHVTFFIYNKIVDEPEEHVQIHTIDGSSGVDPVMEPIYDEPTTTTSVPL

SEQ ID NO: 16747 - protein, 275 aa, Artificial Sequence
  SARS-CoV-2__MT846420.1__ORF3a protein
MDLFMRIFTIGTVTLKQVEIKDATPSDFVRATATIPIQASLPFGWLIVGVALLAVFQSASKIITLKKRWQLALSKGVHFVCNLLLLFVTVYSHLLLVAAGLEAPFLYLYALVYFLQSINFVRIIMRLWLCWKCRSKNPLLYDANYFLCWHTNCYDYCIPYNSVTSSIVITSGDGTTSPISEHDYQIGGYTEKWESGVKDCVVLHSYFTSDYYQLYSTQLSTDTGVEHVTFFIYNKIVDEPEEHVQIHTIDGSSGVVNPVMEPIYDEPTTTTSVPL

SEQ ID NO: 16748 - protein, 275 aa, Artificial Sequence
  SARS-CoV-2__MT846431.1__ORF3a protein
MDLFMRIFTIGTVTLKQGEIKDATPSDFVRATATIPIQASLPFGWLIVGVALLAVFHSASKIITLKKRWQLALSKGVHFVCNLLLLFVTVYSHLLLVAAGLEAPFLYLYALVYFLQSINFVRIIMRLWLCWKCRSKNPLLYDANYFLCWHTNCYDYCIPYNSVTSSIVITSGDGTTSPISEHDYQIGGYTEKWESGVKDCVVLHSYFTSDYYQLYSTQLSTDTGVEHVTFFIYNKIVDEPEEHVQIHTIDGSSGVVNPVMEPIYDESTTTTSVPL

SEQ ID NO: 16749 - protein, 275 aa, Artificial Sequence
  SARS-CoV-2__MT846433.1__ORF3a protein
MDLFMRIFTIGTVTLKQGEIKDATPSDFVRATATIPIQASLPFGWLIVGVALLSVFQSASKIITLKKRWQLALSKGVHFVCNLLLLFVTVYSHLLLVAAGLEAPFLYLYALVYFLQSINFVRIIMRLWLCWKCRSKNPLLYDANYFLCWHTNCYDYCIPYNSVTSSIVITSGDGTTSPISEHDYQIGGYTEKWESGVKDCVVLHSYFTSDYYQLYSTQLSTDTGVEHVTFFIYNKIVDEPEEHVQIHTIDGSSGVVNPVMEPIYDEPTTTTSVPL

SEQ ID NO: 16750 - protein, 275 aa, Artificial Sequence
  SARS-CoV-2__MT846483.1__ORF3a protein
MDLFMRIFTIGTVTFKQGEIKDATPSDFVRATATIPIQASLPFGWLIVGVALLAVFQSASKIITLKKRWQLALSKGVHFVCNLLLLFVTVYSHLLLVAAGLEAPFLYLYALVYFLQSINFVRIIMRLWLCWKCRSKNPLLYDANYFLCWHTNCYDYCIPYNSVTSSIVITSGDGTTSPISEHDYQIGGYTEKWESGVKDCVVLHSYFTSDYYQLYSTQLSTDTGVEHVTFFIYNKIVDEPEEHVQIHTIDGSSGVVNPVMEPIYDEPMTTTSVPL

SEQ ID NO: 16751 - protein, 275 aa, Artificial Sequence
  SARS-CoV-2__MT846503.1__ORF3a protein
MDLFMRIFTIGTVTLKQGEIKDATPSDFVRATATIPIQASLPFGWLIVGVALLAVFHSASKIITLKKRWQLALSKGVYFVCNLLLLFVTVYSHLLLVAAGLEAPFLYLYALVYFLQSINFVRIIMRLWLCWKCRSKNPLLYDANYFLCWHTNCYDYCIPYNSVTSSIVITSGDGTTSPISEHDYQIGGYTEKWESGVKDCVVLHSYFTSDYYQLYSTQLSTDTGVEHVTFFIYNKIVDEPEEHVQIHTIDGSSGVVNPVMEPIYDEPTTTTSVPL

SEQ ID NO: 16752 - protein, 275 aa, Artificial Sequence
  SARS-CoV-2__MT846557.1__ORF3a protein
MDLFMRIFTIGTVTLKQSEIKDATPSDFVRATATIPIQASLPFGWLIVGVALLAVFHSASKIITLKKRWQLALSKGVHFVCNLLLLFVTVYSHLLLVAAGLEAPFLYLYALVYFLQSINFVRIIMRLWLCWKCRSKNPLLYDANYFLCWHTNCYDYCIPYNSVTSSIVITSGDGTTSPISEHDYQIGGYTEKWESGVKDCVVLHSYFTSDYYQLYSTQLSTDTGVEHVTFFIYNKIVDEPEEHVQIHTIDGSSGVVNPVMEPIYDEPTTTTSVPL

SEQ ID NO: 16753 - protein, 275 aa, Artificial Sequence
  SARS-CoV-2__MT846561.1__ORF3a protein
MDLFMRIFTIGTVTLKQGEIKDATPSDFVRATATIPIQASLPFGWLIVGVALLAVFQSASKIITLKKRWQLALSKGVHFVCNLLLLFVTVYSHLLLVAAGLEAPFLYLYALVYFLQSINFVRIIMRLCLCWKCRSKNPLLYDANYFLCWHTNCYDYCIPYNSVTSSIVITSGDGTTSPISEHDYQIGGYTEKWESGVKDCVVLHSYFTSDYYQLYSTQLSTDTGVEHVTFFIYNKIVDEPEEHVQIHTIDGSSGVVNPVMEPIYDEPTTTTSVPL

SEQ ID NO: 16754 - protein, 275 aa, Artificial Sequence
  SARS-CoV-2__MT846613.1__ORF3a protein
MDLFMRIFTIGTVTLKQGEIKDATPSDFVRATATIPIQASLPFGWLIVGVALLAVFQSASKIITLKKRWQLALSKGVHFVCNLLLLFVTVYSHLLLVAAGLEAPFLYLYALVYFLQSINFVRIIMRLCLCWKCRSKNPLLYDANYFLCWHTNCYDYCIPYNSVTSSIVITSGDGTTSPISEHDYQIGGYTEKWESGVKDCVVLHSYFTSDYYQLYSTQLSTDTGVEHVTFFIYNKIVDEPEEHVQIYTIDGSSGVVNPVMEPIYDEPTTTTSVPL

SEQ ID NO: 16755 - protein, 275 aa, Artificial Sequence
  SARS-CoV-2__MT846636.1__ORF3a protein
MDLFMRIFTIGTVTLKQGEIKDATPSDFVRATATIPIQASLPFGWLIVGVALLAVFHSASKIITLKKRWQLALSKGVHFVCNLLLLFVTVYSHLLLVAAGLEAPFLYLYALVYFLQSINFVRIIMRLWLCWKCRSKNPLLYDANYFLCWHTNCYDYCIPYNSVTSSIVITLGDGTTSPISEHDYQIGGYTEKWESGVKDCVVLHSYFTSDYYQLYSTQLSTDTGVEHVTFFIYNKIVDEPEEHVQIHTIDGSSGVVNPVMEPIYDEPTTTTSVPL

SEQ ID NO: 16756 - protein, 275 aa, Artificial Sequence
  SARS-CoV-2__MT846666.1__ORF3a protein
MDLFMRIFTIGTVTLKQGEIKDATPSYFVRATATIPIQASLPFGWLIVGVALLAVFQSASKIITLKKRWQLALSKGVHFVCNLLLLFVTVYSHLLLVAAGLEAPFLYLYALVYFLQSINFVRIIMRLWLCWKCRSKNPLLYDANYFLCWHTNCYDYCIPYNSVTSSIVITSGDGTTSPISEHDYQIGGYTEKWESGVKDCVVLHSYFTSDYYQLYSTQLSTDTGVEHVTFFIYNKIVDEPEEHVQIHTIDGSSGVVNPVMEPIYDEPTTTTSVPL

SEQ ID NO: 16757 - protein, 275 aa, Artificial Sequence
  SARS-CoV-2__MT846668.1__ORF3a protein
MDLFMRIFTIGTVTLKQGEIKDATPSDFVRATATIPIQASLPFGWFIVGVALLAVFQSASKIITLKKRWQLALSKGVHFVCNLLLLFVTVYSHLLLVAAGLEAPFLYLYALVYFLQSINFVRIIMRLWLCWKCRSKNPLLYDANYFLCWHTNCYDYCIPYNSVTSSIVITSGDGTTSPISEHDYQIGGYTEKWESGVKDCVVLHSYFTSDYYQLYSTQLSTDTGVEHVTFFIYNKIVDEPEEHVQIHTIDGSSGVVNPVMEPIYDEPTTTTSVPL

SEQ ID NO: 16758 - protein, 275 aa, Artificial Sequence
  SARS-CoV-2__MT846689.1__ORF3a protein
MDLFMRIFTIGTVTLKQGEIKDATPSDFVRATATIPIQASLPFGWLIVGVALLAVFQSASKIITLKKRWQLALSKGVHFVCNLLLLFVTVYSHLLLVAAGLEAPFLYLYALVYFLQSINFVIIIMRLWLCWKCRSKNPLLYDANYFLCWHTNCYDYCIPYNSVTSSIVITSGDGTTSPISEHDYQIGGYTEKWESGVKDCVVLHSYFTSDYYQLYSTQLSTDTGVEHVTFFIYNKIVDEPEEHVQIHTIDGSSGVVNPVMEPIYDEPTTTTSVPL

SEQ ID NO: 16759 - protein, 275 aa, Artificial Sequence
  SARS-CoV-2__MT847210.1__ORF3a protein
MDLFMRIFTIGTVTLKQGEIKDATPSDFVRATATIPIQASLPFGWLIVVVALLAVFQSASKIITLKKRWQLALSKGVHFVCNLLLLFVTVYSHLLLVAAGLEAPFLYLYALVYFLQSINFVRIIMRLWLCWKCRSKNPLLYDANYFLCWHTNCYDYCIPYNSVTSSIVITSGDGTTSPISEHDYQIGGYTEKWESGVKDCVVLHSYFTSDYYQLYSTQLSTDTGVEHVTFFIYNKIVDEPEEHVQIHTIDGSSGVVNPVMEPIYDEPTTTTSVPL

SEQ ID NO: 16760 - protein, 275 aa, Artificial Sequence
  SARS-CoV-2__MT847211.1__ORF3a protein
MDLFMRIFTIGTVTLKQGEIKDATPSDFVRATATIPIQASLPFGWLIVGVALLAVFQSASKIITLKKRWQLALSKGVHFVCNLLLLFVTVYSHLLLVAAGLEAPFLYLYALVYFLQSINFVRIIMRLWLCWKCRSKNPLLYDANYFLCWHTNCYDYCIPYNSVTSSIVITLGDGTTSPISEHDYQIGGYTEKWESGVKDCVVLHSYFTSDYYQLYSTQLSTDTGVEHVTFFIYNKIVDEPEEHVQIHTIDGSSGVVNPVMEPIYDEPTTTTSVPL

SEQ ID NO: 16761 - protein, 275 aa, Artificial Sequence
  SARS-CoV-2__MT847220.1__ORF3a protein
MDLFMRIFTIGTVTLKQGEIKDATPSDFVRATATIPIQASLPFGWLIVGVALLAVFQSASKIITLKKRWQLALSKGVHFVCNLLLLFVTVYSHLLLVAAGLEAPFLYLYALVYFLQSINFVRIIMRLWLCWKCRSKNPLLYDANYFLCWHTNCYYYCIPYNSVTSSIVITSGDGTTSPISEHDYQIGGYTEKWESGVKDCVVLHSYFTSDYYQLYSTQLSTDTGVEHVTFFIYNKIVDEPEEHVQIHTIDGSSGVVNPVMEPIYDEPTTTTSVPL

SEQ ID NO: 16762 - protein, 275 aa, Artificial Sequence
  SARS-CoV-2__MT847228.1__ORF3a protein
MDLFMRIFTIGTVTLKQGEIKDATPSDFVRATATIPIQASLPFGWLIVGVALLAVFQSASKIITLKKRWQLALSKGVHFVCNLLLLFVTVYSHLLLVAAGLEAPFLYLYALVYFLQSINFVRIIMRLWLCWKCRSKNPLLYDANYFLCWHTNCYDYCIPYNSVTSSIVITSGDGTTSPISEHDYQIGGYTEKWESGVKDCVVLHSYFTSDYYQLYSTQLSTDTGVEHVTFFIYNKIVDDPEAHVQIHTIDGSSGVVNPVMEPIYDEPTTTTSVPL

SEQ ID NO: 16763 - protein, 275 aa, Artificial Sequence
  SARS-CoV-2__MT843309.1__ORF3a protein
MDLFMRIFTIGTVTLKQGEIKDATPSDFVRATATIPIQASLPFGWLIVGVALLAVFHSASKIITLKKRWQLALFKGVHFVCNLLLLFVTVYSHLLLVAAGLEAPFLYLYALVYFLQSINFVRIIMRLWLCWKCRSKNPLLYDANYFLCWHTNCYDYCIPYNSVTSSIVITSGDGTTSPISEHDYQIGGYTEKWESGVKDCVVLHSYFTSDYYQLYSTQLSTDTGVEHVTFFIYNKIVDEPEEHVQIHTIDGSSGVVNPVMEPIYDEPTTTTSVPL

SEQ ID NO: 16764 - protein, 275 aa, Artificial Sequence
  SARS-CoV-2__MT844023.1__ORF3a protein
MDLFMRIFTIGTVTLKQGEIKYATPSDFVRATATIPIQASLPFGWLIVGVALLAVFQSASKIITLKKRWQLALSKGVHFVCNLLLLFVTVYSHLLLVAAGLEAPFLYLYALVYFLQSINFVRIIMRLWLCWKCRSKNPLLYDANYFLCWHTNCYDYCIPYNSVTSSIVITSGDGTTSPISEHDYQIGGYTEKWESGVKDCVVLHSYFTSDYYQLYSTQLSTDTGVEHVTFFIYNKIVDEPEEHVQIHTIDGSSGVVNPVMEPIYDEPTTTTSVPL

SEQ ID NO: 16765 - protein, 275 aa, Artificial Sequence
  SARS-CoV-2__MT844027.1__ORF3a protein
MDLFMRIFTIGTVTLKQGEIKDATPSDFVRATATIPIQASLPFGWLIVGVALLAVFHSASKIITLKKRWQLALSKGVHFVCNLLLLFVTVYSHLLLVAAGLEAPFLYLYALVYFLQSINFVRIIMRLWLCWKCRSKNPLLYDANYFLCWHTNCYDYCIPYNSVTSSIVITSGDGTTSPISEHDYQIGGYTEKWESGVKDCVVLHSYFTSDYYQLYSAQLSTDTGVEHVTFFIYNKIVDEPEEHVQIHTIDGSSGVVNPVMEPIYDEPTTTTSVPL

SEQ ID NO: 16766 - protein, 275 aa, Artificial Sequence
  SARS-CoV-2__MT844038.1__ORF3a protein
MDLFMRIFTIGTVTLKQGEIKDATPSDFVRATATIPIQASLPFGWLIVGVALLAVFQSASKIITLKKRWQLALSKGVYFVCNLLLLFVTVYSHLLLVAAGLEAPFLYLYALVYFLQSINFVRIIMRLWLCWKCRSKNPLLYDANYFLCWHTNCYDYCIPYNSVTSSIVITSGDGTTSPISEHDYQIGGYTEKWESGVKDCVVLHSYFTSDYYQLYSTQLSTDTGVEHVTFFIYNKIVDEPEEHVQIHTIDGSSGVVNPVMEPIYDEPTTTTSVPL

SEQ ID NO: 16767 - protein, 275 aa, Artificial Sequence
  SARS-CoV-2__MT844046.1__ORF3a protein
MDLFMRIFTIGTVTLKQGEIKDATPSDFVRATATIPIQASLPFGWLIVGVALLAVFHSASKIITLKKRWQLALSKGVHFVCNLLLLFVTFYSHLLLVAAGLEAPFLYLYALVYFLQSINFVRIIMRLWLCWKCRSKNPLLYDANYFLCWHTNCYDYCIPYNSVTSSIVITSGDGTTSPISEHDYQIGGYTEKWESGVKDCVVLHSYFTSDYYQLYSTQLSTDTGVEHVTFFIYNKIVDEPEEHVQIHTIDGSSGVVNPVMEPIYDEPTTTTSVPL

SEQ ID NO: 16768 - protein, 275 aa, Artificial Sequence
  SARS-CoV-2__MT831129.1__ORF3a protein
MDLFMRIFTIGTVTLKQGETKDATPSDFVRATSTIPIQASLPFGWLIVGVALLAVFQSASKIITLKKRWQLALSKGVHFVCNLLLLFVTVYSHLLLVAAGLEAPFLYLYALVYFLQSINFVRIIMRLWLCWKCRSKNPLLYDANYFLCWHTNCYDYCIPYNSVTSSIVITSGDGTTSPISEHDYQIGGYTEKWESGVKDCVVLHSYFTSDYYQLYSTQLSTDTGVEHVTFFIYNKIVDEPEEHVQIHTIDGSSGVVNPVMEPIYDEPTTTTSVPL

SEQ ID NO: 16769 - protein, 275 aa, Artificial Sequence
  SARS-CoV-2__MT831140.1__ORF3a protein
MDLFMRIFTIGTVTLKQGETKDATPSDFVRATATIPIQASLPFGWLIVGVALLAVFQSASKIITLKKRWQLALSKGVHFVCNLLLLFVTVYSHLLLVAAGLEAPFLYLYALVYFLQSINFVRIIMRLWLCWKCRSKNPLLYDANYFLCWHTNCYDYCIPYNSVTSSIVITSGDGTTSPISEHDYQIGGYTEKWESGVKDCVVLHSYFTSDYYQLYSTQLSTDTGVEHVTFFIYNKIVDEPEEHVQIHTIDGSSGVVNPVMEPIYDEPTTTTSVPL

SEQ ID NO: 16770 - protein, 275 aa, Artificial Sequence
  SARS-CoV-2__MT831162.1__ORF3a protein
MDLFMRIFTIGTVTLKQGEIKDATPSDFVRATATIPIQASLPFGWLIVSVALLAVFHSASKIITLKKRWQLALSKGVHFVCNLLLLFVTVYSHLLLVAAGLEAPFLYLYALVYFLQSINFVRIIMRLWLCWKCRSKNPLLYDANYFLCWHTNCYDYCIPYNSVTSSIVITSGDGTTSPISEHDYQIGGYTEKWESGVKDCVVLHSYFTSDYYQLYSTQLSTDTGVEHVTFFIYNKIVDEPEEHVQIHTIDGSSGVVNPVMEPIYDEPTTTTSVPL

SEQ ID NO: 16771 - protein, 275 aa, Artificial Sequence
  SARS-CoV-2__MT831177.1__ORF3a protein
MDLFMRIFTIGTVTLKQGEIKDATPSDFVRATATIPIQASLPFGWLIVGVALLAVFQSASKIITLKKRWQLALSKGVHFVCNLLLLFVTVYSHLLLVAAGLEAPFLYLYALVYFLQSINFVRIIMRLWLCRKCRSKNPLLYDANYFLCWHTNCYDYCIPYNSVTSSIVITSGDGTTSPISEHDYQIGGYTEKWESGVKDCVVLHSYFTSDYYQLYSTQLSTDTGVEHVTFFIYNKIVDEPEEHVQIHTIDGSSGVVNPVMEPIYDEPTTTTSVPL

SEQ ID NO: 16772 - protein, 275 aa, Artificial Sequence
  SARS-CoV-2__MT831190.1__ORF3a protein
MDLFMRIFTIGTVTLKQDEIKDATPSDFVRATATIPIQASLPFGWLIVGVALLAVFQSASKIITLKKRWQLALSKGVHFVCNLLLLFVTVYSHLLLVAAGLEAPFLYLYALVYFLQSINFVRIIMRLWLCWKCRSKNPLLYDANYFLCWHTNCYDYCIPYNSVTSSIVITSGDGTTSPISEHDYQIGGYTEKWESGVKDCVVLHSYFTSDYYQLYSTQLSTDTGVEHVTFFIYNKIVDEPEEHVQIHTIDGSSGVVNPVMEPIYDEPTTTTSVPL

SEQ ID NO: 16773 - protein, 275 aa, Artificial Sequence
  SARS-CoV-2__MT831578.1__ORF3a protein
MDLFMRIFTIGTVTLKQGEIKDATPSDFVRATATIPIQASLPFGWLIVGVALLAVFQSASKIITLKKRWQLALSKGVHFVCNLLLLFVTVYSHLLLVAVGLEAPFLYLYALVYFLQSINFVRIIMRLWLCWKCRSKNPLLYDANYFLCWHTNCYDYCIPYNSVTSSIVITSGDGTTSPISEHDYQIGGYTEKWESGVKDCVVLHSYFTSDYYQLYSTQLSTDTGVEHVTFFIYNKIVDEPEEHVQIHTIDGSSGVVNPVMEPIYDEPTTTTSVPL

SEQ ID NO: 16774 - protein, 275 aa, Artificial Sequence
  SARS-CoV-2__MT831593.1__ORF3a protein
MDLFMRIFTIGTVTLKQGEIKDATPSDFVRATATIPIQASLPFGWLIVGVALLAVFHSASKIITLKKRWQLALSKGVHFVCNLLLLFVTVYSHLLLVAAGLEAPFLYLYALVYFLQSINFVRIIMRLWLCWKCRSKNPLLYDANYFLCWHTNCYDYCIPYNSVTSSIVITSVDGTTSPISEHDYQIGGYTEKWESGVKDCVVLHSYFTSDYYQLYSTQLSTDTGVEHVTFFIYNKIVDEPEEHVQIHTIDGSSGVVNPVMEPIYDEPTTTTSVPL

SEQ ID NO: 16775 - protein, 275 aa, Artificial Sequence
  SARS-CoV-2__MT831603.1__ORF3a protein
MDLFMRIFTIGTVTLKQGEIKDATPSDFVRATATIPIQASLPFGWLIVGVALLAVFQSASKIITLKKRWQLALSKGVHFVCNLLLLFVTVYSHLLLVAAVLEAPFLYLYALVYFLQSINFVRIIMRLWLCWKCRSKNPLLYDANYFLCWHTNCYDYCIPYNSVTSSIVITSGDGTTSPISEHDYQIGGYTEKWESGVKDCVVLHSYFTSDYYQLYSTQLSTDTGVEHVTFFIYNKIVDEPEEHVQIHTIDGSSGVVNPVMEPIYDEPTTTTSVPL

SEQ ID NO: 16776 - protein, 275 aa, Artificial Sequence
  SARS-CoV-2__MT831635.1__ORF3a protein
MDLFMRIFTIGTVTLKQGEIKDATPSDFVRATATIPIQASLPFGWLIVGVALLAFFHSASKIITLKKRWQLALSKGVHFVCNLLLLFVTVYSHLLLVAAGLEAPFLYLYALVYFLQSINFVRIIMRLWLCWKCRSKNPLLYDANYFLCWHTNCYDYCIPYNSVTSSIVITSGDGTTSPISEHDYQIGGYTEKWESGVKDCVVLHSYFTSDYYQLYSTQLSTDTGVEHVTFFIYNKIVDEPEEHVQIHTIDGSSGVVNPVMEPIYDEPTTTTSVPL

SEQ ID NO: 16777 - protein, 275 aa, Artificial Sequence
  SARS-CoV-2__MT831646.1__ORF3a protein
MDLFMRIFTIGTVTLKQGEIKDATPSDFVRATATIPIQASLPFGWLIVGVALLAVFQSASKIITLKKRWQLALSKGVHFVCNLLLLFVTVYSHLLLVAAGLEAPFLYLYALVYFLQSINFVRIIMRLWLCWKCRSKNPLLYDANYFLCWHTNCYDYCIPYNSVTSSIVITSGDGTTSPISEHDYQIGGYTEKWESGVKDCVVLHSYFTSDYYQLYSTQLSTDTGFEHVTFFIYNKIVDEPEEHVQIHTIDGSSGVVNPVMEPIYDEPTTTTSVPL

SEQ ID NO: 16778 - protein, 275 aa, Artificial Sequence
  SARS-CoV-2__MT831682.1__ORF3a protein
MDLFMRIFTIGTVTLKQGEIKDATPSDFVRATATIPIQASLPFGWLIVGVALLAVFQSASKIITLKKRWQLALSKGVHFVCNLLLLFVTVYSHLLLVAAGLEAPFLYLYALVYFLQSINFVRIIMRLWLCWKCRSKNPLLYDANYFLSWHTNCYDYCIPYNSVTSSIVITSGDGTTSPISEHDYQIGGYTEKWESGVKDCVVLHSYFTSDYYQLYSTQLSTDTGVEHVTFFIYNKIVDEPEEHVQIHTIDGSSGVVNPVMEPIYDEPTTTTSVPL

SEQ ID NO: 16779 - protein, 275 aa, Artificial Sequence
  SARS-CoV-2__MT831729.1__ORF3a protein
MDLFMRIFTIGTVILKQGEIKDATPSDFVRATATIPIQASLPFGWLIVGVALLAVFHSASKIITLKKRWQLALSKGVHFVCNLLLLFVTVYSHLLLVAAGLEAPFLYLYALVYFLQSINFVRIIMRLWLCWKCRSKNPLLYDANYFLCWHTNCYDYCIPYNSVTSSIVITSGDGTTSPISEHDYQIGGYTEKWESGVKDCVVLHSYFTSDYYQLYSTQLSTDTGVEHVTFFIYNKIVDEPEEHVQIHTIDGSSGVVNPVMEPIYDEPTTTTSVPL

SEQ ID NO: 16780 - protein, 275 aa, Artificial Sequence
  SARS-CoV-2__MT831771.1__ORF3a protein
MDLFMRIFTIGTVTLKQGEIKDATPSDFVRATATIPIQASFPFGWLIVGVALLAVFQSASKIITLKKRWQLALSKGVHFVCNLLLLFVTVYSHLLLVAAGLEAPFLYLYALVYFLQSINFVRIIMRLWLCWKCRSKNPLLYDANYFLCWHTNCYDYCIPYNSVTSSIVITSGDGTTSPISEHDYQIGGYTEKWESGVKDCVVLHSYFTSDYYQLYSTQLSTDTGVEHVTFFIYNKIVDEPEEHVQIHTIDGSSGVVNPVMEPIYDEPTTTTSVPL

SEQ ID NO: 16781 - protein, 275 aa, Artificial Sequence
  SARS-CoV-2__MT831850.1__ORF3a protein
MDLFMRIFTIGTVTLKQGEIKDATPSDFVRATATIPIQASLPFGWLIVGVALLTVFHSASKIITLKKRWQLALSKGVHFVCNLLLLFVTVYSHLLLVAAGLEAPFLYLYALVYFLQSINFVRIIMRLWLCWKCRSKNPLLYDANYFLCWHTNCYDYCIPYNSVTSSIVITSGDGTTSPISEHDYQIGGYTEKWESGVKDCVVLHSYFTSDYYQLYSTQLSTDTGVEHVTFFIYNKIVDEPEEHVQIHTIDGSSGVVNPVMEPIYDEPTTTTSVPL

SEQ ID NO: 16782 - protein, 275 aa, Artificial Sequence
  SARS-CoV-2__MT833965.1__ORF3a protein
MDLFMRIFTIGTVTLKQGEIKYATPSDFVRATATIPIQASLPFGWLIVGVALLAVFHSASKIITLKKRWQLALSKGVHFVCNLLLLFVTVYSHLLLVAAGLEAPFLYLYALVYFLQSINFVRIIMRLWLCWKCRSKNPLLYDANYFLCWHTNCYDYCIPYNSVTSSIVITSGDGTTSPISEHDYQIGGYTEKWESGVKDCVVLHSYFTSDYYQLYSTQLSTDTGVEHVTFFIYNKIVDEPEEHVQIHTIDGSSGVVNPVMEPIYDEPTTTTSVPL

SEQ ID NO: 16783 - protein, 275 aa, Artificial Sequence
  SARS-CoV-2__MT833976.1__ORF3a protein
MDLFMRIFTIGTVTLKQGEIKDATPSDFVRATATIPIQASLPFGWLIVGVALLAVFQSASKIITLKKRWQLALSKGVHFVCNLLLLFLTVYSHLLLVAAGLEAPFLYLYALVYFLQSINFVRIIMRLWLCWKCRSKNPLLYDANYFLCWHTNCYDYCIPYNSVTSSIVITSGDGTTSPISEHDYQIGGYTEKWESGVKDCVVLHSYFTSDYYQLYSTQLSTDTGVEHVTFFIYNKIVDEPEEHVQIHTIDGSSGVVNPVMEPIYDEPTTTTSVPL

SEQ ID NO: 16784 - protein, 275 aa, Artificial Sequence
  SARS-CoV-2__MT833985.1__ORF3a protein
MDLFMRIFTIGTVTLKQGEIKDATPSDFVRATATIPIQASLPFGWLIVGVALLAVFQSASKIITLKKRWQLALSKGVHFVCNLLLLFVTVYSHLLLVAAGLEAPFLYLYALVYFLQSINFVRIIMRLWLCWKCRSKNPLLYDANYFLCWHTNCYDYCIPYNSVTSSIVITSGDGTTIPISEHDYQIGGYTEKWESGVKDCVVLHSYFTSDYYQLYSTQLSTDTGVEHVTFFIYNKIVDEPEEHVQIHTIDGSSGVVNPVMEPIYDEPTTTTSVPL

SEQ ID NO: 16785 - protein, 275 aa, Artificial Sequence
  SARS-CoV-2__MT834019.1__ORF3a protein
MDLFMRIFTIGTVTLKQGEIKDATPSDFVRATATIPIQASLPFGWLIVGVALLAVFQSASKIITLKKRWQLALSKGVHFVCNLLFLFVTVYSHLLLVAAGLEAPFLYLYALVYFLQSINFVRIIMRLWLCWKCRSKNPLLYDANYFLCWHTNCYDYCIPYNSVTSSIVITSGDGTTSPISEHDYQIGGYTEKWESGVKDCVVLHSYFTSDYYQLYSTQLSTDTGVEHVTFFIYNKIVDEPEEHVQIHTIDGSSGVVNPVMEPIYDEPTTTTSVPL

SEQ ID NO: 16786 - protein, 275 aa, Artificial Sequence
  SARS-CoV-2__MT834027.1__ORF3a protein
MDLFMRIFTIGTVTLKQGETKDATPSDFVRATATIPIQASLPFGWLIVGVALLAVFQSASKIITLKKRWQLALSKGVHFVCNLLFLFVTVYSHLLLVAAGLEAPFLYLYALVYFLQSINFVRIIMRLWLCWKCRSKNPLLYDANYFLCWHTNCYDYCIPYNSVTSSIVITSGDGTTSPISEHDYQIGGYTEKWESGVKDCVVLHSYFTSDYYQLYSTQLSTDTGVEHVTFFIYNKIVDEPEEHVQIHTIDGSSGVVNPVMEPIYDEPTTTTSVPL

SEQ ID NO: 16787 - protein, 275 aa, Artificial Sequence
  SARS-CoV-2__MT834080.1__ORF3a protein
MDLFMRIFTIGTVTLKQGEIKDATPSDFVRATATIPIQAPLPFGWLIVGVALLAVFHSASKIITLKKRWQLALSKGVHFVCNLLLLFVTVYSHLLLVAAGLEAPFLYLYALVYFLQSINFVRIIMRLWLCWKCRSKNPLLYDANYFLCWHTNCYDYCIPYNSVTSSIVITSGDGTTSPISEHDYQIGGYTEKWESGVKDCVVLHSYFTSDYYQLYSTQLSTDTGVEHVTFFIYNKIVDEPEEHVQIHTIDGSSGVVNPVMEPIYDEPTTTTSVPL

SEQ ID NO: 16788 - protein, 275 aa, Artificial Sequence
  SARS-CoV-2__MT834651.1__ORF3a protein
MDLFMRIFTIGTVTLKQGEIKDATPSDFVRATATIPIQASLPFGWLIVGVALLAVFQSASKIITLKKRWQLALSKGVHFVCNLLLLFVTVYSHLLLVAAGLEAPFLYLYALVYFLQSINFVRIIMRLWLCWKCRSKNPLLYDANYFLCWHTNCYDYCIPYNSVTSSIVITSGDGTTSPISEHDYQIGGYTEKWESGVKDCVVLHSYFTSDYYQLYSTQLSTDTGVEHVTFFIYNKIVDGPEEHVQIHTIDGSSGVVNPVMEPIYDEPTTTTSVPL

SEQ ID NO: 16789 - protein, 257 aa, Artificial Sequence
  SARS-CoV-2__MT834849.1__ORF3a protein
MDLFMRIFTIGTVTLKQGEIKDATPSDFVRATATIPIQASLPFGWLIVGVALLAVFHSASKIITLKKRWQLALSKGVHFVCNLLLLFVTVYSHLLLVAAGLEAPFLYLYALVYFLQSINFVRIIMRLWLCWKCRSKNPLLYDANYFLCWHTNCYDYCIPYNSVTSSIVITSGDGTTSPISEHDYQIGGYTEKWESGVKDCVVLHSYFTSDYYQLYSTQLSTDTGVEHVTFFIYNKIVDEPEEHVQIHTIDGSSGVIQ

SEQ ID NO: 16790 - protein, 275 aa, Artificial Sequence
  SARS-CoV-2__MT704820.1__ORF3a protein
MDLFMRIFTIGTVTLKQGEIKDATPSDFVRATATIPIQASLPFGWLIFGVALLAVFQSASKIITLKKRWQLALSKGVHFVCNLLLLFVTVYSHLLLVAAGLEAPFLYLYALVYFLQSINFVRIIMRLWLCWKCRSKNPLLYDANYFLCWHTNCYDYCIPYNSVTSSIVITSGDGTTSPISEHDYQIGGYTEKWESGVKDCVVLHSYFTSDYYQLYSTQLSTDTGVEHVTFFIYNKIVDEPEEHVQIHTIDGSSGVVNPVMEPIYDEPTTTTSVPL

SEQ ID NO: 16791 - protein, 272 aa, Artificial Sequence
  SARS-CoV-2__MT827206.1__ORF3a protein
MDLFMRIFTIGTVTLKQGEIKDATPSDFVRATATIPIQASLPFGWLIVGVALLAVFHSASKIITLKKRWQLALSKGVHFVCNLLLLFVTVYSHLLLVAAGLEAPFLYLYALVYFLQSINFVRIIMRLWLCWKCRSKNPLLYDANYFLCWHTNCYDYCIPYNSVTSSIVITSGDGTTSPISEHDYQIGGYTEKWESGVKDCVVLHSYFTSDYYQLYSTQLSTDTGVEHVTFFIYNKIVDEPEEHVQIHTIDGSSGVVMEPIYDEPTTTTSVPL

SEQ ID NO: 16792 - protein, 275 aa, Artificial Sequence
  SARS-CoV-2__MT827249.1__ORF3a protein
MDLFMRIFTIGTVTLKQGEIKDATPSDFVRATATIPIQASLPFGWLIVGVALLAVFHSASKIITLKKRWQLALSKGIHFVCNLLLLFVTVYSHLLLVAAGLEAPFLYLYALVYFLQSINFVRIIMRLWLCWKCRSKNPLLYDANYFLCWHTNCYDYCIPYNSVTSSIVITSGDGTTSPISEHDYQIGGYTEKWESGVKDCVVLHSYFTSDYYQLYSTQLSTDTGVEHVTFFIYNKIVDEPEEHVQIHTIDGSSGVVNPVMEPIYDEPTTTTSVPL

SEQ ID NO: 16793 - protein, 275 aa, Artificial Sequence
  SARS-CoV-2__MT821572.1__ORF3a protein
MDLFMRIFTIGTVTLKQGEIKDATPSDFVRATATIPIQASLPFGWLIVGVALLAVFHSASKIITLKKRWQLALSKGVHFVCNLLLLFVTVYSHLLLVAAGLEAPFLYLYALVYFLQSINFVRIIMRLWLCWKCRSKNPLLYDANYFLCWHTNCYDYCIPYNSVTSSIVITSGDGTTSPISEHDYQIGGYTEKWESGVKDCVVLHSYFASDYYQLYSTQLSTDTGVEHVTFFIYNKIVDEPEEHVQIHTIDGSSGVVNPVMEPIYDEPTTTTSVPL

SEQ ID NO: 16794 - protein, 275 aa, Artificial Sequence
  SARS-CoV-2__MT821581.1__ORF3a protein
MDLFMRIFTIGTVTLKQGEIKDATPSDFVRATATIPIQASLPFGWLIVGVALLAVFQSASKIITLKKRWQLALSKGVHFVCNLLLLFVTVYSHLLLVAAGLEAPFLYLYALVYFLQSINFVRIIMRLWLCRKCRSKNPLLYDANYFLCWHTNCYDYCIPYNSVTSSIVITSGDGTTSPISEHDYQIGGYTEKWESGVKDCVVLHSYFTSDYYQLYSTQLSTDTGVEHVTFFIYNKIVDEPEEHVQIHTIDGSSGVVNPVMELIYDEPTTTTSVPL

SEQ ID NO: 16795 - protein, 275 aa, Artificial Sequence
  SARS-CoV-2__MT821673.1__ORF3a protein
MDLFMRIFTIGTVTLKQGEIKDATPSDFVRATATIPIQASLPFGWLIVGVALLAVFQSASKIITLKKRWQLALSKGVHFVCNLLLLFVTVYSHLLLVAAGLEAPFLYLYALVYFLQSINFVRIIMMLWLCWKCRSKNPLLYDANYFLCWHTNCYDYCIPYNSVTSSIVITSGDGTTSPISEHDYQIGGYTEKWESGVKDCVVLHSYFTSDYYQLYSTQLSTDTGVEHVTFFIYNKIVDEPEEHVQIHTIDGSSGVVNPVMEPIYDEPTTTTSVPL

SEQ ID NO: 16796 - protein, 275 aa, Artificial Sequence
  SARS-CoV-2__MT821764.1__ORF3a protein
MDLFMRIFTIGTVTLKQGEIKDATPSDFVRATATIPIQASLPFGWLIVGVALLAVFQSASKIITLKKRWQLALSKGVHFVCNLLLLFVTVYSHLLLVAAGLEAPFLYLYALVYFLQSINFVRIIMRLWLCWKCRSKNPLLYDANYFLCWHTNCYDYCIPYNSLTSSIVITSGDGTTSPISEHDYQIGGYTEKWESGVKDCVVLHSYFTSDYYQLYSTQLSTDTGVEHVTFFIYNKIVDEPEEHVQIHTIDGSSGVVNPVMEPIYDEPTTTTSVPL

SEQ ID NO: 16797 - protein, 275 aa, Artificial Sequence
  SARS-CoV-2__MT820461.1__ORF3a protein
MDLFMRIFTIGTVTLKQGEIKDATPSDFVRATATIPIQASLPFGWLIVGVALLAVFQSASKIITLKKRWQLALSEGVHFVCNLLLLFVTVYSHLLLVAAGLEAPFLYLYALVYFLQSINFVRIIMRLWLCWKCRSKNPLLYDANYFLCWHTNCYDYCIPYNSVTSSIVITSGDGTTSPISEHDYQIGGYTEKWESGVKDCVVLHSYFTSDYYQLYSTQLSTDTGVEHVTFFIYNKIVDEPEEHVQIHTIDGSSGVVNPVMEPIYDEPTTTTSVPL

SEQ ID NO: 16798 - protein, 275 aa, Artificial Sequence
  SARS-CoV-2__MT820489.1__ORF3a protein
MDLFMRIFTIGTVTLKQGEIKDATPSDFVRATATIPIQASLPFGWLIVGVALLAVFHSASKIITLKKRWQLALSKGVHFVCNLLLLFVTVYSHLLLVAAGLEAPFLYLYALVYFLQSINFVRIIMRLWLCWKCRSKNPLLYDANYFLCWHTNCYDYCIPYNSVTSLIVITSGDGTTSPISEHDYQIGGYTEKWESGVKDCVVLHSYFTSDYYQLYSTQLSTDTGVEHVTFFIYNKIVDEPEEHVQIHTIDGSSGVVNPVMEPIYDEPTTTTSVPL

SEQ ID NO: 16799 - protein, 275 aa, Artificial Sequence
  SARS-CoV-2__MT810504.1__ORF3a protein
MDLFMRIFTIGTVTLKQGEIKDATPSDFVRATATILIQASLPFGWLIVGVALLAVFHSASKIITLKKRWQLALSKGVHFVCNLLLLFVTVYSHLLLVAAGLEAPFLYLYALVYFLQSINFVRIIMRLWLCWKCRSKNPLLYDANYFLCWHTNCYDYCIPYNSVTSSIVITSGDGTTSPISEHDYQIGGYTEKWESGVKDCVVLHSYFTSDYYQLYSTQLSTDTGVEHVTFFIYNKIVDEPEEHVQIHTIDGSSGVVNPVMEPIYDEPTTTTSVPL

SEQ ID NO: 16800 - protein, 275 aa, Artificial Sequence
  SARS-CoV-2__MT810687.1__ORF3a protein
MDLFMRIFTIGTVTLKQGEIKDATPSDFVRATATIPIQASLPFGWLIVGVALLAVFQSASKIITLKKRWQLALSKGVHFVCNLLLLFVTVYSHLLLVAAGLEAPFLYLYALVYFLQSINFVRIIMRLWLCWKCRSKNPLLYDANYFLCWHTNCYDYCIPYNSVTSSIVITSGDGTTSPISEHDHQIGGYTEKWESGVKDCVVLHSYFTSDYYQLYSTQLSTDTGVEHVTFFIYNKIVDEPEEHVQIHTIDGSSGVVNPVMEPIYDEPTTTTSVPL

SEQ ID NO: 16801 - protein, 275 aa, Artificial Sequence
  SARS-CoV-2__MT810721.1__ORF3a protein
MYLFMRIFTIGTVTLKQGEIKDATPSDFVRATATIPIQASLPFGWLIVGVALLAVFQSASKIITLKKRWQLALSKGVHFVCNLLLLFVTVYSHLLLVAAGLEAPFLYLYALVYFLQSINFVRIIMRLWLCWKCRSKNPLLYDANYFLCWHTNCYDYCIPYNSVTSSIVITSGDGTTSPISEHDYQIGGYTEKWESGVKDCVVLHSYFTSDYYQLYSTQLSTDTGVEHVTFFIYNKIVDEPEEHVQIHTIDGSSGVVNPVMEPIYDEPTTTTSVPL

SEQ ID NO: 16802 - protein, 275 aa, Artificial Sequence
  SARS-CoV-2__MT810727.1__ORF3a protein
MDLFMRIFTIGTVTLKQGEIKDATPSDFVRATATIPIQASLPFGWLIVGVALLAVFHSASKIITLKKRWQLALSKGVHFVCNLLLLFVTVYSHLLLVAAGLEAPFLYLYALVYFLQSINFVRIIMRLWLCWKCRSKNPLLYDANYFLCWHTNCYDYCIPYNSVTSSIVITSGDGTTSPISEHDYQIGGYTEKWESGVKDCVVLHSYFTSDYYQLYSTQLSTDTGVEHVTFFIYNKIVDEPEEHVQIHTIDGSSGVVNPVMEPIYDEPTTTTIVPL

SEQ ID NO: 16803 - protein, 275 aa, Artificial Sequence
  SARS-CoV-2__MT810789.1__ORF3a protein
MDLFMRIFTIGTVTLKQGEIKDATPSDFVRATATIPIQASLPFGWLIVGVALLAVFQSASKIITLKKRWQLALSKGVHFVCNLLLLFVTVYSHLLLVAAGLEAPFLYLYVLVYFLQSINFVRIIMRLWLCWKCRSKNPLLYDANYFLCWHTNCYDYCIPYNSVTSSIVITSGDGTTSPISEHDYQIGGYTEKWESGVKDCVVLHSYFTSDYYQLYSTQLSTDTGVEHVTFFIYNKIVDEPEEHVQIHTIDGSSGVVNPVMEPIYDEPTTTTSVPL

SEQ ID NO: 16804 - protein, 275 aa, Artificial Sequence
  SARS-CoV-2__MT810827.1__ORF3a protein
MDLFMRIFTIGTVTLKQGEIKDATPSDFVRATATIPIQASLPFGWLIVGVALLAVFHSASKIITLKKRWQLALSKGVHFVCNLLLLFVTVYSHLLLVAAGLEAPFLYLYALVYFLQSINFVKIIMRLWLCWKCRSKNPLLYDANYFLCWHTNCYDYCIPYNSVTSSIVITSGDGTTSPISEHDYQIGGYTEKWESGVKDCVVLHSYFTSDYYQLYSTQLSTDTGVEHVTFFIYNKIVDEPEEHVQIHTIDGSSGVVNPVMEPIYDEPTTTTSVPL

SEQ ID NO: 16805 - protein, 275 aa, Artificial Sequence
  SARS-CoV-2__MT810843.1__ORF3a protein
MDLFMRIFTIGTVTLKQGEIKDATPSDFVRATATIPIQASLPFGWLIVGVALLAVFQSASKIITLKKRWQLALSKGVHFVCNLLLLFVTVYSHLLLVAAGLEAPFLYLYALVYFLQSINFVRIIMRLWLCWKCRSKNPLLYDANYFLCWHTNCYDYCIPYNSVTSLIVITSGDGTTSPISEHDYQIGGYTEKWESGVKDCVVLHSYFTSDYYQLYSTQLSTDTGVEHVTFFIYNKIVDEPEEHVQIHTIDGSSGVVNPVMEPIYDEPTTTTSVPL

SEQ ID NO: 16806 - protein, 275 aa, Artificial Sequence
  SARS-CoV-2__MT810882.1__ORF3a protein
MDLFMRIFTIGTVTLKQGEIKDATPSDFVRATATIPIQASLPFGWLIVGVALLAVFHSASKIITLKKRWQLALSKGVQFVCNLLLLFVTVYSHLLLVAAGLEAPFLYLYALVYFLQSINFVRIIMRLWLCWKCRSKNPLLYDANYFLCWHTNCYDYCIPYNSVTSSIVITSGDGTTSPISEHDYQIGGYTEKWESGVKDCVVLHSYFTSDYYQLYSTQLSTDTGVEHVTFFIYNKIVDEPEEHVQIHTIDGSSGVVNPVMEPIYDEPTTTTSVPL

SEQ ID NO: 16807 - protein, 275 aa, Artificial Sequence
  SARS-CoV-2__MT810900.1__ORF3a protein
MDLFMRIFTIGTVTLKQGEIKDATPSDFVRATATIPIQASLPFGWLIVGVALLAVFHSASKIITLKKRWQLALSKGVHFVCNLLLLFVTVYSHLLLVAAGLEAPFLYLYALVYFLQSINFVRIIMRLWLCWKCRSKNPLLYDANYFLCWHTNCYDYCIPYNSVTSSIVITSGDGTTSPISEHDYQIGGYTEKWESGLKDCVVLHSYFTSDYYQLYSTQLSTDTGVEHVTFFIYNKIVDEPEEHVQIHTIDGSSGVVNPVMEPIYDEPTTTTSVPL

SEQ ID NO: 16808 - protein, 275 aa, Artificial Sequence
  SARS-CoV-2__MT810942.1__ORF3a protein
MDLFMRIFTIGTVTLKQGEIKDATPSDFVRATATIPIQASLPFGWLIVGVALLAGFQSASKIITLKKRWQLALSKGVHFVCNLLLLFVTVYSHLLLVAAGLEAPFLYLYALVYFLQSINFVRIIMRLWLCWKCRSKNPLLYDANYFLCWHTNCYDYCIPYNSVTSSIVITSGDGTTSPISEHDYQIGGYTEKWESGVKDCVVLHSYFTSDYYQLYSTQLSTDTGVEHVTFFIYNKIVDEPEEHVQIHTIDGSSGVVNPVMEPIYDEPTTTTSVPL

SEQ ID NO: 16809 - protein, 275 aa, Artificial Sequence
  SARS-CoV-2__MT810985.1__ORF3a protein
MDLFMRIFTIGTVTLKQGEIKDATPLDFVRATATIPIQASLPFGWLIVGVALLAVFQSASKIITLKKRWQLALSKGVHFVCNLLLLFVTVYSHLLLVAAGLEAPFLYLYALVYFLQSINFVRIIMRLWLCWKCRSKNPLLYDANYFLCWHTNCYDYCIPYNSVTSSIVITSGDGTTSPISEHDYQIGGYTEKWESGVKDCVVLHSYFTSDYYQLYSTQLSTDTGVEHVTFFIYNKIVDEPEEHVQIHTIDGSSGVVNPVMEPIYDEPTTTTSVPL

SEQ ID NO: 16810 - protein, 275 aa, Artificial Sequence
  SARS-CoV-2__MT811010.1__ORF3a protein
MDLFMRIFTIGTVTLKQGEIKDATPSDFVRATATIPIQASLLFGWLIVGVALLAVFQSASKIITLKKRWQLALSKGVHFVCNLLLLFVTVYSHLLLVAAGLEAPFLYLYALVYFLQSINFVRIIMRLWLCWKCRSKNPLLYDANYFLCWHTNCYDYCIPYNSVTSSIVITSGDGTTSPISEHDYQIGGYTEKWESGVKDCVVLHSYFTSDYYQLYSTQLSTDTGVEHVTFFIYNKIVDEPEEHVQIHTIDGSSGVVNPVMEPIYDEPTTTTSVPL

SEQ ID NO: 16811 - protein, 275 aa, Artificial Sequence
  SARS-CoV-2__MT811252.1__ORF3a protein
MDLFMRIFTIGTVTLKQGEIKDATPSDFVRATATIPIQASLPFGWLIVGVALLAVFQSASKIITLKKRWQLALSKGVHFVCNLLLLFVTVYSHLLLVAAGLEAPFLYLYALVYFLQSINFVRIIMRLWLCWKCRSKNPLLYDANYFLCWHTNCYDYCIPYNSVTSSIVITSGDGTTSPISEHDYQIGGYTEKWESGVKDCVVLHSYFTSDYYQLYSTQLSTDTGVEHVTFFIYNKIVDEPEEHVQIHTIDGSSGVVNPVMEPIYDEPKTTTSVPL

SEQ ID NO: 16812 - protein, 275 aa, Artificial Sequence
  SARS-CoV-2__MT811259.1__ORF3a protein
MDLFMRIFTIGTVTLKQGEIKDATPSDFVRATATIPIQASLPFGWLIVGVALLAVFHSASKIITLKKRWQLALSKGVHFVCNLLLLFVTVYSHLLLVAAGLEAPFLYLYALVYFLQSINFVRIIMRLWLCWKCRSKNPLLYDANYFLCWHTNCYDYCIPYNSVTFSIVITSGDGTTSPISEHDYQIGGYTEKWESGVKDCVVLHSYFTSDYYQLYSTQLSTDTGVEHVTFFIYNKIVDEPEEHVQIHTIDGSSGVVNPVMEPIYDEPTTTTSVPL

SEQ ID NO: 16813 - protein, 275 aa, Artificial Sequence
  SARS-CoV-2__MT811301.1__ORF3a protein
MDLFMRIFTIGTVTLKQGEIKDATPSDFVRATATIPIQASLPFGWLIVGVALLAVFQSASKIITLKKRWQLALSKGVHFVCNLLLLFVTVYSHLLLVAAGLEAPFLYLYALVYFLQSINFVRIIMRLWLCWKCRSKNPLLYDANYFFCWHTNCYDYCIPYNSVTSSIVITSGDGTTSPISEHDYQIGGYTEKWESGVKDCVVLHSYFTSDYYQLYSTQLSTDTGVEHVTFFIYNKIVDEPEEHVQIHTIDGSSGVVNPVMEPIYDEPTTTTSVPL

SEQ ID NO: 16814 - protein, 275 aa, Artificial Sequence
  SARS-CoV-2__MT811420.1__ORF3a protein
MDLFMRIFTIGTVTLKQGEIKDATPSDFVRATATIPIQASLPFGWLIVGVALLAVFQSASKIITLKKRWQLALSKGVHFVCNLLLLFVTVYSHLLLVAAGLEAPFLYLYALVYFLQSINFVRIIMRLWLCCKCRSKNPLLYDANYFLCWHTNCYDYCIPYNSVTSSIVITSGDGTTSPISEHDYQIGGYTEKWESGVKDCVVLHSYFTSDYYQLYSTQLSTDTGVEHVTFFIYNKIVDEPEEHVQIHTIDGSSGVVNPVMEPIYDEPTTTTSVPL

SEQ ID NO: 16815 - protein, 275 aa, Artificial Sequence
  SARS-CoV-2__MT811464.1__ORF3a protein
MDLFMRIFTIGTVTLKQGEIKDATPSDFVRATATIPIQASLPFGWLIVGVALLAVFQSASKIITLKKRWQLALSKGVHFVCNLLLLFVTVYSHLLLVAAGLEAPFLYLYALVYFLQSINFVRIIMRLWLCWKCRSKNPLLYDANYFLCWHTNCYDYCIPHNSVTSSIVITSGDGTTSPISEHDYQIGGYTEKWESGVKDCVVLHSYFTSDYYQLYSTQLSTDTGVEHVTFFIYNKIVDEPEEHVQIHTIDGSSGVVNPVMEPIYDEPTTTTSVPL

SEQ ID NO: 16816 - protein, 275 aa, Artificial Sequence
  SARS-CoV-2__MT811495.1__ORF3a protein
MDLFMRIFTIGTVTLKQGEIKDATPSDFVRATATIPIQASLPFGWLIVGVALLAVFHSASKIITLKKRWQLALSKGVHFVCNLLLLFVTVYSHLLLVAAGLEAPFLYLYALVYFLQSINFVRIIMRLWLCWKCRSKNPLLYDAYYFLCWHTNCYDYCIPYNSVTSSIVITSGDGTTSPISEHDYQIGGYTEKWESGVKDCVVLHSYFTSDYYQLYSTQLSTDTGVEHVTFFIYNKIVDEPEEHVQIHTIDGSSGVVNPVMEPIYDEPTTTTSVPL

SEQ ID NO: 16817 - protein, 275 aa, Artificial Sequence
  SARS-CoV-2__MT811505.1__ORF3a protein
MDLFMRIFTIGTVTLKQGEIKDATPSDFVRATATIPIQASLPFGWLIVGVALLAVFQSASKIITLKKRWQLALSKGVHFVCNLLLLFVTVYSHLLLVAAGLEAPFLYLYALLYFLQSINFVRIIMRLWLCWKCRSKNPLLYDANYFLCWHTNCYDYCIPYNSVTSSIVITSGDGTTSPISEHDYQIGGYTEKWESGVKDCVVLHSYFTSDYYQLYSTQLSTDTGVEHVTFFIYNKIVDEPEEHVQIHTIDGSSGVVNPVMEPIYDEPTTTTSVPL

SEQ ID NO: 16818 - protein, 275 aa, Artificial Sequence
  SARS-CoV-2__MT811513.1__ORF3a protein
MDLFMRIFTIGTVTLKQGEIKDATPSDFVRATATIPIQASLPFGWLIVGVALLAVFQSASKIITLKKRWQLALSKGVHFVCNLLLLFVTVYSHLLLVAAGLEAPFLYLYALVYFLQSINFVRIIMRLWLCWKCRSKNPLLYDANYFLCWHTNCYDYCIPYNSVTSSIVITSGDGTTSPISEHDYQIGGYTEKWESGVKDCVVLHSYFTSDYYQLYSTQLSTDTGVEHVTFFIYNKIVDEPEEHVQIHTIDGSSGVVNPLMEPIYDEPTTTTSVPL

SEQ ID NO: 16819 - protein, 275 aa, Artificial Sequence
  SARS-CoV-2__MT811520.1__ORF3a protein
MDLFMRIFTIGTVTLKQGEIKDATPSDFVRATATIPIQASLPFGWLIVGVALLAVFQSASKIITLKKRWQLALSKGVHFVCNLLLLFVTVYSHLLLVAAFLEAPFLYLYALVYFLQSINFVRIIMRLWLCWKCRSKNPLLYDANYFLCWHTNCYDYCIPYNSVTSSIVITSGDGTTSPISEHDYQIGGYTEKWESGVKDCVVLHSYFTSDYYQLYSTQLSTDTGVEHVTFFIYNKIVDEPEEHVQIHTIDGSSGVVNPVMEPIYDEPTTTTSVPL

SEQ ID NO: 16820 - protein, 275 aa, Artificial Sequence
  SARS-CoV-2__MT811526.1__ORF3a protein
MDLFMRIFTIGTVTLKQGEIKDATPSDFVRATATIPIQASLPFGWLIVGVALLAVFQSASKIITLKKRWQLALSKGVHFVCNLLLLFVTVYSHLLLVAAGLEAPFLYLYALVYFLQSIHFVRIIMRLWLCWKCRSKNPLLYDANYFLCWHTNCYDYCIPYNSVTSSIVITSGDGTTSPISEHDYQIGGYTEKWESGVKDCVVLHSYFTSDYYQLYSTQLSTDTGVEHVTFFIYNKIVDEPEEHVQIHTIDGSSGVVNPVMEPIYDEPTTTTSVPL

SEQ ID NO: 16821 - protein, 275 aa, Artificial Sequence
  SARS-CoV-2__MT811535.1__ORF3a protein
MDLFMRIFTIGTVTLKQGEIKDATPSDFVRATATIPIQASLPFGWLIVGVALLAVFQSASKIITLKKRWQLALSKGVHFVCNLLLLFVTVYSHLLLVAAGLEAPFLYLYALVYFLQSINFVRIIMRLWLCWKCRSKNPLLYDANYFLCWHTNCYDYCIPYNSVTSSIVITSGDGTTSPISEHDYQIGGYTEKWESGVKDCVVLHSYFTSDYYQLYSTQFSTDTGVEHVTFFIYNKIVDEPEEHVQIHTIDGSSGVVNPVMEPIYDEPTTTTSVPL

SEQ ID NO: 16822 - protein, 275 aa, Artificial Sequence
  SARS-CoV-2__MT811544.1__ORF3a protein
MDLFMRIFTIGTVTLKQGEIKDATPSDFVRATATTPIQASLPFGWLIVGVALLAVFHSASKIITLKKRWQLALSKGVHFVCNLLLLFVTVYSHLLLVAAGLEAPFLYLYALVYFLQSINFVRIIMRLWLCWKCRSKNPLLYDANYFLCWHTNCYDYCIPYNSVTSSIVITSGDGTTSPISEHDYQIGGYTEKWESGVKDCVVLHSYFTSDYYQLYSTQLSTDTGVEHVTFFIYNKIVDEPEEHVQIHTIDGSSGVVNPVMEPIYDEPTTTTSVPL

SEQ ID NO: 16823 - protein, 275 aa, Artificial Sequence
  SARS-CoV-2__MT811711.1__ORF3a protein
MDLFMRIFTIGTVTLKQGEIKDATPSDFVRATATIPIQASLPFGWLIVGVALLAVFHSASKIITLKKRWQLALSKGVHFVCNLLLLFVTVYSHLLLVAAGLEAPFLYLYALVYFLQSINFVRIIMRLWLCWKCRSKNPLLYDANYFLCWHTNCYDYCIPYNSVTSSIVITSGDGTTSPISEHDYQIGGYTEKWESGVKDCVVLHSYFTSDYYQLYSTQLSTDTGVEHVTFFIYNKIVDEPEEHVQIHTIDGSSGVVNPVMEPIYDEPTTTTSLPL

SEQ ID NO: 16824 - protein, 275 aa, Artificial Sequence
  SARS-CoV-2__MT811727.1__ORF3a protein
MDLFMRIFTIGTVTLKQGEIKDATPSDFVRATATIPIQASLPFGWLIVGVALLAVFHSASKIITLKKRWQLALSKGVHFVCNLLLLFVTVYSHLLLVAAGLEAPFLYLYALVYFLQSINFVRIIMRLWLCWKCRSKNPLLYDANYFLCWHTNCYDYCVPYNSVTSSIVITSGDGTTSPISEHDYQIGGYTEKWESGVKDCVVLHSYFTSDYYQLYSTQLSTDTGVEHVTFFIYNKIVDEPEEHVQIHTIDGSSGVVNPVMEPIYDEPTTTTSVPL

SEQ ID NO: 16825 - protein, 275 aa, Artificial Sequence
  SARS-CoV-2__MT806773.1__ORF3a protein
MDLFMRIFTIGTVTLKQGEIKDATPSDFVRATATIPIQASLPFGWLIVGVALLAVFHSASKIITLKKRWQLALSKGVHFVCNLLLLFVTVYSHLLLVAAGLEAPFLYLYALVYFLQSINFVRIIMRLWLCLKCRSKNPLLYDANYFLCWHTNCYDYCIPYNSVTSSIVITSGDGTTSPISEHDYQIGGYTEKWESGVKDCVVLHSYFTSDYYQLYSTQLSTDTGVEHVTFFIYNKIVDEPEEHVQIHTIDGSSGVVNPVMEPIYDEPTTTTSVPL

SEQ ID NO: 16826 - protein, 275 aa, Artificial Sequence
  SARS-CoV-2__MT806884.1__ORF3a protein
MDLFMTIFTIGTVTLKQGEIKDATPSDFVRATATIPIQASLPFGWLIVGVALLAVFHSASKIITLKKRWQLALSKGVHFVCNLLLLFVTVYSHLLLVAAGLEAPFLYLYALVYFLQSINFVRIIMRLCLCWKCRSKNPLLYDANYFLCWHTNCYDYCIPYNSVTSSIVITSGDGTTSPISEHDYQIGGYTEKWESGVKDCVVLHSYFTSDYYQLYSTQLSTDTGVEHVTFFIYNKIVDEPEEHVQIHTIDGSSGVVNPVMEPIYDEPTTTTSVPL

SEQ ID NO: 16827 - protein, 275 aa, Artificial Sequence
  SARS-CoV-2__MT800021.1__ORF3a protein
MDLFMRIFTIGTVTLKQGEIKDATPSDFVRATATIPIQASLPFGWLIVGVALLAVFQSASKIITLKKIWQLALSKGVHFVCNLLLLFVTVYSHLLLVAAGLEAPFLYLYALVYFLQSINFVRIIMRLWLCWKCRSKNPLLYDANYFLCWHTNCYDYCIPYNSVTSSIVITSGDGTTSPISEHDYQIGGYTEKWESGVKDCVVLHSYFTSDYYQLYSTQLSTDTGVEHVTFFIYNKIVDEPEEHVQIHTIDGSSGVVNPVMEPIYDEPTTTTSVPL

SEQ ID NO: 16828 - protein, 272 aa, Artificial Sequence
  SARS-CoV-2__MT800029.1__ORF3a protein
MDLFMRIFTIGTVTLKQKDATPSDFVRATATIPIQASLPFGWLIVGVALLAVFQSASKIITLKKRWQLALSKGVHFVCNLLLLFVTVYSHLLLVAAGLEAPFLYLYALVYFLQSINFVRIIMRLWLCWKCRSKNPLLYDANYFLCWHTNCYDYCIPYNSVTSSIVITSGDGTTSPISEHDYQIGGYTEKWESGVKDCVVLHSYFTSDYYQLYSTQLSTDTGVEHVTFFIYNKIVDEPEEHVQIHTIDGSSGVVNPVMEPIYDEPTTTTSVPL

SEQ ID NO: 16829 - protein, 274 aa, Artificial Sequence
  SARS-CoV-2__MT800036.1__ORF3a protein
MDLFMRIFTIGTVTLKQGEIKDATPSDFVRATATIPIQASLPFGWLIVGVALLAVFHSASKIITLKKRWQLALSKGVHFVCNLLLLFVTVYSHLLLVAAGLEAPFLYLYALVYFLQSINFVRIIMRLWLCWKCRSKNPLLYDANYFLCWHTNCYDYCIPYNSVTSSIVITSGDGTTSPISEHDYQIGGYTEKWESGVKDCVVLHSYFTSDYYQLYSTQLSTDTGVEHVTFFIYNKIVDEPEEHVQIHTIDGSSGVDPVMEPIYDEPTTTTSVPL

SEQ ID NO: 16830 - protein, 275 aa, Artificial Sequence
  SARS-CoV-2__MT800050.1__ORF3a protein
MDLFMRIFTIGTVTLKQGEIQDATPSDFVRATATIPIQASLPFGWLIVGVALLAVFQSASKIITLKKRWQLALSKGVHFVCNLLLLFVTVYSHLLLVAAGLEAPFLYLYALVYFLQSINFVRIIMRLWLCWKCRSKNPLLYDANYFLCWHTNCYDYCIPYNSVTSSIVITSGDGTTSPISEHDYQIGGYTEKWESGVKDCVVLHSYFTSDYYQLYSTQLSTDTGVEHVTFFIYNKIVDEPEEHVQIHTIDGSSGVVNPVMEPIYDEPTTTTSVPL

SEQ ID NO: 16831 - protein, 275 aa, Artificial Sequence
  SARS-CoV-2__MT801003.1__ORF3a protein
MDLFMRIFTIGTVTLKQGEIKDATPSDFVRATATIPIQASLPFGWLIVGVALLAVFHSASKIITLKKRWQLAFSKGVHFVCNLLLLFVTVYSHLLLVAAGLEAPFLYLYALVYFLQSINFVRIIMRLWLCWKCRSKNPLLYDANYFLCWHTNCYDYCIPYNSVTSSIVITSGDGTTSPISEHDYQIGGYTEKWESGVKDCVVLHSYFTSDYYQLYSTQLSTDTGVEHVTFFIYNKIVDEPEEHVQIHTIDGSSGVVNPVMEPIYDEPTTTTSVPL

SEQ ID NO: 16832 - protein, 275 aa, Artificial Sequence
  SARS-CoV-2__MT252720.1__ORF3a protein
MDLFMRIFTIGTVTLKQGEIKDATPSDFVRATATIPIQASLPFGWLIVGVALLAVFQSASKIITLKKRWQLALSKGVHFVCNLLLLFVTVYSHLLLVAAGLEAPFLYLYALVYFLQSINFVRIIMRLWLCWKCRSKNPLLYDANYFLCWHTNCYDYCIPYNSVTSSIVITSGDGTTSPISEHDYQIGGYTEKWESGVKDCVVLHSYFTSDYYQLYSTQLSTDTGVEHVTFFIYNKIVDEPEEHVQIHTIDCSSGVVNPVMEPIYDEPTTTTSVPL

SEQ ID NO: 16833 - protein, 275 aa, Artificial Sequence
  SARS-CoV-2__MT252817.1__ORF3a protein
MDLFMRIFTIGTVTLKQGEIKDATPSDFVRATATIPIQASLPFGWLIVGVALLAVFQSASKIITLKKRWQLALSKGVHFVCNLLLLFVTVYSHLLLVAAGLEAPFLYLYALVYFLQSINFVRIIMRLWLCWKCRSKNPLLYDANYFLCWHTNCYDYCIPYNSVTSSIVITSGDGTTSPISEHDYQIGGYTEKWESGVKDCVVLHSYFTSDYYQLYSTQLSTDTGVEHVTFFIYNKIVDEPEEHVQIHTIDGSSRVVNPVMEPIYDEPTTTTSVPL

SEQ ID NO: 16834 - protein, 275 aa, Artificial Sequence
  SARS-CoV-2__MT795875.1__ORF3a protein
MDLFMRIFTIGTVTLKQGEIKDATPSDFVRATATIPIQASLPFGWLIVGVALLAVFQSASKIITLKKRWQLALSKGVHFVCNLLLLFVTVYSHLLLVAAGLEAPFLYLYALVYFLQSINFVRIIMRLWLCWKCRSKNPLLYDANYFLCWHTNCYDYCIPYNSVTSSIVITSCDGTTSPISEHDYQIGGYTEKWESGVKDCVVLHSYFTSDYYQLYSTQLSTDTGVEHVTFFIYNKIVDEPEEHVQIHTIDGSSGVVNPVMEPIYDEPTTTTSVPL

SEQ ID NO: 16835 - protein, 275 aa, Artificial Sequence
  SARS-CoV-2__MT795884.1__ORF3a protein
MDLFMRIFTIGTVTLKQGEIKDATPSDFVRATATIPIQASLPFGWLIVGVALHAVFHSASKIITLKKRWQLALSKGVHFVCNLLLLFVTVYSHLLLVAAGLEAPFLYLYALVYFLQSINFVRIIMRLWLCWKCRSKNPLLYDANYFLCWHTNCYDYCIPYNSVTSSIVITSGDGTTSPISEHDYQIGGYTEKWESGVKDCVVLHSYFTSDYYQLYSTQLSTDTGVEHVTFFIYNKIVDEPEEHVQIHTIDGSSGVVNPVMEPIYDEPTTTTSVPL

SEQ ID NO: 16836 - protein, 275 aa, Artificial Sequence
  SARS-CoV-2__MT797760.1__ORF3a protein
MDLFMRIFTIGTVTLKQGEIKDATPSDFVRATATIPIQASLPFGWFIVGVALLAVFHSASKIITLKKRWQLALSKGVHFVCNLLLLFVTVYSHLLLVAAGLEAPFLYLYALVYFLQSINFVRIIMRLWLCWKCRSKNPLLYDANYFLCWHTNCYDYCIPYNSVTSSIVITSGDGTTSPISEHDYQIGGYTEKWESGVKDCVVLHSYFTSDYYQLYSTQLSTDTGVEHVTFFIYNKIVDEPEEHVQIHTIDGSSGVVNPVMEPIYDEPTTTTSVPL

SEQ ID NO: 16837 - protein, 275 aa, Artificial Sequence
  SARS-CoV-2__MT791915.1__ORF3a protein
MDLFMRIFTIGTVTLKQGEIKDSTPSDFVRATATIPIQASLPFGWLIVGVALLAVFQSASKIITLKKRWQLALSKGVHFVCNLLLLFVTVYSHLLLVAAGLEAPFLYLYALVYFLQSINFVRIIMRLWLCWKCRSKNPLLYDANYFLCWHTNCYDYCIPYNSVTSSIVITSGDGTTSPISEHDYQIGGYTEKWESGVKDCVVLHSYFTSDYYQLYSTQLSTDTGVEHVTFFIYNKIVDEPEEHVQIHTIDVSSGVVNPVMEPIYDEPTTTTSVPL

SEQ ID NO: 16838 - protein, 275 aa, Artificial Sequence
  SARS-CoV-2__MT791954.1__ORF3a protein
MDLFMRIFTIGTVTLKQGEIKDATPSDFVRATATIPIQASLPFGWLIVGVALLAVFYSASKIITLKKRWQLALSKGVHFVCNLLLLFVTVYSHLLLVAAGLEAPFLYLYALVYFLQSINFVRIIMRLWLCWKCRSKNPLLYDANYFLCWHTNCYDYCIPYNSVTSSIVITSGDGTTSPISEHDYQIGGYTEKWESGVKDCVVLHSYFTSDYYQLYSTQLSTDTGVEHVTFFIYNKIVDEPEEHVQIHTIDGSSGVVNPVMEPIYDEPTTTTSVPL

SEQ ID NO: 16839 - protein, 275 aa, Artificial Sequence
  SARS-CoV-2__MT786802.1__ORF3a protein
MDLFMRIFTIGTVTLKQGEIKDATPSDFVRATATIPIQASLPFGWLIVGVALLAVFHSASKIITLKKRWQLALSKGVHFVCNLLLLFVTVYSHLLLVAAGLEAPFLYLYALVYFLQSINFVRIIMRLWLCWKCRSKNPLLYDANYFLCWHTNCYYYCIPYNSVTSSIVITSGDGTTSPISEHDYQIGGYTEKWESGVKDCVVLHSYFTSDYYQLYSTQLSTDTGVEHVTFFIYNKIVDEPEEHVQIHTIDGSSGVVNPVMEPIYDEPTTTTSVPL

SEQ ID NO: 16840 - protein, 275 aa, Artificial Sequence
  SARS-CoV-2__MT786838.1__ORF3a protein
MDLFMRTFTIGTVTLKQGEIKDATPSDFVRATATIPIQASLPFGWLIVGVALLAVFHSASKIITLKKRWQLALSKGVHFVCNLLLLFVTVYSHLLLVAAGLEAPFLYLYALVYFLQSINFVRIIMRLWLCWKCRSKNPLLYDANYFLCWHTNCYDYCIPYNSVTSSIVITSGDGTTSPISEHDYQIGGYTEKWESGVKDCVVLHSYFTSDYYQLYSTQLSTDTGVEHVTFFIYNKIVDEPEEHVQIHTIDGSSGVVNPVMEPIYDEPTTTTSVPL

SEQ ID NO: 16841 - protein, 275 aa, Artificial Sequence
  SARS-CoV-2__MT786846.1__ORF3a protein
MDLFMRIFTIGTVTLKQGEIKDATPSDFVRATATIPIQASLPFGWLIVGVALLAVFQSASKIITLKKRWQLALSKGVHFVCNLLLLFVTVYSHLLLVAAGLEAPFLYLYALVYFLQSINFVRIIMRLWLCWKCRSKNPLLYDAYYFLCWHTNCYDYCIPYNSVTSSIVITSGDGTTSPISEHDYQIGGYTEKWESGVKDCVVLHSYFTSDYYQLYSTQLSTDTGVEHVTFFIYNKIVDEPEEHVQIHTIDGSSGVVNPVMEPIYDEPTTTTSVPL

SEQ ID NO: 16842 - protein, 275 aa, Artificial Sequence
  SARS-CoV-2__MT789712.1__ORF3a protein
MDLFMRIFTIGTVTLKQGEIKDATPSDFVRATATIPIQASLPFGWLIVGVALLAVFQSASKIITLKKRWQLALSKGVHFVCNLLLLFVTVYSHLLFVAAGLEAPFLYLYALVYFLQSINFVRIIMRLWLCWKCRSKNPLLYDANYFLCWHTNCYDYCIPYNSVTSSIVITSGDGTTSPISEHDYQIGGYTEKWESGVKDCVVLHSYFTSDYYQLYSTQLSTDTGVEHVTFFIYNKIVDEPEEHVQIHTIDGSSGVVNPVMEPIYDEPTTTTSVPL

SEQ ID NO: 16843 - protein, 275 aa, Artificial Sequence
  SARS-CoV-2__MT782364.1__ORF3a protein
MDLFMRIFTIGTVTLKQCEIKDATPSDFVRATATIPIQASLPFGWLIVGVALLAVFHSASKIITLKKRWQLALSKGVHFVCNLLLLFVTVYSHLLLVAAGLEAPFLYLYALVYFLQSINFVRIIMRLWLCWKCRSKNPLLYDANYFLCWHTNCYDYCIPYNSVTSSIVITSGDGTTSPISEHDYQIGGYTEKWESGVKDCVVLHSYFTSDYYQLYSTQLSTDTGVEHVTFFIYNKIVDEPEEHVQIHTIDGSSGVVNPVMEPIYDEPTTTTSVPL

SEQ ID NO: 16844 - protein, 275 aa, Artificial Sequence
  SARS-CoV-2__MT776411.1__ORF3a protein
MDLFMRIFTIGTVTLKQGEIKDATPSDFVRATATIPIQASLPFGWLIVGVALLAVFQSASKIITLKKRWQLALSKGVHFVCNLLLLFVTVYSHLLLVAAGLEAPFLYLYALVYFLQSINFVRIIMRLWLCWKCRSKNPLLYDANYFLCWHTNCYDYCIPYNSVTSSIVITSGDGTTSPISEHDYQIGGYTEKWESGVKDCVVLHSYFTSDYYQLYSTQSSTDTGVEHVTFFIYNKIVDEPEEHVQIHTIDGSSGVVNPVMEPIYDEPTTTTSVPL

SEQ ID NO: 16845 - protein, 275 aa, Artificial Sequence
  SARS-CoV-2__MT776420.1__ORF3a protein
MDLFMRIFTIGTVTLKQGEIKDATPSDFVRATETIPIQASLPFGWLIVGVALLAVFHSASKIITLKKRWQLALSKGVHFVCNLLLLFVTVYSHLLLVAAGLEAPFLYLYALVYFLQSINFVRIIMRLWLCWKCRSKNPLLYDANYFLCWHTNCYDYCIPYNSVTSSIVITSGDGTTSPISEHDYQIGGYTEKWESGVKDCVVLHSYFTSDYYQLYSTQLSTDTGVEHVTFFIYNKIVDEPEEHVQIHTIDGSSGVVNPVMEPIYDEPTTTTSVPL

SEQ ID NO: 16846 - protein, 275 aa, Artificial Sequence
  SARS-CoV-2__MT772428.1__ORF3a protein
MDLFMRIFTIGTVTLKQGEIKDATPSDFVRATATIPIQASLPFGWLIVGVALLAVFHSASKIITLKKRWQLALSKGVHFVCNLLLLFLTVYSHLLLVAAGLEAPFLYLYALVYFLQSINFVRIIMRLWLCWKCRSKNPLLYDANYFLCWHTNCYDYCIPYNSVTSSIVITSGDGTTSPISEHDYQIGGYTEKWESGVKDCVVLHSYFTSDYYQLYSTQLSTDTGVEHVTFFIYNKIVDEPEEHVQIHTIDGSSGVVNPVMEPIYDEPTTTTSVPL

SEQ ID NO: 16847 - protein, 275 aa, Artificial Sequence
  SARS-CoV-2__MT772496.1__ORF3a protein
MDLFMRIFTIGTVTLKQGEIKDATPSDFVRATATIPIQASLPFGWLIVGVALLAVFHSASKIITLKKRWQLALSKGVHFVCNLLLLFVTVYSHLLLVAAGLEAPFLYLYALVYFLQSINFVRIIMRLWLCWKCRSKNPLLYDANYFLCWHTNCYDYCIPYNSVTSSIVITSGDGTTSPISEHDYQIGGYTEKWESGVKDCVVLHSYFTSDYYQLYSTQLSTDTGVEHVTFFIYNKIVDELEEHVQIHTIDGSSGVVNPVMEPIYDEPTTTTSVPL

SEQ ID NO: 16848 - protein, 275 aa, Artificial Sequence
  SARS-CoV-2__MT772558.1__ORF3a protein
MDLFMRIFTIGTVTLKQGEIKDATPSDFVRATATIPIQASLPFGWLIVGVALLAVFQSASKIITLKKRWQLALSKGVHFVCNLLLLFVTVYSHLLLVAAGLEAPFLYLYALVYFLQSINFVRIIMRLWLCWKCRSKNPLLYDANYFLCWHTNCYDYCTPYNSVTSSIVITSGDGTTSPISEHDYQIGGYTEKWESGVKDCVVLHSYFTSDYYQLYSTQLSTDTGVEHVTFFIYNKIVDEPEEHVQIHTIDGSSGVVNPVMEPIYDEPTTTTSVPL

SEQ ID NO: 16849 - protein, 275 aa, Artificial Sequence
  SARS-CoV-2__MT758203.1__ORF3a protein
MDLFMRIFTIGTVTLKQGEIKDATPSDFVRATATIPIQASLRFGWLIVGVALLAVFHSASKIITLKKRWQLALSKGVHFVCNLLLLFVTVYSHLLLVAAGLEAPFLYLYALVYFLQSINFVRIIMRLWLCWKCRSKNPLLYDANYFLCWHTNCYDYCIPYNSVTSSIVITSGDGTTSPISEHDYQIGGYTEKWESGVKDCVVLHSYFTSDYYQLYSTQLSTDTGVEHVTFFIYNKIVDEPEEHVQIHTIDGSSGVVNPVMEPIYDEPTTTTSVPL

SEQ ID NO: 16850 - protein, 275 aa, Artificial Sequence
  SARS-CoV-2__MT759820.1__ORF3a protein
MDLFMRIFTIGTVTLKQGEIKDSTPSDFVRATATIPIQASLPFGWLIVGVALLAVFQSASKIITLKKRWQLALSKGVHFVCNLLLLFVTVYSHLLLVAAGLEAPFLYLYALVYFLQSINFVRIIMRLWLCWKCRSKNPLLYDANYFLCWHTNCYDYCIPYNSVTSSIVITSGDGTTSPISEHDYQIGGYTEKWESGVKDCVVLHSYFTSDYYQLYSTQLSTDTGVEHVTFFIYNKIVDEPEEHVQIHTIDGSSGVVNPVMEPIYDEPTTTTSVPL

SEQ ID NO: 16851 - protein, 275 aa, Artificial Sequence
  SARS-CoV-2__MT762396.1__ORF3a protein
MDLFMRIFTIGTVTLKQGEIKDATPSDFVRATATIPIEASLPFGWLIVGVALLAVFQSASKIITLKKRWQLALSKGVHFVCNLLLLFVTVYSHLLLVAAGLEAPFLYLYALVYFLQSINFVRIIMRLWLCWKCRSKNPLLYDANYFLCWHTNCYDYCIPYNSVTSSIVITSGDGTTSPISEHDYQIGGYTEKWESGVKDCVVLHSYFTSDYYQLYSTQLSTDTGVEHVTFFIYNKIVDEPEEHVQIHTIDGSSGVVNPVMEPIYDEPTTTTSVPL

SEQ ID NO: 16852 - protein, 275 aa, Artificial Sequence
  SARS-CoV-2__MT762397.1__ORF3a protein
MDLFMRIFTIGTVTLKQGEIKDATPSDFVRATATIPIQASLPFGLLIVGVALLAVFQSASKIIILKKRWQLALSKGVHFVCNLLLLFVTVYSHLLLVAAGLEAPFLYLYALVYFLQSINFVRIIMRLWLCWKCRSKNPLLYDANYFLCWHTNCYDYCIPYNSVTSSIVITSGDGTTSPISEHDYQIGGYTEKWESGVKDCVVLHSYFTSDYYQLYSTQLSTDTGVEHVTFFIYNKIVDEPEEHVQIHTIDGSSGVVNPVMEPIYDEPTTTTSVPL

SEQ ID NO: 16853 - protein, 275 aa, Artificial Sequence
  SARS-CoV-2__MT762398.1__ORF3a protein
MDLFMRIFTIGTVTLKQGEIKDATPSDFVRATATIPIQASLPFGWLIVGVALLAVFHSASKIITLKKRWQLALSKGVHFVCNLLLLFVTVYSHLLLVAAGLESPFLYLYALVYFLQSINFVRIIMRLWLCWKCRSKNPLLYDANYFLCWHTNCYDYCIPYNSVTSSIVITSGDGTTSPISEHDYQIGGYTEKWESGVKDCVVLHSYFTSDYYQLYSTQLSTDTGVEHVTFFIYNKIVDEPEEHVQIHTIDGSSGVVNPVMEPIYDEPTTTTSVPL

SEQ ID NO: 16854 - protein, 275 aa, Artificial Sequence
  SARS-CoV-2__MT755838.1__ORF3a protein
MDLFMRIFTIGTVTLKQGEIKDATPSDFVRATATIPIQASLPFGWLIVGVALLAVFQSASKIITLKKRWQLALSKGVHFVCNLLLLFVTVYSHLLLVAAGLEAPFLYLYALVYFLQSINFVRIIMRLWLCWKCRSKNPLLYDANYFLCWHTNCYDYCIPYNSVTSSIVITSGDGTTSPISEHDYQIGCYTEKWESGVKDCVVLHSYFTSDYYQLYSTQLSTDTGVEHVTFFIYNKIVDEPEEHVQIHTIDGSSGVVNPVMEPIYDEPTTTTSVPL

SEQ ID NO: 16855 - protein, 274 aa, Artificial Sequence
  SARS-CoV-2__MT755858.1__ORF3a protein
MDLFMRIFTIGTVTLKQGEIKDATPSDFVRATATIPIQASLPFGWLIVGVALLAVFQSASKIITLKKRWQLALSKGVHFVCNLLLLFVTVYSHLLLVAAGLEAPFLYLYALVYFLQSINFVRIIMRLWLCWKCRSKNPLLYDANYFLCWHTNCYDYCIPYNSVTSSIVITSGDGTTSPISEHDYQIGGYTEKWESGVKDCVVLHSYFTSDYYQLYSTQLSTDTGVEHVTFFIYNKIVDEPEEHVQIHTIDGSSGVNPVMEPIYDEPTTTTSVPL

SEQ ID NO: 16856 - protein, 275 aa, Artificial Sequence
  SARS-CoV-2__MT755886.1__ORF3a protein
MDLFMRIFTIGTVTLKQGEIKDATPSDFVRATATIPIQASLPFGWLIVGVSLLAVFHSASKIITLKKRWQLALSKGVHFVCNLLLLFVTVYSHLLLVAAGLEAPFLYLYALVYFLQSINFVRIIMRLWLCWKCRSKNPLLYDANYFLCWHTNCYDYCIPYNSVTSSIVITSGDGTTSPISEHDYQIGGYTEKWESGVKDCVVLHSYFTSDYYQLYSTQLSTDTGVEHVTFFIYNKIVDEPEEHVQIHTIDGSSGVVNPVMEPIYDEPTTTTSVPL

SEQ ID NO: 16857 - protein, 275 aa, Artificial Sequence
  SARS-CoV-2__MT755897.1__ORF3a protein
MDLFMRIFTIGTVTLKQGEIKDATPSDFVRATATIPIQASLPFGWLIVGVALLAVFHSASKIITLKKRWQLALSKGVHFVCNLLLLFVTVYSHLLLVASGLEAPFLYLYALVYFLQSINFVRIIMRLWLCWKCRSKNPLLYDANYFLCWHTNCYDYCIPYNSVTSSIVITSGDGTTSPISEHDYQIGGYTEKWESGVKDCVVLHSYFTSDYYQLYSTQLSTDTGVEHVTFFIYNKIVDEPEEHVQIHTIDGSSGVVNPVMEPIYDEPTTTTSVPL

SEQ ID NO: 16858 - protein, 275 aa, Artificial Sequence
  SARS-CoV-2__MT755899.1__ORF3a protein
MDLFMRIFTIGTVTLKQGEIKDATPSDFVRATATIPIQASLPFGWLIVGVALLAVFHSASKIITLKKRWQLALSKGVHFVCNLLLLFVTVYSHLLLVAAGLEAPFLYLYALVYFLQSINFVRIIMRLWLCWKCRSKNPLLYDANYFLCWHTNCYDYCIPYNSVTSSIVITSGDGTTSPISEHDYQIGGYTEKWESGVKDCVVLHSYFTSDYYQLYPTQLSTDTGVEHVTFFIYNKIVDEPEEHVQIHTIDGSSGVVNPVMEPIYDEPTTTTSVPL

SEQ ID NO: 16859 - protein, 275 aa, Artificial Sequence
  SARS-CoV-2__MT755901.1__ORF3a protein
MDLFMRIFTIGTVTLKQGEIKDATPSDFVRATATIPIQASLPFGWLIVGVALLAVFQSASKIITLKKRWQLALSKGVHFVCNLLLLFVTVYSHLLLVAAGLEAPFLYLYALVYFLQSINFVRIIMRLWLCWKCRSKNPLLYDANYFLCWHTNCYDYCIPYNSVTSSIVITSGDGTTSPISEHDYQIGGYTEKWQSGVKDCVVLHSYFTSDYYQLYSTQLSTDTGVEHVTFFIYNKIVDEPEEHVQIHTIDGSSGVVNPVMEPIYDEPTTTTSVPL

SEQ ID NO: 16860 - protein, 275 aa, Artificial Sequence
  SARS-CoV-2__MT757016.1__ORF3a protein
MDLFMRIFTIGTVTLKQGEIKDATPSHFVRATATIPIQASLPFGWLIVGVALLAVFHSASKIITLKKRWQLALSKGVHFVCNLLLLFVTVYSHLLLVAAGLEAPFLYLYALVYFLQSINFVRIIMRLWLCWKCRSKNPLLYDANYFLCWHTNCYDYCIPYNSVTSSIVITSGDGTTSPISEHDYQIGGYTEKWESGVKDCVVLHSYFTSDYYQLYSTQLSTDTGFEHVTFFIYNKIVDEPEEHVQIHTIDGSSGVVNPVMEPIYDEPTTTTSVPL

SEQ ID NO: 16861 - protein, 275 aa, Artificial Sequence
  SARS-CoV-2__MT757040.1__ORF3a protein
MDLFMRIFTIGTVTLKQGEIKDATPSDFVRATATIPIQASLPFGWLIVGVALLAVFHSASKIITLKKRWQLALSKGVHFVCNLLLLFVTVYSHLLLVAAGLEAPFLYLYALVYFLQSINFVRIIMRLWLCWKCRSKNPLLYDANYFLCWHTNCYDYCIPYNSVTSSIVITSGDGTTSPISEHDYQIGGYTEKWESGVKDCVVLHSYFTSYYYQLYSTQLSTDTGVEHVTFFIYNKIVDEPEEHVQIHTIDGSSGVVNPVMEPIYDEPTTTTSVPL

SEQ ID NO: 16862 - protein, 275 aa, Artificial Sequence
  SARS-CoV-2__MT745584.1__ORF3a protein
MDLFMRIFTIGTVTLKQGEIKDATPSDFVRATATIPIQASLPFGWLIVGVALLAVFHSASKIITLKKRWQLALSKGVHFVCNLLLLFVTVYSHLLLVAAGLEAPFLYLYALVYFLQSINFVRIIMRLWLCWKCRSKNPLLYDANYFLCWHTNCYDYCIPYNSVTSSIVITSGDGTTSPISEHDYQIGGYTEKWESGVKDCVVLHSYFTSDYYQLYSTQLSTDTGLEHVTFFIYNKIVDEPEEHVQIHTIDGSSGVVNPVMEPIYDEPTTTTSVPL

SEQ ID NO: 16863 - protein, 275 aa, Artificial Sequence
  SARS-CoV-2__MT745651.1__ORF3a protein
MDLFMRIFTIGTVTLKQGEIKDSTPSDFVRATATIPIQASLPFGWLIVGVALLAVFHSASKIITLKKRWQLALSKGVHFVCNLLLLFVTVYSHLLLVAAGLEAPFLYLYALVYFLQSINFVRIIMRLWLCWKCRSKNPLLYDANYFLCWHTNCYDYCIPYNSVTSSIVITSGDGTTSPISEHDYQIGGYTEKWESGVKDCVVLHSYFTSDYYQLYSTQLSTDTGVEHVTFFIYNKIVDEPEEHVQIHTIDGSSGVVNPVMEPIYDEPTTTTSVPL

SEQ ID NO: 16864 - protein, 275 aa, Artificial Sequence
  SARS-CoV-2__MT745660.1__ORF3a protein
MDLFMRIFTIGTVTLKQGEIKDATPSDFVRATATIPIQASLPFGWLIVGVALLAVFQSASKIITLKKRWQLALFKGVHFVCNLLLLFVTVYSHLLLVAAGLEAPFLYLYALVYFLQSINFVRIIMRLWLCWKCRSKNPLLYDANYFLCWHTNCYDYCIPYNSVTSSIVITSGDGTTSPISEHDYQIGGYTEKWESGVKDCVVLHSYFTSDYYQLYSTQLSTDTGVEHVTFFIYNKIVDEPEEHVQIHTIDGSSGVVNPVMEPIYDEPTTTTSVPL

SEQ ID NO: 16865 - protein, 275 aa, Artificial Sequence
  SARS-CoV-2__MT745661.1__ORF3a protein
MDLFMRIFTIGTVTLKQGEIKDATPSDFVRATATIPIQASLPFGWLIVGVALLAVFHSASKIITLKKRWQLALSKGVHFVCNLLLLFVTVYSHLLLVAAGLEAPFLYLYALVYFLQSINFVRIIMRLWLCWKCRSKNPLLYDANYFLCWHTNCYDYCIPYNSVTSSIVITSGDGTTSPISEHDYQIGGYTEKWESGVKDCVVLHSYFTSDYYQLYSTQLSTDTGVEHVTFFIYNKIVDEPEEHVQIHTIDGSSGVVNPVIEPIYDEPTTTTSVPL

SEQ ID NO: 16866 - protein, 275 aa, Artificial Sequence
  SARS-CoV-2__MT745698.1__ORF3a protein
MDLFMRIFTIGTVTLKQGEIKDATPSDFVRATATIPIQASLPFGWLIVGVALLAVFQSASKIITLKKRWQLALSKGVHFVCNLLLLFVTVYSHLLLVAAGLEAPFLYLYALVYFLQSINFVRIIMRLWLCWKCRSKNPLLYDANYFLCWHTNCYDYCIPYNSVTSSIVITSGDGTTSSISEHDYQIGGYTEKWESGVKDCVVLHSYFTSDYYQLYSTQLSTDTGVEHVTFFIYNKIVDEPEEHVQIHTIDGSSGVVNPVMEPIYDEPTTTTSVPL

SEQ ID NO: 16867 - protein, 275 aa, Artificial Sequence
  SARS-CoV-2__MT745711.1__ORF3a protein
MDLFMRIFTIGTVTLKQGEIKDATPSDFVRATATIPIQASLPFGWLIVGVALLAGFHSASKIITLKKRWQLALSKGVHFVCNLLLLFVTVYSHLLLVAAGLEAPFLYLYALVYFLQSINFVRIIMRLWLCWKCRSKNPLLYDANYFLCWHTNCYDYCIPYNSVTSSIVITSGDGTTSPISEHDYQIGGYTEKWESGVKDCVVLHSYFTSDYYQLYSTQLSTDTGVEHVTFFIYNKIVDEPEEHVQIHTIDGSSGVVNPVMEPIYDEPTTTTSVPL

SEQ ID NO: 16868 - protein, 276 aa, Artificial Sequence
  SARS-CoV-2__MT748758.1__ORF3a protein
MDLFMRIFTIGTVTLKQGEIKDATPSDFVRATATIPIQASLPFGWLIVGVALLAVFQSASKIITLKKRWQLALSKGVHFVCNLLLLFVTVYSHLLLVAAGDLEAPFLYLYALVYFLQSINFVRIIMRLWLCWKCRSKNPLLYDANYFLCWHTNCYDYCIPYNSVTSSIVITSGDGTTSPISEHDYQIGGYTEKWESGVKDCVVLHSYFTSDYYQLYSTQLSTDTGVEHVTFFIYNKIVDEPEEHVQIHTIDGSSGVVNPVMEPIYDEPTTTTSVPL

SEQ ID NO: 16869 - protein, 275 aa, Artificial Sequence
  SARS-CoV-2__MT750023.1__ORF3a protein
MDLFMRIFTIGTVTLKQGEIKDATPLDFVRATATIPIQASLPFGWLIVGVALLAVFHSASKIITLKKRWQLALSKGVHFVCNLLLLFVTVYSHLLLVAAGLEAPFLYLYALVYFLQSINFVRIIMRLWLCWKCRSKNPLLYDANYFLCWHTNCYDYCIPYNSVTSSIVITSGDGTTSPISEHDYQIGGYTEKWESGVKDCVVLHSYFTSDYYQLYSTQLSTDTGVEHVTFFIYNKIVDEPEEHVQIHTIDGSSGVVNPVMEPIYDEPTTTTSVPL

SEQ ID NO: 16870 - protein, 275 aa, Artificial Sequence
  SARS-CoV-2__MT750069.1__ORF3a protein
MDLFMRIFTIGTVTLKQGEIKDATPSDFVRATATIPIQASLPFGWLIVGVALLAVFQSASKIITLKKRWQLALSKGVHFVCNLLLLFVTVYSHLLLVAAGLESPFLYLYALVYFLQSINFVRIIMRLWLCLKCRSKNPLLYDANYFLCWHTNCYDYCIPYNSVTSSIVITSGDGTTSPISEHDYQIGGYTEKWESGVKDCVVLHSYFTSDYYQLYSTQLSTDTGVEHVTFFIYNKIVDEPEEHVQIHTIDGSSGVVNPVMEPIYDEPTTTTSVPL

SEQ ID NO: 16871 - protein, 275 aa, Artificial Sequence
  SARS-CoV-2__MT750475.1__ORF3a protein
MDLFMRIFTIGTVTLKQGEIKDATPSDFVRATATIPIQASLPFGWLIVGVALLAVFQSASKIITLKKRWQLALSKGVHFVCNLLLLFVTVYSHLLLVAAGLEAPFLYLYALVYFLQSINFVRIIMRLWLCWKCRSKNPLLYDANYFLCWHTNCYDYCIPYNSVTSSIVITSGDGTTSPISEHDYQIGGYTEKWESGVKDCVVLHSYFTSDYYQLYSTQLSTDTGVEHVTFFIYNKIADEPEEHVQIHTIDGSSGVVNPVMEPIYDEPTTTTSVPL

SEQ ID NO: 16872 - protein, 275 aa, Artificial Sequence
  SARS-CoV-2__MT740384.1__ORF3a protein
MDLFMRIFTIGTVTLKQGEIKDATPSDFVRATATIPIQASLPFGWLIVGVALLAVFQSASKIITLKKRWQLALSKGVHFVCNLLLLFVTVYSHLLLVAAGLEAPFLYLYALVYFLQSINFVRIIMRLWLCWKCRSKNPLLYDANYFLCWHTNCYDYCIPYNSVTSSIVITSVDGTTSPISEHDYQIGGYTEKWESGVKDCVVLHSYFTSDYYQLYSTQLSTDTGVEHVTFFIYNKIVDEPEEHVQIHTIDGSSGVVNPVMEPIYDEPTTTTSVPL

SEQ ID NO: 16873 - protein, 275 aa, Artificial Sequence
  SARS-CoV-2__MT740401.1__ORF3a protein
MDLFMRIFTIGTVTLKQGEIKDATPSDFVRATATIPIQASLPFGWLIVGVALLAVFQSASKIITLKKRWQLALSKGVHFVCNLLLLFVTVYSHLLLVAAGLEAPFLYLYALVYFLQSINFVRIIMRLWLCWKCRSKNPLLYDANYFLCWHTNCYDYCIPYNSVTSSIVITSGDGTTSPISEHDYQIGGYTEKWESGVKDCVVLHSYFTSDYYQLYSTQLNTDTGVEHVTFFIYNKIVDEPEEHVQIHTIDGSSGVVNPVMEPIYDEPTTTTSVPL

SEQ ID NO: 16874 - protein, 275 aa, Artificial Sequence
  SARS-CoV-2__MT740438.1__ORF3a protein
MDLFMRIFTIGTVTLKQGEIKDATPSDFVRATATIPIQASLPFGWLIVGIALLAVFQSASKIITLKKRWQLALSKGVHFVCNLLLLFVTVYSHLLLVAAGLEVPFLYLYALVYFLQSINFVRIIMRLWLCWKCRSKNPLLYDANYFLCWHTNCYDYCIPYNSVTSSIVITSGDGTTSPISEHDYQIGGYTEKWESGVKDCVVLHSYFTSDYYQLYSTQLSTDTGVEHVTFFIYNKIVDEPEEHVQIHTIDGSSGVVNPVMEPIYDEPTTTTSVPL

SEQ ID NO: 16875 - protein, 275 aa, Artificial Sequence
  SARS-CoV-2__MT740478.1__ORF3a protein
MDLFMRIFTIGTVTLKQGEIKDATPSDFVRATATIPIEASLPFGWLIVGVALLAVFQSASKIITLKKRWQLALSKGVYFVCNLLLLFVTVYSHLLLVAAGLEAPFLYLYALVYFLQSINFVRIIMRLWLCWKCRSKNPLLYDANYFLCWHTNCYDYCIPYNSVTSSIVITSGDGTTSPISEHDYQIGGYTEKWESGVKDCVVLHSYFTSDYYQLYSTQLSTDTGVEHVTFFIYNKIVDEPEEHVQIHTIDGSSGVVNPVMEPIYDEPTTTTSVPL

SEQ ID NO: 16876 - protein, 275 aa, Artificial Sequence
  SARS-CoV-2__MT740485.1__ORF3a protein
MDLFMRIFTIGTVTLKQGEIKDATPSDFVRATATIPIQASLPFGWLIVGVALLSVFHSASKIITLKKRWQLALSKGVHFVCNLLLLFVTVYSHLLLVAAGLEAPFLYLYALVYFLQSINFVRIIMRLWLCWKCRSKNPLLYDANYFLCWHTNCYDYCIPYNSVTSSIVITSGDGTTSPISEHDYQIGGYTEKWESGVKDCVVLHSYFTSDYYQLYSTQLSTDTGVEHVTFFIYNKIVDEPEEHVQIHTIDGSSGVVNPVMEPIYDEPTTTTSVPL

SEQ ID NO: 16877 - protein, 275 aa, Artificial Sequence
  SARS-CoV-2__MT740717.1__ORF3a protein
MDLFMRIFTIGTVTLKQGEIKDATPSDFVRATATIPIQASLPFGWLIVGVALLAVFHSASKIITLKKRWQLALSKGVHFVCNLLLLFVTVYSHLLLVAAGLEAPFLYLYALVYFLQSINFVRIIMRLWLCWKCLSKNPLLYDANYFLCWHTNCYDYCIPYNSVTSSIVITSGDGTTSPISEHDYQIGGYTEKWESGVKDCVVLHSYFTSDYYQLYSTQLSTDTGVEHVTFFIYNKIVDEPEEHVQIHTIDGSSGVVNPVMEPIYDEPTTTTSVPL

SEQ ID NO: 16878 - protein, 275 aa, Artificial Sequence
  SARS-CoV-2__MT740923.1__ORF3a protein
MDLFMRIFTIGTVTLKQGEIKDATPSDFVRATATIPIQASLPFGWLIVGVALLAVFQSASKIITLKKRWQLALSKGVHFVCNLLLLFVTVYSHLLLVAAGLEAPFLYLYALVYFLQSINFVRIIMRLWLCWKCRSKNPLLYDANYFLCWHINCYDYCIPYNSVTSSIVITSGDGTTSPISEHDYQIGGYTEKWESGVKDCVVLHSYFTSDYYQLYSTQLSTDTGVEHVTFFIYNKIVDEPEEHVQIHTIDGSSGVVNPVMEPIYDEPTTTTSVPL

SEQ ID NO: 16879 - protein, 275 aa, Artificial Sequence
  SARS-CoV-2__MT734046.1__ORF3a protein
MDLFMRIFTIGTVTLKQGEIKDATPSDFVRATATIPIQASLPFGWLIVGVALLAVFQSASKIITLKKRWQLALSKGVHFVCNLLLLFVTVYSHLLLVASGLEAPFLYLYALVYFLQSINFVRIIMRLWLCWKCRSKNPLLYDANYFLCWHTNCYDYCIPYNSVTSSIVITSGDGTTSPISEHDYQIGGYTEKWESGVKDCVVLHSYFTSDYYQLYSTQLSTDTGVEHVTFFIYNKIVDEPEEHVQIHTIDGSSGVVNPVMEPIYDEPTTTTSVPL

SEQ ID NO: 16880 - protein, 275 aa, Artificial Sequence
  SARS-CoV-2__MT706205.1__ORF3a protein
MDLFMRIFTIGTVTLKQGEIKDATPSDFVRATATIPIQASLPFGWLIVGVALLAVFHSASKIITLKKRWQLALSKGVHFVCNLLLLFVTVYSHLLLVATGLEAPFLYLYALVYFLQSINFVRIIMRLWLCWKCRSKNPLLYDANYFLCWHTNCYDYCIPYNSVTSSIVITSGDGTTSPISEHDYQIGGYTEKWESGVKDCVVLHSYFTSDYYQLYSTQLSTDTGVEHVTFFIYNKIVDEPEEHVQIHTIDGSSGVVNPVMEPIYDEPTTTTSVPL

SEQ ID NO: 16881 - protein, 275 aa, Artificial Sequence
  SARS-CoV-2__MT706248.1__ORF3a protein
MDLFMRIFTIGTVTLKQGEIKDATPSDFVRATATIPIQASLPFGWLIVGVALLAVFQSASKIITLKKRWQLALSKGVHFVCNLLLLFVTVYSHLLLVAAGLEAPFLYLYALVYFLQSINFVRIIMRLWLCWKCRSKNPLLYDANYFLCWHTNCYDYCIPYNSVTSSIVITSGDGTTSPISEHDYQIGGYTEKWESGVKDCVVLHSYFTSDYYQLYSTQLSTDTGVEHVTFFIYNKIVDEPEEHVQIHTIDGSSGVVNPVMEPIYDELTTTTSVPL

SEQ ID NO: 16882 - protein, 275 aa, Artificial Sequence
  SARS-CoV-2__MT706263.1__ORF3a protein
MDLFMRIFTIGTVTLKQGEIKDATPSDFVRATATIPIQASLPFGWLIVGVALLAVFQSASKIITLKKRWQLALSKGVHFVCNLLLLFVTVYSHLLLVAAGLEAPFLYLYALVYFLQSINFVRIIMRLWLCWKCRSKNPLLYDANYFLCWHTNCYDYCIPYNSVTSSIVITSGDGTTSPISEHDYQIGGYTEKWESGIKDCVVLHSYFTSDYYQLYSTQLSTDTGVEHVTFFIYNKIVDEPEEHVQIHTIDGSSGVVNPVMEPIYDEPTTTTSVPL

SEQ ID NO: 16883 - protein, 275 aa, Artificial Sequence
  SARS-CoV-2__MT706326.1__ORF3a protein
MDLFMRIFTIGTVTLKQGEIKDATPSDFVRATATIPIQASLPFGWLIVGVALLAVFQSASKIITLKKRWQLALSKGVHFVCNLLLLFVTVYSHLLLVAAGLEAPFLYLYALVYFLQSINFVRIIMRLWLCWKCLSKNPLLYDANYFLCWHTNCYDYCIPYNSVTSSIVITSGDGTTSPISEHDYQIGGYTEKWESGVKDCVVLHSYFTSDYYQLYSTQLSTDTGVEHVTFFIYNKIVDEPEEHVQIHTIDGSSGVVNPVMEPIYDEPTTTTSVPL

SEQ ID NO: 16884 - protein, 275 aa, Artificial Sequence
  SARS-CoV-2__MT706405.1__ORF3a protein
MDLFMRIFTIGTVTLKQGEIKDATPSDFVRATATIPIQTSLPFGWLIVGVALLAVFQSASKIITLKKRWQLALSKGVHFVCNLLLLFVTVYSHLLLVAAGLEAPFLYLYALVYFLQSINFVRIIMRLWLCWKCRSKNPLLYDANYFLCWHTNCYDYCIPYNSVTSSIVITSGDGTTSPISEHDYQIGGYTEKWESGVKDCVVLHSYFTSDYYQLYSTQLSTDTGVEHVTFFIYNKIVDEPEEHVQIHTIDGSSGVVNPVMEPIYDEPTTTTSVPL

SEQ ID NO: 16885 - protein, 275 aa, Artificial Sequence
  SARS-CoV-2__MT683408.1__ORF3a protein
MDLFMRIFTIGTVILKQGEIKDATPSDFVRATATIPIQASLPFGWLIVGVALLAVFQSASKIITLKKRWQLALSKGVHFVCNLLLLFVTVYSHLLLVAAGLEAPFLYLYALVYFLQSINFVRIIMRLWLCWKCRSKNPLLYDANYFLCWHTNCYDYCIPYNSVTSSIVITSGDGTTSPISEHDYQIGGYTEKWESGVKDCVVLHSYFTSDYYQLYSTQLSTDTGVEHVTFFIYNKIVDEPEEHVQIHTIDGSSGVVNPVMEPIYDEPTTTTSVPL

SEQ ID NO: 16886 - protein, 275 aa, Artificial Sequence
  SARS-CoV-2__MT679156.1__ORF3a protein
MDLFMRIFTIGTVTLKQGEIKDATPSDFVRATATIPIQASLPFGWLIVGVALLAVFHSASKIITFKKRWQLALSKGVHFVCNLLLLFVTVYSHLLLVAAGLEAPFLYLYALVYFLQSINFVRIIMRLWLCWKCRSKNPLLYDANYFLCWHTNCYDYCIPYNSVTSSIVITSGDGTTSPISEHDYQIGGYTEKWESGVKDCVVLHSYFTSDYYQLYSTQLSTDTGVEHVTFFIYNKIVDEPEEHVQIHTIDGSSGVVNPVMEPIYDEPTTTTSVPL

SEQ ID NO: 16887 - protein, 275 aa, Artificial Sequence
  SARS-CoV-2__MT611448.1__ORF3a protein
MDLFMRIFTIGTVTLKQGEIKDATPSDFVRATATIPIQASLPFGWLIVGVALLAVFHSASKIITLKKRWQLALSKGVHFVCNLLLLFVTVYSHLLLVAAGLEAPFLYLYALVYFLQSINFVRIIMRLWLCWKCRSKNPLLYDANYFLCWHTNCYDYCIPYNSVTSSIVITSGDGTTSPISEYDYQIGGYTEKWESGVKDCVVLHSYFTSDYYQLYSTQLSTDTGVEHVTFFIYNKIVDEPEEHVQIHTIDGSSGVVNPVMEPIYDEPTTTTSVPL

SEQ ID NO: 16888 - protein, 275 aa, Artificial Sequence
  SARS-CoV-2__MT614601.1__ORF3a protein
MDLFMRIFTIGTVTLKQGEIKDATPSDFVRATATIPIQASLPFGWLIVGVALLAFFQSASKIITLKKRWQLALSKGVHFVCNLLLLFVTVYSHLLLVAAGLEAPFLYLYALVYFLQSINFVRIIMRLWLCWKCRSKNPLLYDANYFLCWHTNCYDYCIPYNSVTSSIVITLGDGTTSPISEHDYQIGGYTEKWESGVKDCVVLHSYFTSDYYQLYSTQLSTDTGVEHVTFFIYNKIVDEPEEHVQIHTIDGSSGVVNPVMEPIYDEPTTTTSVPL

SEQ ID NO: 16889 - protein, 275 aa, Artificial Sequence
  SARS-CoV-2__MT675289.1__ORF3a protein
MDLFMRIFTIGTVTLKQGEIKDATPSDFVRATATIPIQASLPFGWLIVGVALLAVFQSASKIITLKKRWQLALSKGVHFVCNLLLLFATVYSHLLLVAAGLEAPFLYLYALVYFLQSINFVRIIMRLWLCWKCRSKNPLLYDANYFLCWHTNCYDYCIPYNSVTSSIVITSGDGTTSPISEHDYQIGGYTEKWESGVKDCVVLHSYFTSDYYQLYSTQLSTDTGVEHVTFFIYNKIVDEPEEHVQIHTIDVSSGVVNPVMEPIYDEPTTTTSVPL

SEQ ID NO: 16890 - protein, 275 aa, Artificial Sequence
  SARS-CoV-2__MT664169.1__ORF3a protein
MDLFMRIFTIGTVTLKQGEIKDATPSDFVRATATIPIQASLPFGWLIVGVALLAVFQSASKIITLNKRWQLALSKGVHFVCNLLLLFVTVYSHLLLVAAGLEAPFLYLYALVYFLQSINFVRIIMRLWLCWKCRSKNPLLYDANYFLCWHTNCYDYCIPYNSVTSSIVITSGDGTTSPISEHDYQIGGYTEKWESGVKDCVVLHSYFTSDYYQLYSTQLSTDTGVEHVTFFIYNKIVDEPEEHVQIHTIDGSSGVVNPVMEPIYDEPTTTTSVPL

SEQ ID NO: 16891 - protein, 275 aa, Artificial Sequence
  SARS-CoV-2__MT653097.1__ORF3a protein
MDLFMRIFTIGTVTLKQGEIKDATPSDFVRATATIPIQASLPFGWLIVGVALLAVFQSASKIITLKKRWQLALSKGVHFVCNLLLLFVTVYSHLLLVAAGLEAPFLYLYALVYFLQSINFVRIIMRLWLCWKCRSKNPLLYDANYFLCWHTNCYDYCIPYNSVTSSIVITSGDGTTSPISEHDYQIGGYTEKWESGVKDCVVLHSYFTSDYYQLYSTQLSTDTGVEHVIFFIYNKIVDEPEEHVQIHTIDGSSGVVNPVMEPIYDEPTTTTSVPL

SEQ ID NO: 16892 - protein, 275 aa, Artificial Sequence
  SARS-CoV-2__MT655750.1__ORF3a protein
MDLFMRIFTIGTVTLKQGEIKDATPSDFVRATATIPIQASLPFGWLIVGVALLAVFQSASKIITLKKRRQLALSKGVHFVCNLLLLFVTVYSHLLLVAAGLEAPFLYLYALVYFLQSINFVRIIMRLWLCWKCRSKNPLLYDANYFLCWHTNCYDYCIPYNSVTSSIVITSGDGTTSPISEHDYQIGGYTEKWESGVKDCVVLHSYFTSDYYQLYSTQLSTDTGVEHVTFFIYNKIVDEPEEHVQIHTIDGSSGVVNPVMEPIYDEPTTTTSVPL

SEQ ID NO: 16893 - protein, 275 aa, Artificial Sequence
  SARS-CoV-2__MT646053.1__ORF3a protein
MDLFMRIFTIGTVTLKRGEIKDATPSDFVRATATIPIQASLPFGWLIVGVALLAVFQSASKIITLKKRWQLALSKGVHFVCNLLLLFVTVYSHLLLVAAGLEAPFLYLYALVYFLQSINFVRIIMRLWLCWKCRSKNPLLYDANYFLCWHTNCYDYCIPYNSVTSSIVITSGDGTTSPISEHDYQIGGYTEKWESGVKDCVVLHSYFTSDYYQLYSTQLSTDTGVEHVTFFIYNKIVDEPEEHVQIHTIDGSSGVVNPVMEPIYDEPTTTTSVPL

SEQ ID NO: 16894 - protein, 275 aa, Artificial Sequence
  SARS-CoV-2__MT641689.1__ORF3a protein
MDLFMRIFTIGTVTLKQGEIKDATPSDFVRATATIPIQASLPFGWLIVGVALLAVFHSASKIITLKKRWQLALSKGVHFVCNLLLLFVTVYSHLLLVAAGLEAPFLYLYALVYFLQSINFVRIIMRLWLCWKCRSKNPLLYDANYFLCWHTNCYDYCIPYNSVTSSIVITSGDGTTSPISEHDYQIGGYTEKWESGVKDCVVLHSYFTSDYYQLYSTQLSTDTGVEHVTFFIYNKIVDEPEEHVQIHTIDGSSGVVNPVMESIYDEPTTTTSVPL

SEQ ID NO: 16895 - protein, 275 aa, Artificial Sequence
  SARS-CoV-2__MT641720.1__ORF3a protein
MDLFMRIFTIGTVTLKQGEIKDATPSDFVRATATIPIQASLPFGWLIVGVALLAVFHSASKIITLKKRWQLALSRGVHFVCNLLLLFVTVYSHLLLVAAGLEAPFLYLYALVYFLQSINFVRIIMRLWLCWKCRSKNPLLYDANYFLCWHTNCYDYCIPYNSVTSSIVITSGDGTTSPISEHDYQIGGYTEKWESGVKDCVVLHSYFTSDYYQLYSTQLSTDTGVEHVTFFIYNKIVDEPEEHVQIHTIDGSSGVVNPVMEPIYDEPTTTTSVPL

SEQ ID NO: 16896 - protein, 275 aa, Artificial Sequence
  SARS-CoV-2__MT641737.1__ORF3a protein
MDLFMRIFTIGTVTLKQGEIKDATPSDFVRATATIPIQASLPFGWLIVGVALLAVFQSASKIITLKKRLQLALSKGVHFVCNLLLLFVTVYSHLLLVAAGLEAPFLYLYALVYFLQSINFVRIIMRLWLCWKCRSKNPLLYDANYFLCWHTNCYDYCIPYNSVTSSIVITSGDGTTSPISEHDYQIGGYTEKWESGVKDCVVLHSYFTSDYYQLYSTQLSTDTGVEHVTFFIYNKIVDEPEEHVQIHTIDVSSGVVNPVMEPIYDEPTTTTSVPL

SEQ ID NO: 16897 - protein, 275 aa, Artificial Sequence
  SARS-CoV-2__MT641741.1__ORF3a protein
MDLFMRIFTIGTVTLKQGEIKDATPSDFVRATATIPIQASLPFGWLIVGVALLAVFQSASKIITLKKRWQLALPKGVHFVCNLLLLFVTVYSHLLLVAAGLEAPFLYLYALVYFLQSINFVRIIMRLWLCWKCRSKNPLLYDANYFLCWHTNCYDYCIPYNSVTSSIVITSGDGTTSPISEHDYQIGGYTEKWESGVKDCVVLHSYFTSDYYQLYSTQLSTDTGVEHVTFFIYNKIVDEPEEHVQIHTIDGSSGVVNPVMEPIYDEPTTTTSVPL

SEQ ID NO: 16898 - protein, 275 aa, Artificial Sequence
  SARS-CoV-2__MT642138.1__ORF3a protein
MDLFMRIFTIGTVTLKQGEIKDATPSDFVRATATIPIQASLPFGWLIVGVALLAVFHSASKIITLKKRWQLALSKGVHFVCNLLLLFVTVYSHLLLVAAGLEAPFLYLYALVYFLQSINFVRIIMRLWLCWKCRSKNPLLYDANYFLCWHTNCYDYCIPYNSVTSSIVITSGDGTTSPISEHDYQIGGYTEKRESGVKDCVVLHSYFTSDYYQLYSTQLSTDTGVEHVTFFIYNKIVDEPEEHVQIHTIDGSSGVVNPVMEPIYDEPTTTTSVPL

SEQ ID NO: 16899 - protein, 275 aa, Artificial Sequence
  SARS-CoV-2__MT642186.1__ORF3a protein
MDLFMRIFTIGTVTLKQGEIKDATLSDFVRATATIPIQASLPFGWLIVGVALLAVFHSASKIITLKKRWQLALSKGVHFVCNLLLLFVTVYSHLLLVAAGLEAPFLYLYALVYFLQSINFVRIIMRLWLCWKCRSKNPLLYDANYFLCWHTNCYDYCIPYNSVTSSIVITSGDGTTSPISEHDYQIGGYTEKWESGVKDCVVLHSYFTSDYYQLYSTQLSTDTGVEHVTFFIYNKIVDEPEEHVQIHTIDGSSGVVNPVMEPIYDEPTTTTSVPL

SEQ ID NO: 16900 - protein, 275 aa, Artificial Sequence
  SARS-CoV-2__MT642305.1__ORF3a protein
MDLFMRIFTIGTVTLKQGEIKDATPSDFVRATATIPIQASLPFGWLIVGVALLAVFQSASKIITLKKRWQLALSKGVHFVCNLLLLFATVYSHLLLVAAGLEAPFLYFYALVYFLQSINFVRIIMRLWLCWKCRSKNPLLYDANYFLCWHTNCYDYCIPYNSVTSSIVITLGDGTTSPISEHDYQIGGYTEKWESGVKDCVVLHSYFTSDYYQLYSTQLSTDTGVEHVTFFIYNKIVDEPEEHVQIHTIDVSSGVVNPVMEPIYDEPTTTTSVPL

SEQ ID NO: 16901 - protein, 275 aa, Artificial Sequence
  SARS-CoV-2__MT642307.1__ORF3a protein
MDLFMRIFTIGTVTLKQGEIKDATPSDFVRATATIPIQASIPFGWLIVGVALLAVFQSASKIITLKKRWQLALSKGVHFVCNLLLLFVTVYSHLLLVAAGLEAPFLYLYALVYFLQSINFVRIIMRLWLCWKCRSKNPLLYDANYFLCWHTNCYDYCIPYNSVTSSIVITSGDGTTSPISEHDYQIGGYTEKWESGVKDCVVLHSYFTSDYYQLYSTQLSTDTGVEHVTFFIYNKIVDEPEEHVQIHTIDGSSGVVNPVMEPIYDEPTTTTSVPL

SEQ ID NO: 16902 - protein, 275 aa, Artificial Sequence
  SARS-CoV-2__MT642356.1__ORF3a protein
MDLFMRIFTIGTVTLKQGEIKDATPSDFVRATATIPIQASLPFGWLIVGVALLAVFQSASKIITLKKRWQLALSKGVHFVCNLLLLFVTVYSHLLLVAAGLEAPFLYLYALVYFLQSINFVRIIMRLWLCWKCRSKNPLLYDANYFLCWHTNCYDYCIPYNSVTSSIVITSGDGTTSPISEHDYQIGGYTEKWESGVKDCVVLHSYFTSDYYQLYSTRLSTDTGVEHVTFFIYNKIVDEPEEHVQIHTIDGSSGVVNPVMEPIYDEPTTTTSVPL

SEQ ID NO: 16903 - protein, 275 aa, Artificial Sequence
  SARS-CoV-2__MT642412.1__ORF3a protein
MDLFMRIFTIGTVTLKQGEIKDATPSDFVRATATIPIQASLPFGWLIVGVALLAVFQSASKIITLKKRWQLALSKGVHFVCNLLLLFATVYSHLLLVAAGLEAPFLYLYALVYFLQSINFVRIIMRLWLCWKCRSKNPLLYDANYFLCWHTNCYDYCIPYNSVTSSIVITLGDGTTSPISEHDYQIGGYTEKWESGVKDCVVLHSYFTSDYYQLYSTQLSTDTGVEHVTFFIYNKIVDEPEEHVQIHTIDVSSGVVNPVMEPIYDEPTTTTSVPL

SEQ ID NO: 16904 - protein, 275 aa, Artificial Sequence
  SARS-CoV-2__MT635653.1__ORF3a protein
MDLFMRIFTIGTVTLKQGEIKDATPSDFVRATATIPIQASLPFGWLIVGVALLAVFHSASKIITLKKRWQLALSKGVHFVCNLLLLFVTVYSHLLLVAAGLEAPFLYLYALVYFLQSINFVRIIMRLWLCWKCRSKNPLLYDANYFLCWHTNCYDYCIPYNSVTSSIVITSGDGTTSPISEHDYHIGGYTEKWESGVKDCVVLHSYFTSDCYQLYSTQLSTDTGVEHVTFFIYNKIVDEPEEHVQIHTIDGSSGVVNPVMEPIYDEPTTTTSVPL

SEQ ID NO: 16905 - protein, 275 aa, Artificial Sequence
  SARS-CoV-2__MT627609.1__ORF3a protein
MDLFMRIFTIGTVTLKQGEIKDATPSDFVRATATIPIQASLPFGWLIVGVALLAVFQSASKIITLKKRWQLALSKGVHFVCNLLLLFVTVYSHLLLVAAGLEAPFLYLYALVYFLQSINFVRIIMRLWLCWKCRSKNPLLYDANYFLCWHTNCYDYCIPYNSVTSSIVITSGDGTTSPISEHDYQIGGYTEKWESGVKDCIVLHSYFTSDYYQLYSTQLSTDTGVEHVTFFIYNKIVDEPEEHVQIHTIDGSSGVVNPVMEPIYDEPTTTTSVPL

SEQ ID NO: 16906 - protein, 275 aa, Artificial Sequence
  SARS-CoV-2__MT627747.1__ORF3a protein
MDLFMRIFTIGTVTLKQGEIKDATPSDFVRATATIPIQASLPFGWLIVGVALLAVFHSASKIITLKKRWQLALSKGVHFVCNLLLLFVTVYSHLLLVAAGLEAPFLYLYALVYFLQSINFVRIIMRLWLCWKCRSKNPLLYDANYFLCWHTNCYDYCIPYNSVTSSIVITSGDGTTSPISEHDYQIGGYTEKWESGVKDCVVLHSYFTSDYYQLYSTQLSTDTGVEHVTFFIYNKIVDEPEEHVQIHTIDGSSGVVNPVMEPIYDEPTTTISVPL

SEQ ID NO: 16907 - protein, 275 aa, Artificial Sequence
  SARS-CoV-2__MT628095.1__ORF3a protein
MDLFMRIFTIGTVTLKQGEIKDATPSDFVRATATIPIQASLPFGWLIVGVALLAVFQSASKIITLKKRWQLALSKGVHFVCNLLLLFVTVYSHLLLVAAGLEAPFLYLYALVYFLQSINFVRIIMRLWLCWKCRSKNPLLYDANYFLCWHTNCYDYCIPYNSVTSSIVITSGDGTTSPISEHDYQIGGYTEKWESGVKDCVVLHSYFTSDYYQLYSTQLSTDTGVEHVTFFIYNKIVDEPEEHVQIHTIDGSSGVVNPVKEPIYDEPTTTTSVPL

SEQ ID NO: 16908 - protein, 275 aa, Artificial Sequence
  SARS-CoV-2__MT628180.1__ORF3a protein
MDLFMRIFTIGTVTLKQGEIKDATPSDFVRATATIPIQASLPFGWLIVGVALLAVFQSASKIITLKKRWQLALSKGVHFVCNLLLLFVTVYSHLLLVAAGLEAPFLYFYALVYFLQSINFVRIIMRLWLCWKCRSKNPLLYDANYFLCWHTNCYDYCIPYNSVTSSIVITSGDGTTSPISEHDYQIGGYTEKWESGVKDCVVLHSYFTSDYYQLYSTQLSTDTGVEHVTFFIYNKIVDEPEEHVQIHTIDGSSGVVNPVMEPIYDEPTTTTSVPL

SEQ ID NO: 16909 - protein, 275 aa, Artificial Sequence
  SARS-CoV-2__MT628245.1__ORF3a protein
MDLFMRIFTIGTVTLKQGEIKDATPSDFVRATATIPIQASLPYGWLIVGVALLAVFHSASKIITLKKRWQLALSKGVHFVCNLLLLFVTVYSHLLLVAAGLEAPFLYLYALVYFLQSINFVRIIMRLWLCWKCRSKNPLLYDANYFLCWHTNCYDYCIPYNSVTSSIVITSGDGTTSPISEHDYQIGGYTEKWESGVKDCVVLHSYFTSDYYQLYSTQLSTDTGVEHVTFFIYNKIVDEPEEHVQIHTIDGSSGVVNPVMEPIYDEPTTTTSVPL

SEQ ID NO: 16910 - protein, 275 aa, Artificial Sequence
  SARS-CoV-2__MT630422.1__ORF3a protein
MDLFMRIFTIGTVTLKQGEIKDATPSDFVRATATIPIQASLPFGWLIVGVALLAVFQSASKIITLKKRWQLALSKGVHFVCNLLLLFATVYSHLLLVAAGLEAPFLYLYALVYFLQSINFVRIIMRLWLCWKCRSKNPLLYDANYFLCWHTNCYDYCIPYNSVTSSIVITSGDGTTSPISEHDYQIGGYTEKWESGVKDCVVLHSYFTSDYYQLYSTQLSTDTGVEHVTFFIYNKIVDEPEEHVQIHTIDGSSGVVNPVMEPIYDEPTTTTSVPL

SEQ ID NO: 16911 - protein, 275 aa, Artificial Sequence
  SARS-CoV-2__MT632576.1__ORF3a protein
MDLFMRIFTIGTVTLKQGEIKDATPSDFVRATATIPIQASLPFGWLIVGVALLAVFQSASKIITLKKRWQLALSKGVHFVCNLLLLFVTVYSHLLLVAAGLEAPFLYLYALVYFLQSINFVRIIMRLWLCWKCRSKNPLFYDANYFLCWHTNCYDYCIPYNSVTSSIVITSGDGTTSPISEHDYQIGGYTEKWESGVKDCVVLHSYFTSDYYQLYSTQLSTDTGVEHVTFFIYNKIVDEPEEHVQIHTIDGSSGVVNPVMEPIYDEPTTTTSVPL

SEQ ID NO: 16912 - protein, 275 aa, Artificial Sequence
  SARS-CoV-2__MT632795.1__ORF3a protein
MDLFMRIFTIGTVTLKQGEIKDATPSDFVRATATIPIQASLPFGWLIVGVALLAVFQSASKIITLKKRWQLALSKGVHFVCNLLLLFVTVYSHLLLVAAGLEAPFLYLYALVYFLQSINFVRIIMRLWLCWKCRSKNPLLYDANYFLCWHTNCYDYCIPYNSVTSSIVITSGDGTTSPISEHDYQIGGYTEKWESGVKDCVVLHSYFTSDYYQLYSTQLSTDTGVEHVTFFIYNKIVEEPEEHVQIHTIDGSSGVVNPVMEPIYDEPTTTTSVPL

SEQ ID NO: 16913 - protein, 275 aa, Artificial Sequence
  SARS-CoV-2__MT632887.1__ORF3a protein
MDLFMRIFTIGTVTLKQGEIKDATPSDFVRATATIPIQASLPFGWLIVGVALLAVFQSASKIITLKKRWQLALSKGVHFVCNLLLLFVTVYSHLLLVAAGLEAPFLYLYALVYFLQSINFVRIIMRLWLCWKCRSKNPLLYDANYFLCWHTNCYDYCIPYNSVTFSIVITSGDGTTSPISEHDYQIGGYTEKWESGVKDCVVLHSYFTSDYYQLYSTQLSTDTGVEHVTFFIYNKIVDEPEEHVQIHTIDGSSGVVNPVMEPIYDEPTTTTSVPL

SEQ ID NO: 16914 - protein, 275 aa, Artificial Sequence
  SARS-CoV-2__MT632892.1__ORF3a protein
MDLFMRTFTIGTVTLKQGEIKDATPSDFVRATATIPIQASLPFGWLIVGVALLAVFQSASKIITLKKRWQLALSKGVHFVCNLLLLFVTVYSHLLLVAAGLEAPFLYLYALVYFLQSINFVRIIMRLWLCWKCRSKNPLLYDANYFLCWHTNCYDYCIPYNSVTSSIVITSGDGTTSPISEHDYQIGGYTEKWESGVKDCVVLHSYFTSDYYQLYSTQLSTDTGVEHVTFFIYNKIVDEPEEHVQIHTIDGSSGVVNPVMEPIYDEPTTTTSVPL

SEQ ID NO: 16915 - protein, 275 aa, Artificial Sequence
  SARS-CoV-2__MT614460.1__ORF3a protein
MDLFMRIFTIGTVTLKQGEIKDATPSDFVRATATIPIQASLPFGWLIVGVALFAVFHSASKIITLKKRWQLALSKGVHFVCNLLLLFVTVYSHLLLVAAGLEAPFLYLYALVYFLQSINFVRIIMRLWLCWKCRSKNPLLYDANYFLCWHTNCYDYCIPYNSVTSSIVITSGDGTTSPISEHDYQIGGYTEKWESGVKDCVVLHSYFTSDYYQLYSTQLSTDTGVEHVTFFIYNKIVDEPEEHVQIHTIDGSSGVVNPVMEPIYDEPTTTTSVPL

SEQ ID NO: 16916 - protein, 275 aa, Artificial Sequence
  SARS-CoV-2__MT614496.1__ORF3a protein
MDLFMRIFIIGTVTLKQGEIKDATPSDFVRATATIPIQASLPFGWLIVGVALLAVFHSASKIITLKKRWQLALSKGVHFVCNLLLLFVTVYSHLLLVAAGLEAPFLYLYALVYFLQSINFVRIIMRLWLCWKCRSKNPLLYDANYFLCWHTNCYDYCIPYNSVTSSIVITSGDGTTSPISEHDYQIGGYTEKWESGVKDCVVLHSYFTSDYYQLYSTQLSTDTGVEHVTFFIYNKIVDEPEEHVQIHTIDGSSGVVNPVMEPIYDEPTTTTSVPL

SEQ ID NO: 16917 - protein, 275 aa, Artificial Sequence
  SARS-CoV-2__MT620771.1__ORF3a protein
MDLFMRIFTIGTVTLKQGEIKDATPSDFVRATATIPIQASLPFGWLIVGVALLAVFQSASKIITLKKRWQLALSKGVHFVCNLLLLFVTVYSHLLLVAAGLEAPFLYLYALVYFLQSVNFVRIIMRLWLCWKCRSKNPLLYDANYFLCWHTNCYDYCIPYNSVTSSIVITSGDGTTSPISEHDYQIGGYTEKWESGVKDCVVLHSYFTSDYYQLYSTQLSTDTGVEHVTFFIYNKIVDEPEEHVQIHTIDGSSGVVNPVMEPIYDEPTTTTSVPL

SEQ ID NO: 16918 - protein, 275 aa, Artificial Sequence
  SARS-CoV-2__MT622319.1__ORF3a protein
MDLFMRIFTIGTVTLKQGEIKDATPSDFVRAIATIPIQASLPFGWLIVGVALLAVFQSASKIITLKKRWQLALSKGVHFVCNLLLLFVTVYSHLLLVAAGLEAPFLYLYALVYFLQSINFVRIIMRLWLCWKCRSKNPLLYDANYFLCWHTNCYDYCIPYNSVTSSIVITSGDGTTSPISEHDYQIGGYTEKWESGVKDCVVLHSYFTSDYYQLYSTQLSTDTGVEHVTFFIYNKIVDEPEEHVQIHTIDGSSGVVNPVMEPIYDEPTTTTSVPL

SEQ ID NO: 16919 - protein, 275 aa, Artificial Sequence
  SARS-CoV-2__MT601290.1__ORF3a protein
MDLFMRIFTIGTVTLKQGEIKDATPSDFVRATATIPIQASLPFGWLIVGVALLAVFQSASKIITLKKRLQLALSKGVHFVCNLLLLFVTVYSHLLLVAAGLEAPFLYLYALVYFLQSINFVRIIMRLWLCWKCRSKNPLLYDANYFLCWHTNCYDYCIPYNSVTSSIVITSGDGTTSPISEHDYQIGGYTEKWESGVKDCVVLHSYFTSDYYQLYSTQLSTDTGVEHVTFFIYNKIVDEPEEHVQIHTIDGSSGVVNPVMEPIYDEPTTTTSVPL

SEQ ID NO: 16920 - protein, 275 aa, Artificial Sequence
  SARS-CoV-2__MT584997.1__ORF3a protein
MDLFMRIFTIGTVTLKQGEIKDATSSDFVRATATIPIQASLPFGWLIVGVALLAVFQSASKIITLKKRWQLALSKGVHFVCNLLLLFVTVYSHLLLVAAGLEAPFLYLYALVYFLQSINFVRIIMRLWLCWKCRSKNPLLYDANYFLCWHTNCYDYCIPYNSVTSSIVITSGDGITSPISEHDYQIGGYTEKWESGVKDCVVLHSYFTSDYYQLYSTQLSTDTGVEHVTFFIYNKIVDEPEEHVQIHTIDGSSGVVNPVMEPIYDEPTTTTSVPL

SEQ ID NO: 16921 - protein, 275 aa, Artificial Sequence
  SARS-CoV-2__MT585093.1__ORF3a protein
MDLFMRIFTIGTVTLKQGEIKDATPSDFVRATATIPIQASLPFGWLIVGVALLAVFHSASKIITLKKRCQLALSKGVHFVCNLLLLFVTVYSHLLLVAAGLEAPFLYLYALVYFLQSINFVRIIMRLWLCWKCRSKNPLLYDANYFLCWHTNCYDYCIPYNSVTSSIVITSGDGTTSPISEHDYQIGGYTEKWESGVKDCVVLHSYFTSDYYQLYSTQLSTDTGVEHVTFFIYNKIVDEPEEHVQIHTIDGSSGVVNPVMEPIYDEPTTTTSVPL

SEQ ID NO: 16922 - protein, 275 aa, Artificial Sequence
  SARS-CoV-2__MT585094.1__ORF3a protein
MDLFMRIFTIGTVTLKQGEIKDATPSDFVRATATIPIQASLPFGWLIVGVALLAVFHSVSKIITLKKRWQLALSKGVHFVCNLLLLFVTVYSHLLLVAAGLEAPFLYLYALVYFLQSINFVRIIMRLWLCWKCRSKNPLLYDANYFLCWHTNCYDYCIPYNSVTSSIVITSGDGTTSPISEHDYQIGGYTEKWESGVKDCVVLHSYFTSDYYQLYSTQLSTDTGVEHVTFFIYNKIVDEPEEHVQIHTIDGSSGVVNPVMEPIYDEPTTTTSVPL

SEQ ID NO: 16923 - protein, 275 aa, Artificial Sequence
  SARS-CoV-2__MT578015.1__ORF3a protein
MDLFMRIFTIGTVTLKQGEIKDATPSDFVRATATIPIQASLPFGWLIVGVALLAVFQSASKIITLKKRWQLALSKGVHFVCNLLLLFVTVYSHLLLVAAGLEAPFLYLYALVYFLQSINFVRIIMRLWLCWKCRSKNPLLYDANYFLCWHTNCYDYCIPYNSVTSSIVITSGDGTTSPISEHDYQIGGYTEKWESGLKDCVVLHSYFTSDYYQLYSTQLSTDTGVEHVTFFIYNKIVDEPEEHVQIHTIDGSSGVVNPVMEPIYDEPTTTTSVPL

SEQ ID NO: 16924 - protein, 275 aa, Artificial Sequence
  SARS-CoV-2__MT520329.1__ORF3a protein
MDLFMRIFTIGTVTLKQGEIKDATPSDFVRATATIPIQASLPFGWLIVGVALLAVFHSASKIITLKKRWQLALSKGVHFVCNLLLLFVTVYSHLLLVAAGLEAPFLYFYALVYFLQSINFVRIIMRLWLCWKCRSKNPLLYDANYFLCWHTNCYDYCIPYNSVTSSIVITSGDGTTSPISEHDYQIGGYTEKWESGVKDCVVLHSYFTSDYYQLYSTQLSTDTGVEHVTFFIYNKIVDEPEEHVQIHTIDGSSGVVNPVMEPIYDEPTTTTSVPL

SEQ ID NO: 16925 - protein, 275 aa, Artificial Sequence
  SARS-CoV-2__MT520484.1__ORF3a protein
MDLFMRIFTIGTVTLKQGEIKDATPSDFVRATATIPIQASLPFGWLIVGVALLAVFHSASKIITLKKRWQLALSKGVHFVCNLLLLFVTVYSHLLLVAAGLEAPFLYLYALVYFLQSINFVRIIMRLWLCWKCCSKNPLLYDANYFLCWHTNCYDYCIPYNSVTSSIVITSGDGTTSPISEHDYQIGGYTEKWESGVKDCVVLHSYFTSDYYQLYSTQLSTDTGVEHVTFFIYNKIVDEPEEHVQIHTIDGSSGVVNPVMEPIYDEPTTTTSVPL

SEQ ID NO: 16926 - protein, 275 aa, Artificial Sequence
  SARS-CoV-2__MT520492.1__ORF3a protein
MDLFMRIFTIGTVTLKQGEIKDATPSDFVRATATIPIQASLPFGWLIVGVALLAVFHSASKIITLKKRWQLALSKGVHFVCNLLLLFVTVYSHLLLVAAGLEAPFLYLYALVYFLQSINFVRIIMRLWLCWKCRSKNPLLYDANYFLCWHTNCYDYCIPYNSVTSSIVITSGDGTTSPISEHDYQIGGYTEKWESGVKDCVVLHSYFTSDYYQLYSTQLSTDTGVEHVTFFIYNKIVNEPEEHVQIHTIDGSSGVVNPVMEPIYDEPTTTTSVPL

SEQ ID NO: 16927 - protein, 275 aa, Artificial Sequence
  SARS-CoV-2__MT520523.1__ORF3a protein
MDLFMRIFTIGTVTLKQGEIKDATPSDFVRATATIPIQASLPFGWLIVGVALLAVFQSASKIITLKKRWQLALSKGVHFVCNLLLLFVTVYSHLLLVAAGLEAPFLYLYALVYFLQSINFVRIIMRLWLCWKCRSKNPLLYDANYFLCWHTNCYDYCIPYNSVTSSIVITSGDGTTSPISEHDYQIGGYTEKWESRVKDCVVLHSYFTSDYYQLYSTQLSTDTGVEHVTFFIYNKIVDEPEEHVQIHTIDGSSGVVNPVMEPIYDEPTTTTSVPL

SEQ ID NO: 16928 - protein, 275 aa, Artificial Sequence
  SARS-CoV-2__MT520543.1__ORF3a protein
MDLFMRIFTIGTVTLKQGEIKDATPSDFVRATATIPIQASLPFGWLIVGVALLAVFHSASKIITLKKRWQLALSKGVHFVCNLLLLFVTVYSHLLLVAAGLEAPFLYLYALVYFLQSINFVRIIMRLWLCWKCRSKNPLLYDANYFLCWHTNCYDYCIPYNSVTSSIVITSGDGTTSPISEHDYQIGGYTEKWESGVKDCVVLHSYFTSDYYQLHSTQLSTDTGVEHVTFFIYNKIVDEPEEHVQIHTIDGSSGVVNPVMEPIYDEPTTTTSVPL

SEQ ID NO: 16929 - protein, 275 aa, Artificial Sequence
  SARS-CoV-2__MT557568.1__ORF3a protein
MDLFMRIFTIGTVTLKQGEIKDATPSDFVRATATIPIQASLPFGWLIVGVALLAVCQSASKIITLKKRWQLALSKGVHFVCNLLLLFVTVYSHLLLVAAGLEAPFLYLYALVYFLQSINFVRIIMRLWLCWKCRSKNPLLYDANYFLCWHTNCYDYCIPYNSVTSSIVITSGDGTTSPISEHDYQIGGYTEKWESGVKDCVVLHSYFTSDYYQLYSTQLSTDTGVEHVTFFIYNKIVDEPEEHVQIHTIDGSSGVVNPVMEPIYDEPTTTTSVPL

SEQ ID NO: 16930 - protein, 275 aa, Artificial Sequence
  SARS-CoV-2__MT558689.1__ORF3a protein
MDLFMRIFTIGTVTLKQGEIKDATPSHFVRATATIPIQASLPFGWLIVGVALLAVFQSASKIITLKKRWQLALSKGVHFVCNLLLLFVTVYSHLLLVAAGLEAPFLYLYALVYFLQSINFVRIIMRLWLCWKCRSKNPLLYDANYFLCWHTNCYDYCIPYNSVTSSIVITSGDGTTSPISEHDYQIGGYTEKWESGVKDCVVLHSYFTSDYYQLYSTQLSTDTGVEHVTFFIYNKIVDEPEEHVQIHTIDGSSGVVNPVMEPIYDEPTTTTSVPL

SEQ ID NO: 16931 - protein, 275 aa, Artificial Sequence
  SARS-CoV-2__MT558698.1__ORF3a protein
MDLFMRIFTIGTVTLKQGEIKDATPSDFVRATATIPIPASLPFGWLIVGVALLAVFQSASKIITLKKRWQLALSKGVHFVCNLLLLFVTVYSHLLLVAAGLEAPFLYLYALVYFLQSINFVRIIMRLWLCSKCRSKNPLLYDANYFLCWHTNCYDYCIPYNSVTSSIVITSGDGTTSPISEHDYQIGGYTEKWESGVKDCVVLHSYFTSDYYQLYSTQLSTDTGVEHVTFFIYNKIVDEPEEHVQIHTIDGSSGVVNPVMEPIYDEPTTTTSVPL

SEQ ID NO: 16932 - protein, 275 aa, Artificial Sequence
  SARS-CoV-2__MT559801.1__ORF3a protein
MDLFMRIFTIGTVTLKQGEIKDATPSDFVRATATIPIQASLPFGWLIVGVALLAVFHSASKIITLKKRWQLALSKGVHFVCNLLLLFVTVYSHLLLVAAGLEAPFLYLYALVYFLQSINFVRIIMRLWLCWKCRSKNPLLYDANYFLCWHTNCYDYCIPYNSVTSSIVITSGDGTTSPISEHDYQIGGYTEKWESGVKDCVVLHSYFTSDYYQLYSTQLSTDTGVEHVTFFIYNKIVDEPEEHVLIHTIDGSSGVVNPVMEPIYDEPTTTTSVPL

SEQ ID NO: 16933 - protein, 275 aa, Artificial Sequence
  SARS-CoV-2__MT528627.1__ORF3a protein
MDLFMRIFTIGTVTLKQGEIKDATPSDFVRATATIPIQASLPFGWLIVGVALLAVFQSASKIITLKKRWQLALSKGVHFVCNLLLLFVTVYSHPLLAAAGLEAPFLYLYALVYFLQSINLVRIIMRLWLCWKCRSKNPLLYDANYFLCWHTNCYDYCIPYNSVTSSIVITSGDGTTSPISEHDYQIGGYTEKWESGVKDCVVLHSYFTSDYYQLYSTQLSTDTGVEHVTFFIYNKIVDEPEEHVQIHTIDGSSGVVNPVMEPIYDEPTTTTSVPL

SEQ ID NO: 16934 - protein, 275 aa, Artificial Sequence
  SARS-CoV-2__MT533223.1__ORF3a protein
MDLFMRIFTIGTVTLKQGEIKDATPSDFVRATATIPIQASLPFGWLIVGVALLAVFQSASKIITLKKRWQLALSKGVHFVCNLLLLFVTVYSHLLLVAAGLEAPFLYLYALVYFLQSINFVRIIMRLLLCWKCRSKNPLLYDANYFLCWHTNCYDYCIPYNSVTSSIVITSGDGTTSPISEHDYQIGGYTEKWESGVKDCVVLHSYFTSDYYQLYSTQLSTDTGVEHVTFFIYNKIVDEPEEHVQIHTIDGSSGVVNPVMEPIYDEPTTTTSVPL

SEQ ID NO: 16935 - protein, 275 aa, Artificial Sequence
  SARS-CoV-2__MT533225.1__ORF3a protein
MDLFMRIFTIGTVTLKQGEIKDATPSDFVRATATIPIQASLPFGWLIVGVAILAVFHSASKIITLKKRWQLALSKGVHFVCNLLLLFVTVYSHLLLVAAGLEAPFLYLYALVYFLQSINFVRIIMRLWLCWKCRSKNPLLYDANYFLCWHTNCYDYCIPYNSVTSSIVITSGDGTTSPISEHDYQIGGYTEKWESGVKDCVVLHSYFTSDYYQLYSTQLSTDTGVEHVTFFIYNKIVDEPEEHVQIHTIDGSSGVVNPVMEPIYDEPTTTTSVPL

SEQ ID NO: 16936 - protein, 275 aa, Artificial Sequence
  SARS-CoV-2__MT517425.1__ORF3a protein
MDLFMRIFTIGTVTLKQGEIKDATPSDFVRATATIPIQASLPFGWLIVGVALLAVFQSASKIITLKKRWQLALSKGVHFVCNLLLLFVTVYSHLLLVAAGLEAPFLYLYALVYFLQSINFVRIIMRLWLCWKCRSKNPLLYDANYFLCWHTNCYDYCIPYNSVTSSIVITSGDGTTSPISEHDYQIGGYTEKCESGVKDCVVLHSYFTSDYYQLYSTQLSTDTGVEHVTFFIYNKIVDEPEEHVQIHTIDGSSGVVNPVMEPIYDEPTTTTSVPL

SEQ ID NO: 16937 - protein, 275 aa, Artificial Sequence
  SARS-CoV-2__MT512443.1__ORF3a protein
MDLFMRIFTIGTVTLKQGEIKDATPSDFVRATATIPIQASLPFGWLIVGVALLAVFQSASKIITLKKRWQLALSKGVHFVCNLLLLFVTVYSHLLLVAAGLEAPFLYLYALVYFLQSINFVRIIMRLWLCWKCRSKNPLLYDANYFLCWHTNCYDYCIPYNSVTSSIVITSGDGTTSPISEHDYQIGGYTEKWESGVKDCVVLHSYFTSDYYQLYSTQLSTDTGVEHVTFFIYNKIVDEPEEHVQIHTIDGSSGVVNPVMEPIYDEPTTTISVPL

SEQ ID NO: 16938 - protein, 275 aa, Artificial Sequence
  SARS-CoV-2__MT509471.1__ORF3a protein
MDLFMRIFTIGTVTLKQGEIKDATPSDFVRATATIPIQASLPFGWLIVGVALLAVFHSASKIITLKKRWQLALSKGVHFVCNLLLLFVTVYSHLLLVAAGLEAPFLYLYALFYFLQSINFVRIIMRLWLCWKCRSKNPLLYDANYFLCWHTNCYDYCIPYNSVTSSIVITSGDGTTSPISEHDYQIGGYTEKWESGVKDCVVLHSYFTSDYYQLYSTQLSTDTGVEHVTFFIYNKIVDEPEEHVQIHTIDGSSGVVNPVMEPIYDEPTTTTSVPL

SEQ ID NO: 16939 - protein, 275 aa, Artificial Sequence
  SARS-CoV-2__MT509503.1__ORF3a protein
MDLFMRIFTIGTVTLKQGEIKDATPSDFVRATATTPIQASLPFGWLIVGVALFAVFQSASKIITLKKRWQLALSKGVHFVCNLLLLFVTVYSHLLLVAAGLEAPFLYLYALVYFLQSINFVRIIMRLWLCWKCRSKNPLLYDANYFLCWHTNCYDYCIPYNSVTSSIVITSGDGTTSPISEHDYQIGGYTEKWESGVKDCVVLHSYFTSDYYQLYSTQLSTDTGVEHVTFFIYNKIVDEPEEHVQIHTIDGSSGVVNPVMEPIYDEPTTTTSVPL

SEQ ID NO: 16940 - protein, 275 aa, Artificial Sequence
  SARS-CoV-2__MT506535.1__ORF3a protein
MDLFMRIFTIGTVTLKQGEIKDATPSDFVRATATIPIQASLPFGWLIVGVALLAVFHSASKIITLKKRWQLALSKGVHFVCNLLLLFVTVYSHLLLVAAGLEAPFLYLYALVYFLQSINFVRIIMRLWLCWKCRSKNPLLYDANYFLCWHTNCYDYCIPYNSVTSSIVITSGDGTTSPISEHDYQIGGYTEKWEYGVKDCVVLHSYFTSDYYQLYSTQLSTDTGVEHVTFFIYNKIVDEPEEHVQIHTIDGSSGVVNPVMEPIYDEPTTTTSVPL

SEQ ID NO: 16941 - protein, 275 aa, Artificial Sequence
  SARS-CoV-2__MT506907.1__ORF3a protein
MDLFMRIFTIGTVTLKQGEIKDATPSDFVRATATIPIQASLPFGWLIVGVALLAVFQSASKIITLKKRWQLALSKGVHFVCNLLLLFVTVYSHLLLVAAGLEAPFLYLYALVYFLQSINFVRIIMRLWLCWKCRSKNPLLYDANYFLCWHTNCYDYCIPYNSVTSSIVITSGDGTTSPISEHDYQIGGYTEKWESGVKDCVVLHSYFTSDYYQLYSTQLSTDTGVEHVTFFIYNKIVDEPEEHVQIHTIDGSSGVVNPVMEPICDEPTTTTSVPL

SEQ ID NO: 16942 - protein, 275 aa, Artificial Sequence
  SARS-CoV-2__MT481905.1__ORF3a protein
MDLFMRIFTIGTVTLKQGEIKDATPSDFVRATATIPIQASLPFGWLIVGVALLAVFHSASKIITLKKRWQLALSKGVHFVCNLLLWFVTVYSHLLLVAAGLEAPFLYLYALVYFLQSINFVRIIMRLWLCWKCRSKNPLLYDANYFLCWHTNCYDYCIPYNSVTSSIVITSGDGTTSPISEHDYQIGGYTEKWESGVKDCVVLHSYFTSDYYQLYSTQLSTDTGVEHVTFFIYNKIVDEPEEHVQIHTIDGSSGVVNPVMEPIYDEPTTTTSVPL

SEQ ID NO: 16943 - protein, 275 aa, Artificial Sequence
  SARS-CoV-2__MT496972.1__ORF3a protein
MDLFMRIFTIGTVTLKQGEIKDATPSDFVRATATIPIQASLPFGWLIVGVALLAVFHSASKIITLKKRWQLALSKGFHFVCNLLLLFVTVYSHLLLVAAGLEAPFLYLYALVYFLQSINFVRIIMRLWLCWKCRSKNPLLYDANYFLCWHTNCYDYCIPYNSVTSSIVITSGDGTTSPISEHDYQIGGYTEKWESGVKDCVVLHSYFTSDYYQLYSTQLSTDTGVEHVTFFIYNKIVDEPEEHVQIHTIDGSSGVVNPVMEPIYDEPTTTTSVPL

SEQ ID NO: 16944 - protein, 275 aa, Artificial Sequence
  SARS-CoV-2__MT496974.1__ORF3a protein
MDLFMRIFTIGTVTLKQGEIKDATPSDFVRATATIPIQASLPFGWLIVGVALLAVFHSASKIITLKKRWQLALSKGVHFVCNLLLLFVTVYSHLLLVAAGLEAPFLYLYALVYFLQSINFVRIIMRLWLCWKCRSKNPLLYDSNYFLCWHTNCYDYCIPYNSVTSSIVITSGDGTTSPISEHDYQIGGYTEKWESGVKDCVVLHSYFTSDYYQLYSTQLSTDTGVEHVTFFIYNKIVDEPEEHVQIHTIDGSSGVVNPVMEPIYDEPTTTTSVPL

SEQ ID NO: 16945 - protein, 275 aa, Artificial Sequence
  SARS-CoV-2__MT270114.1__ORF3a protein
MDLFMRIFTIGTVTLKQGEIKDATLSDFVRATATIPIQASLPFGWLIVGVALLAVFQSASKIITLKKRWQLALSKGVHFVCNLLLLFVTVYSHLLLVAAGLEAPFLYLYALVYFLQSINFVRIIMRLWLCWKCRSKNPLLYDANYFLCWHTNCYDYCIPYNSVTSSIVITSGDGTTSPISEHDYQIGGYTEKWESGVKDCVVLHSYFTSDYYQLYSTQLSTDTGVEHVTFFIYNKIVDEPEEHVQIHTIDGSSGVVNPVMEPIYDEPTTTTSVPL

SEQ ID NO: 16946 - protein, 275 aa, Artificial Sequence
  SARS-CoV-2__MT477842.1__ORF3a protein
MDLFMRIFTIGTVTLKQGEIKDATPSDFVRATATIPIQASLPFGWLIVGVALLAVFHSASKIITLKKRWQLALSKGVHFVCNLLLLFVTVYSHLLLVAAGLEAPFLYLYALVYFLQSINFVRIIMRLWLCWKCRSKNPLLYDANYFLCWHTNCYDYCIPYNSVTSSIVITSGDGTTSPISEHDYQIGGYTEKWESGVKDCVVLHSYFTSDYYQLYSTQLSTDTCVEHVTFFIYNKIVDEPEEHVQIHTIDGSSGVVNPVMEPIYDEPTTTTSVPL

SEQ ID NO: 16947 - protein, 275 aa, Artificial Sequence
  SARS-CoV-2__MT481929.1__ORF3a protein
MDLFMRIFTIGTVTLKQGEIKDATPSDFVRAIATIPIQASLPFGWLIVGVALLAVFHSASKIITLKKRWQLALSKGVHFVCNLLLLFVTVYSHLLLVAAGLEAPFLYLYALVYFLQSINFVRIIMRLWLCWKCRSKNPLLYDANYFLCWHTNCYDYCIPYNSVTSSIVITSGDGTTSPISEHDYQIGGYTEKWESGVKDCVVLHSYFTSDYYQLYSTQLSTDTGVEHVTFFIYNKIVDEPEEHVQIHTIDGSSGVVNPVMEPIYDEPTTTTSVPL

SEQ ID NO: 16948 - protein, 275 aa, Artificial Sequence
  SARS-CoV-2__MT482131.1__ORF3a protein
MDLFMRIFTIGTVTLKQGEIKDATPSDFVRATATIPIQASLPFGWLIVGVALLAVFHSASKIITLKKRWQLALSKGVHFVCNLLLLFVTVYSHLLLVADGLEAPFLYLYALVYFLQSINFVRIIMRLWLCWKCRSKNPLLYDANYFLCWHTNCYDYCIPYNSVTSSIVITSGDGTTSPISEHDYQIGGYTEKWESGVKDCVVLHSYFTSDYYQLYSTQLSTDTGVEHVTFFIYNKIVDEPEEHVQIHTIDGSSGVVNPVMEPIYDEPTTTTSVPL

SEQ ID NO: 16949 - protein, 275 aa, Artificial Sequence
  SARS-CoV-2__MT482149.1__ORF3a protein
MDLFMRIFTIGTVTLKQGEIKDATPSDFVRATATIPIQASLPFGWLIVGVALLAVFHSASKIITFKKRWQLALSKGVHFVCNLLLLFVTVYSHLLLVAAGLEAPFLYLYALVYFLQSINFVRIIMRLWLCWKCRSKNPLLYDANYFLCWHTNCYDYCIPYNSVTSSIVITSGDGTTSPISEHDYQIGGYTEKWESGVKDCVVLHSYFTSDYYQLYSTQLSTDTCVEHVTFFIYNKIVDEPEEHVQIHTIDGSSGVVNPVMEPIYDEPTTTTSVPL

SEQ ID NO: 16950 - protein, 275 aa, Artificial Sequence
  SARS-CoV-2__MT470120.1__ORF3a protein
MDLFMRIFTIGTVTLKQGEIKDATPSDFVRATATIPIQASLPFGWLIVGVALLAVFHSASKIITLKKRWQLALSKGVHFVCNLLLLFVTVYSHLLLVAAGLEAPFLYLYALVYFLQSINFVRIIMRLWLCWKCRSKNPLLYDANYFLCWHTNCYDYCIPYNSVTSSIVITSGDGTTSPISEHDYQIGGYTEKWESGVKDCVVLHSYFTSDYYQLYSTQLSTDTGVEHVTFFIYNKIFDEPEEHVQIHTIDGSSGVVNPVMEPIYDEPTTTTSVPL

SEQ ID NO: 16951 - protein, 275 aa, Artificial Sequence
  SARS-CoV-2__MT470125.1__ORF3a protein
MDLFMRIFTIGTVTLKQGEIKDATPSDFVRATATIPIQASLPFGWLIVGVALLAVFQSASKIITLKKRWQLAFSKGVHFVCNLLLLFVTVYSHLLLVAAGLEAPFLYLYALVYFLQSINFVRIIMRLWLCWKCRSKNPLLYDANYFLCWHTNCYDYCIPYNSVTSSIVITSGDGTTSPISEHDYQIGGYTEKWESGVKDCVVLHSYFTSDYYQLYSTQLSTDTGVEHVTFFIYNKIVDEPEEHVQIHTIDGSSGVVNPVMEPIYDEPTTTTSVPL

SEQ ID NO: 16952 - protein, 275 aa, Artificial Sequence
  SARS-CoV-2__MT470132.1__ORF3a protein
MDLFMRIFTIGTVTLKQGEIKDATPSDFVRATATIPIQASLPFGWLIVGVALLAVFHSASKIITLKKRWQLALSKGVHFVCNLLLLFVTVYSHLLLVAVGLEAPFLYLYALVYFLQSINFVRIIMRLWLCWKCRSKNPLLYDANYFLCWHTNCYDYCIPYNSVTSSIVITSGDGTTSPISEHDYQIGGYTEKWESGVKDCVVLHSYFTSDYYQLYSTQLSTDTGVEHVTFFIYNKIVDEPEEHVQIHTIDGSSGVVNPVMEPIYDEPTTTTSVPL

SEQ ID NO: 16953 - protein, 275 aa, Artificial Sequence
  SARS-CoV-2__MT470135.1__ORF3a protein
MDLFMRIFTIGTVTLKQGEIKDATPSDFVRATATIPIQASLPFGWLIVGVALLAVFHSASKIITLKKRWQLALSKGVHFVCNLLLLFVTVYSHLLLVAAGLEAPFLYLYALVYFLQSINFVRIIMRLWLCWKCRSKNPLLYDANYFLCWHTNCCDYCIPYNSVTSSIVITSGDGTTSPISEHDYQIGGYTEKWESGVKDCVVLHSYFTSDYYQLYSTQLSTDTGVEHVTFFIYNKIVDEPEEHVQIHTIDGSSGVVNPVMEPIYDEPTTTTSVPL

SEQ ID NO: 16954 - protein, 275 aa, Artificial Sequence
  SARS-CoV-2__MT470172.1__ORF3a protein
MDLFMRIFTIGTVTLKQGEIKDATPSDFVRATSTIPIQASLPFGWLIVGVALLAVFHSASKIITLKKRWQLALSKGVHFVCNLLLLFVTVYSHLLLVAAGLEAPFLYLYALVYFLQSINFVRIIMRLWLCWKCRSKNPLLYDANYFLCWHTNCYDYCIPYNSVTSSIVITSGDGTTSPISEHDYQIGGYTEKWESGVKDCVVLHSYFTSDYYQLYSTQLSTDTGVEHVTFFIYNKIVDEPEEHVQIHTIDGSSGVVNPVMEPIYDEPTTTTSVPL

SEQ ID NO: 16955 - protein, 275 aa, Artificial Sequence
  SARS-CoV-2__MT459865.1__ORF3a protein
MDLFMRIFTIGTVTLKQGEIKDATPSDFVRATATIPIQASLPFGWLIVGVALLAVFQSASKIITLKKRWQLALSKGVHFVCNLLLLFVTVYSHLLLVAAGLEAPFLYLYALVYFLQSINFVRIIMRLWLCWKCRSKNPLLYDANYFLCWHTNCYDYCIPYNSVTSSIVITSGDGTTSPISEHDYQIGGYTEKWESGVKDCVVLHSYFTSDYYQLYSTQLSTDTGVEHVTFFIYNKIVDEPEEHVQIHTIDVSSGVVNPVIEPIYDEPTTTTSVPL

SEQ ID NO: 16956 - protein, 275 aa, Artificial Sequence
  SARS-CoV-2__MT459903.1__ORF3a protein
MDLFMRIFTIGTVTLKQGEIKDATPSDFVRATATIPIQASLPFGWLIVGVALLAVFQSASKIITLKKRWQLALSKGVHFVCNLLLLFVTVYSHLLLVAAGLEAPFLYLYALVYFLQSINFVRIIMRLWLCWKCRSKNPLLYDANYFLCWHTNCYDYCIPYNSVTSSIVITSGDGTTSPISEHDYQIGGYTEKWESGVKDCVVLHSYFTSDYYQLYSTQLSTDTGVEHVTFFIYNKIVDEPVEHVQIHTIDGSSGVVNPVMEPIYDEPTTTTSVPL

SEQ ID NO: 16957 - protein, 275 aa, Artificial Sequence
  SARS-CoV-2__MT461646.1__ORF3a protein
MDLFMRIFTIGTVTLKQGEIKDATPSDFVRATATIPIQASLPFGWLIVGVALLAVFHSASKIITLKKRWQLALSKGVHFVCNLLLLFVTVYSHLLLVAAGLEAPFLYLYASVYFLQSINFVRIIMRLWLCWKCRSKNPLLYDANYFLCWHTNCYDYCIPYNSVTSSIVITSGDGTTSPISEHDYQIGGYTEKWESGVKDCVVLHSYFTSDYYQLYSTQLSTDTGVEHVTFFIYNKIVDEPEEHVQIHTIDGSSGVVNPVMEPIYDEPTTTTSVPL

SEQ ID NO: 16958 - protein, 275 aa, Artificial Sequence
  SARS-CoV-2__MT457392.1__ORF3a protein
MDLFMRIFTIGTVTLKQGEIKDATPSDFVRATATIPIQASLPFGWLIVGVALLAVFQSASKIITLKKRWQLALSKGVHFVCNLLLLFVTVYSHLLLVAAGLEAPFLYLYALVYFLQSINFVRIIMRLWLCWKCRSKNPLLYDANYFLCWHTNCYDYCIPYNSVTSSIVITSGDGTTSPISEHDYQIGGYTEKWESGVKDCVVLHSYFTSDYYQLYSTQVSTDTGVEHVTFFIYNKIVDEPEEHVQIHTIDGSSGVVNPVMEPIYDEPTTTTSVPL

SEQ ID NO: 16959 - protein, 275 aa, Artificial Sequence
  SARS-CoV-2__MT457396.1__ORF3a protein
MDLFMRIFTIGTVTLKQGEIKDATPSDFVRATAAIPIQASLPFGWLIVGVALLAVFQSASKIITLKKRWQLALSKGVHFVCNLLLLFVTVYSHLLLVAAGLEAPFLYLYALVYFLQSINFVRIIMRLWLCWKCRSKNPLLYDANYFLCWHTNCYDYCIPYNSVTSSIVITSGDGTTSPISEHDYQIGGYTEKWESGVKDCVVLHSYFTSDYYQLYSTQLSTDTGVEHVTFFIYNKIVDEPEEHVQIHTIDGSSGVVNPVMEPIYDEPTTTTSVPL

SEQ ID NO: 16960 - protein, 276 aa, Artificial Sequence
  SARS-CoV-2__MT449656.1__ORF3a protein
MDLFMRIFTIGTVTLKQGEIKDATPSDFVRATATIPIQASLPFGWLIVGVALLAVFQSASKIITLKKRWQLALSKGVHFVCNLLLLFVTVYSHLLLVAAGLEAPFLYLYALVYFLQSINFVRIIMRLWLCWKCRSKNPLLYDANYFLCWHTNCYDYCIPYNSVTSSIVITSGDGTTSPISEHDYQIGGYTEKWESGVKDCVVLHSYFTSDYYQLYSTQLSTDTGVEHVTFFFIYNKIVDEPEEHVQIHTIDGSSGVVNPVMEPIYDEPTTTTSVPL

SEQ ID NO: 16961 - protein, 275 aa, Artificial Sequence
  SARS-CoV-2__MT451195.1__ORF3a protein
MDLFMRIFTIGTLTLKQGEIKDATPSDFVRATATIPIQASLPFGWLIVGVALLAVFQSASKIITLKKRWQLALSKGVHFVCNLLLLFVTVYSHLLLVAAGLEAPFLYLYALVYFLQSINFVRIIMRLWLCWKCRSKNPLLYDANYFLCWHTNCYDYCIPYNSVTSSIVITSGDGITSPISEHDYQIGGYTEKWESGVKDCVVLHSYFTSDYYQLYSTQLSTDTGVEHVTFFIYNKIVDEPEEHVQIHTIDGSSGVVNPVMEPIYDEPTTTTSVPL

SEQ ID NO: 16962 - protein, 275 aa, Artificial Sequence
  SARS-CoV-2__MT451231.1__ORF3a protein
MDLFMRIFTIGTLTLKQGEIKDATPSDFVRATATIPIQASLPFGWLIVGVALLAVFQSASKIITLKKRWQLALSKGVYFVCNLLLLFVTVYSHLLLVAAGLEAPFLYLYALVYFLQSINFVRIIMRLWLCWKCRSKNPLLYDANYFLCWHTNCYDYCIPYNSVTSSIVITSGDGTTSPISEHDYQIGGYTEKWESGVKDCVVLHSYFTSDYYQLYSTQLSTDTGVEHVTFFIYNKIVDEPEEHVQIHTIDGSSGVVNPVMEPIYDEPTTTTSVPL

SEQ ID NO: 16963 - protein, 275 aa, Artificial Sequence
  SARS-CoV-2__MT451255.1__ORF3a protein
MDLFMRIFTIGTVTLKQGEIKDATPSDFVRATATIPIQASLPFGWLIVGVAILAVFQSASKIITLKKRWQLALSKGVHFVCNLLLLFVTVYSHLLLVAAGLEAPFLYLYALVYFLQSINFVRIIMRLWLCWKCRSKNPLLYDANYFLCWHTNCYDYCIPYNSVTSSIVITSGDGTTSPISEHDYQIGGYTEKWESGVKDCVVLHSYFTSDYYQLYSTQLSTDTGVEHVTFFIYNKIVDEPEEHVQIHTIDGSSGVVNPVMEPIYDEPTTTTSVPL

SEQ ID NO: 16964 - protein, 275 aa, Artificial Sequence
  SARS-CoV-2__MT451755.1__ORF3a protein
MDLFMRIFTIGTVTLKQGEIKDATPSDFVRATATIPIQASLPFGWLIVGVALLAVFHSASKIITLKKRWQLALSKGVHFVCNLLLLFVTVYSHLLLVAAGLEAPFLYLYALVYFLQSINFVRIIMRLWLCWKCRSKNPLFYDANYFLCWHTNCYDYCIPYNSVTSSIVITSGDGTTSPISEHDYQIGGYTEKWESGVKDCVVLHSYFTSDYYQLYSTQLSTDTGVEHVTFFIYNKIVDEPEEHVQIHTIDGSSGVVNPVMEPIYDEPTTTTSVPL

SEQ ID NO: 16965 - protein, 275 aa, Artificial Sequence
  SARS-CoV-2__MT446345.1__ORF3a protein
MDLFMRIFTIGTVTLKQGEIKDATPSDFVRATATIPIQASLPFGWLIVGVALLAVFHSASKIITLKKRWQLALSKGVHFVCNLLLLFVTVYSHLLLVAAGLEAPFFYLYALVYFLQSINFVRIIMRLWLCWKCRSKNPLLYDANYFLCWHTNCYDYCIPYNSVTSSIVITSGDGTTSPISEHDYQIGGYTEKWESGVKDCVVLHSYFTSDYYQLYSTQLSTDTGVEHVTFFIYNKIVDEPEEHVQIHTIDGSSGVVNPVMEPIYDEPTTTTSVPL

SEQ ID NO: 16966 - protein, 275 aa, Artificial Sequence
  SARS-CoV-2__MT439244.1__ORF3a protein
MDLFMRIFTIGTVTLKQGEIKDATPSDFVRATATIPIQASLPFGWLIVGVALLAVFHSASKIITLKKRWQLALSKGVHFVCNLLLLFVTVYSHLLLVAAGLEAPFLYLYALVYFLQSINFVRIIMRLWLCWKCRSKNPLLYDANYFLCWHTNCYDYCIPYNSVTSSIVITSGDGTTSPISEHDYQIGGYTEKWESGVKDCVVLHSYFTSDYYQLYSTQLSTDIGVEHVTFFIYNKIVDEPEEHVQIHTIDGSSGVVNPVMEPIYDEPTTTTSVPL

SEQ ID NO: 16967 - protein, 275 aa, Artificial Sequence
  SARS-CoV-2__MT418882.1__ORF3a protein
MDLFMRIFTIGTVTLKQGEIKDATPSDFVRATATIPIQASLPFGWLIVGVALLAVFHSASKIITLKKRWQLALSKGVHFVCNLLLLFVTVYSHLLLVAAGLEAPFLYLYALVYFLQSINFVRIIMRLWLCWKCRSKNPLLYDANYFLCWHTNCYDYCIPYNSVTSSIVITSGDGTISPISEHDYQIGGYTEKWESGVKDCVVLHSYFTSDYYQLYSTQLSTDTGVEHVTFFIYNKIVDEPEEHVQIHTIDGSSGVVNPVMEPIYDEPTTTTSVPL

SEQ ID NO: 16968 - protein, 275 aa, Artificial Sequence
  SARS-CoV-2__MT412323.1__ORF3a protein
MDLFMRIFTIGTVTLKQGEIKDATPSDFVRATATIPIQASLPFGWLIVGVALLAVFQSASKIITLKKRWQLALSKGVHFVCNLLLLFVTVYSHLLLVAAGLEAPFLYLYALVYFLQSINFVRIIMRLWLCWKCRSKNPLLYDANYFLYWHTNCYDYCIPYNSVTSSIVITSGDGTTSPISEHDYQIGGYTEKWESGVKDCVVLHSYFTSDYYQLYSTQLSTDTGVEHVTFFIYNKIVDEPEEHVQIHTIDGSSGVVNPVMEPIYDEPTTTTSVPL

SEQ ID NO: 16969 - protein, 275 aa, Artificial Sequence
  SARS-CoV-2__MT385434.1__ORF3a protein
MDLFMRIFTIGTVTLKQGEIKDATPSDFVRATATIPIQASLPFGWLIVGVALLAVFQSASKIITLKKRWQLALSKGVHFVCNLLLLFVTVYSHLLLVAAGLEAPFLYLYALVYFLQSINFVRIIMSLWLCWKCRSKNPLLYDANYFLCWHTNCYDYCIPYNSVTSSIVITSGDGTTSPISEHDYQIGGYTEKWESGVKDCVVLHSYFTSDYYQLYSTQLSTDTGVEHVTFFIYNKIVDEPEEHVQIHTIDGSSGVVNPVMEPIYDEPTTTTSVPL

SEQ ID NO: 16970 - protein, 275 aa, Artificial Sequence
  SARS-CoV-2__MT375441.1__ORF3a protein
MDLFMRIFTIGTVTLKQGEIKDATPSDFVRATATIPIQASLPFGWLIVGVALLAVFQSASKIITLKKRWQLALSKGVHFVCNLLLLFVTVYSHLFLVAAGLEAPFLYLYALVYFLQSINFVRIIMRLWLCWKCRSKNPLLYDANYFLCWHTSCYDYCIPYNSVTSSIVITSGDGTTSPISEHDYQIGGYTEKWESGVKDCVVLHSYFTSDYYQLYSTQLSTDTGVEHVTFFIYNKIVDEPEEHVQIHTIDGSSGVVNPVMEPIYDEPTTTTSVPL

SEQ ID NO: 16971 - protein, 275 aa, Artificial Sequence
  SARS-CoV-2__MT375459.1__ORF3a protein
MDLFMRIFIIGTVTLKQGEIKDATPSDFVRATATIPIQASLPFGWLIVGVALLAVFQSASKIITLKKRWQLALSKGVHFVCNLLLLFVTVYSHLLLVAAGLEAPFLYLYALVYFLQSINFVRIIMRLWLCWKCRSKNPLLYDANYFLCWHTNCYDYCIPYNSVTSSIVITSGDGTTSPISEHDYQIGGYTEKWESGVKDCVVLHSYFTSDYYQLYSTQLSTDTGVEHVTFFIYNKIVDEPEEHVQIHTIDGSSGVVNPVMEPIYDEPTTTTSVPL

SEQ ID NO: 16972 - protein, 275 aa, Artificial Sequence
  SARS-CoV-2__MT375470.1__ORF3a protein
MDLFMRIFTIGTVTLKQGEIKDATPSDFVRATATIPIQASLPFGWLIVGVALLAVFHSASKIITLKKRWQLALSKGVHFVCNLLLLFVTVYSHLLLVAAGLEAPFLYLYALVYCLQSINFVRIIMRLWLCWKCRSKNPLLYDANYFLCWHTNCYDYCIPYNSVTSSIVITSGDGTTSPISEHDYQIGGYTEKWESGVKDCVVLHSYFTSDYYQLYSTQLSTDTGVEHVTFFIYNKIVDEPEEHVQIHTIDGSSGVVNPVMEPIYDEPTTTTSVPL

SEQ ID NO: 16973 - protein, 275 aa, Artificial Sequence
  SARS-CoV-2__MT374112.1__ORF3a protein
MDLFMRIFTIGTVTLKQGEIKDATPSDFVRATATIPIQASLPFGWLIVGVALLAVFHSASKIITLKKRWQLALSKGVHFVCNLLLLFVTVYSHLLLVAAGLEAPFLYLYALVYFLQSINFVRIIIRLWLCWKCRSKNPLLYDANYFLCWHTNCYDYCIPYNSVTSSIVITSGDGTTSPISEHDYQIGGYTEKWESGVKDCVVLHSYFTSDYYQLYSTQLSTDTGVEHVTFFIYNKIVDEPEEHVQIHTIDGSSGVVNPVMEPIYDEPTTTTSVPL

SEQ ID NO: 16974 - protein, 275 aa, Artificial Sequence
  SARS-CoV-2__MT252680.1__ORF3a protein
MDLFMRIFTIGTVTLKQGEIKDATPSDFVRATATIPIQASLPFGWLIVGVALLAVFQSASKIITLKKRWQLALSKGVHFVCNLLLLFVTVYSHLLLVAAGLEAPFLYLYALVYFLQSINFVRIIMRLWLCWKCRSKNPLLYDANYFLCWHTNCYDYCIPYNSVTSSIVITSGDGTTSPISEHDYQIGGYTEKWESGVKDCVVLHSYFTSDYYQLYSTQLSTDTVVEHVTFFIYNKIVDEPEEHVQIHTIDGSSGVVNPVMEPIYDEPTTTTSVPL

SEQ ID NO: 16975 - protein, 275 aa, Artificial Sequence
  SARS-CoV-2__MT371047.1__ORF3a protein
MDLFMRIFTIGTVTLKQGEIKDATPSDFVRATATIPIQASLPFGWLIVGVALLAVFQSASKIITLKKRWQLALSKGVHFVCNLLLLFVTVYSHLLLVAAGLEAPFLYLYALVYFLQSINFVRIIMRLWLCWKCRSKNPLLYDANYFLCWHTNCYDYCIPYNSVTSSIVITSGDGTTSPISEHDYQIGGYTEKWESGVKDCVVLHSYFTSDYYQLYSTQLSTDTGVEHVTFFIYNKIVDEPEEHVQIHTIDGSSGVVNPVMEPMYDEPTTTTSVPL

SEQ ID NO: 16976 - protein, 275 aa, Artificial Sequence
  SARS-CoV-2__MT370848.1__ORF3a protein
MDLFMRIFTIGTVTLKQGEIKDATPSDFVRATATIPIQASLPFGWLIVGAALLAVFQSASKIITLKKRWQLALSKGVHFVCNLLLLFVTVYSHLLLVAAGLEAPFLYLYALVYFLQSINFVRIIMRLWLCWKCRSKNPLLYDANYFLCWHTNCYDYCIPYNSVTSSIVITSGDGTTSPISEHDYQIGGYTEKWESGVKDCVVLHSYFTSDYYQLYSTQLSTDTGVEHVTFFIYNKIVDEPEEHVQIHTIDGSSGVVNPVMEPIYDEPTTTTSVPL

SEQ ID NO: 16977 - protein, 275 aa, Artificial Sequence
  SARS-CoV-2__MT370869.1__ORF3a protein
MDLFMRIFTIGTVTLKQGEIKDATPSDFVRATATIPIQASLPFGWLIVGVALLAVFQSASNIITLKKRWQLALSKGVHFVCNLLLLFVTVYSHLLLVAAGLEAPFLYLYALVYFLQSINFVRIIMRLWLCWKCRSKNPLLYDANYFLCWHTNCYDYCIPYNSVTSSIVITSGDGTTSPISEHDYQIGGYTEKWESGVKDCVVLHSYFTSDYYQLYSTQLSTDTGVEHVTFFIYNKIVDEPEEHVQIHTIDGSSGVVNPVMEPIYDEPTTTTSVPL

SEQ ID NO: 16978 - protein, 275 aa, Artificial Sequence
  SARS-CoV-2__MT371038.1__ORF3a protein
MDLFMRIFTIGTVTLKQGEIKDATPSDFVRATATIPIQASLPFGWLIVGVALLAVFHSASKIITLKKRWQLALSKGVHFVCNLLLLFVTVYSHLLLVAAGLEAPFLYLYALVYFLHSINFVRIIMRLWLCWKCRSKNPLLYDANYFLCWHTNCYDYCIPYNSVTSSIVITSGDGTTSPISEHDYQIGGYTEKWESGVKDCVVLHSYFTSDYYQLYSTQLSTDTGVEHVTFFIYNKIVDEPEEHVQIHTIDGSSGVVNPVMEPIYDEPTTTTSVPL

SEQ ID NO: 16979 - protein, 275 aa, Artificial Sequence
  SARS-CoV-2__MT358656.1__ORF3a protein
MDLFMRIFKIGTVTLKQGEIKDATPSDFVRATATIPIQASLPFGWLIVGVALLAVFQSASKIITLKKRWQLALSKGVHFVCNLLLLFVTVYSHLLLVAAGLEAPFLYLYALVYFLQSINFVRIIMRLWLCWKCRSKNPLLYDANYFLCWHTNCYDYCIPYNSVTSSIVITSGDGTTSPISEHDYQIGGYTEKWESGVKDCVVLHSYFTSDYYQLYSTQLSTDTGVEHVTFFIYNKIVDEPEEHVQIHTIDGSSRVVNPVMEPIYDEPTTTTSVPL

SEQ ID NO: 16980 - protein, 275 aa, Artificial Sequence
  SARS-CoV-2__MT344957.1__ORF3a protein
MDLFMRIFTIGTVTLKQGEIKDATPSDFVRATATIPIQASLSFGWLIVGVALLAVFHSASKIITLKKRWQLALSKGVHFVCNLLLLFVTVYSHLLLVAAGLEAPFLYLYALVYFLQSINFVRIIMRLWLCWKCRSKNPLLYDANYFLCWHTNCYDYCIPYNSVTSSIVITSGDGTTSPISEHDYQIGGYTEKWESGVKDCVVLHSYFTSDYYQLYSTQLSTDTGVEHVTFFIYNKIVDEPEEHVQIHTIDGSSGVVNPVMEPIYDEPTTTTSVPL

SEQ ID NO: 16981 - protein, 275 aa, Artificial Sequence
  SARS-CoV-2__MT326054.1__ORF3a protein
MDLFMRIFTIGTVTLKQGEIKDATPSDFVRATATIPIQASLPFGWLIVGVALLAVFHSASKIITLKKRWQLALSKGVHFVCNLLLLFVTVYSHLLLVAAGLEAPFLYLYALVYFLQSINFVRIIMRLWLCWKCRSKNPLLYDANYFLCWHINCYDYCIPYNSVTSSIVITSGDGTTSPISEHDYQIGGYTEKWESGVKDCVVLHSYFTSDYYQLYSTQLSTDTGVEHVTFFIYNKIVDEPEEHVQIHTIDGSSGVVNPVMEPIYDEPTTTTSVPL

SEQ ID NO: 16982 - protein, 275 aa, Artificial Sequence
  SARS-CoV-2__MT326096.1__ORF3a protein
MDLFMRIFTIGTVTLKQGEIKDATPSDFVRATATIPIQASLPFGWLIVGVALLAVFHSASKIITLKKRWQLALSKGVHFVCNLLLLFVTVYSHLFLVAAGLEAPFLYLYALVYFLQSINFVRIIMRLWLCWKCRSKNPLLYDANYFLCWHTNCYDYCIPYNSVTSSIVITSGDGTTSPISEHDYQIGGYTEKWESGVKDCVVLHSYFTSDYYQLYSTQLSTDTGVEHVTFFIYNKIVDEPEEHVQIHTIDGSSGVVNPVMEPIYDEPTTTTSVPL

SEQ ID NO: 16983 - protein, 275 aa, Artificial Sequence
  SARS-CoV-2__MT326151.1__ORF3a protein
MDLFMRIFTIGTVTLKQGEIKDATPSDFVRATATIPIQASLPFGWLIVGVALLAVFQSASKIITLKKRWQLSLSKGVHFVCNLLLLFVTVYSHLLLVAAGLEAPFLYLYALVYFLQSINFVRIIMRLWLCWKCRSKNPLLYDANYFLCWHTNCYDYCIPYNSVTSSIVITSGDGTTSPISEHDYQIGGYTEKWESGVKDCVVLHSYFTSDYYQLYSTQLSTDTGVEHVTFFIYNKIVDEPEEHVQIHTIDGSSGVVNPVMEPIYDEPTTTTSVPL

SEQ ID NO: 16984 - protein, 275 aa, Artificial Sequence
  SARS-CoV-2__MT325635.1__ORF3a protein
MDLFMRIFTIGTVTLKQGEIKDATPSDFVRATATIPIQASLPFGWLIVGVALLAVFHSASKIITLKKRWQLALSKGVHFVCNLLLLFVTVYSHLLLVAAGLEAPFLYLYALVYFLQSINFVRIIMRLWLCWKCRSKNPLLYDANYFLCWHTNCYDYCIPYNSVTSSIVITSGDGTTSPISEHDYQIGGYTEKWESGVKDCVVLHSYFTSDYYQLYSTQLSTDTGVEHVTFFIYNKIVDDPEEHVQIHTIDGSSGVVNPVMEPIYDEPTTTTSVPL

SEQ ID NO: 16985 - protein, 275 aa, Artificial Sequence
  SARS-CoV-2__MT328033.1__ORF3a protein
MDLFMRIFTIGTVTLKQGEIKDATPSDFVRATATIPIQASLPFGWLIVGVALLAVFQSASKIITLKKRWQLALSKGVHFVCNLLLLFVTVYSHLLLVAAGLEAPFLYLYALVYFLQSINFVRIIMRIWLCWKCRSKNPLLYDANYFLCWHTNCYDYCIPYNSVTSSIVITSGDGTTSPISEHDYQIGGYTEKWESGVKDCVVLHSYFTSDYYQLYSTQLSTDTGVEHVTFFIYNKIVDEPEEHVQIHTIDGSSGVVNPVMEPIYDEPTTTTSVPL

SEQ ID NO: 16986 - protein, 272 aa, Artificial Sequence
  SARS-CoV-2__MT293186.1__ORF3a protein
MDLFMRILTVTLKQGEIKDATPSDFVRATATIPIQASLPFGWLIVGVALLAVFQSASKIITLKKRWQLALSKGVHFVCNLLLLFVTVYSHLLLVAAGLEAPFLYLYALVYFLQSINFVRIIMRLWLCWKCRSKNPLLYDANYFLCWHTNCYDYCIPYNSVTSSIVITSGDGTTSPISEHDYQIGGYTEKWESGVKDCVVLHSYFTSDYYQLYSTQLSTDTGVEHVTFFIYNKIVDEPEEHVQIHTIDGSSGVVNPVMEPIYDEPTTTTSVPL

SEQ ID NO: 16987 - protein, 275 aa, Artificial Sequence
  SARS-CoV-2__MT263428.1__ORF3a protein
MDLFMRIFTIGTVTLKQGEIKDATPSDFVRATATIPIQASLPFGWLIVGVALLAVFHSASKIITLKKRWQLALSKGVHFVCNLLLLFVTVYSHLLLVAAVLEAPFLYLYALVYFLQSINFVRIIMRLWLCWKCRSKNPLLYDANYFLCWHTNCYDYCIPYNSVTSSIVITSGDGTTSPISEHDYQIGGYTEKWESGVKDCVVLHSYFTSDYYQLYSTQLSTDTGVEHVTFFIYNKIVDEPEEHVQIHTIDGSSGVVNPVMEPIYDEPTTTTSVPL

SEQ ID NO: 16988 - protein, 275 aa, Artificial Sequence
  SARS-CoV-2__MT263448.1__ORF3a protein
MDLFMRIFTIGTVTLKQGEIKDATPSDFVRATATIPIQASLPFGWLIVGVALLAVFQSASKIITLKKRWQLALSKGVHFVCNLLLLFVTVYSHLLLVAAGLEAPFLYLYALVYFLQSINFVRIIMRLWLCWKCRSKNPLLYDANYFLCWHTNYYDYCIPYNSVTSSIVITSGDGTTSPISEHDYQIGGYTEKWESGVKDCVVLHSYFTSDYYQLYSTQLSTDTGVEHVTFFIYNKIVDEPEEHVQIHTIDGSSGVVNPVMEPIYDEPTTTTSVPL

SEQ ID NO: 16989 - protein, 275 aa, Artificial Sequence
  SARS-CoV-2__MT159712.2__ORF3a protein
MDLFMRIFTIGTVTLKQGEIKDATPSDFVRATATIPIQASLPFGWLIVGVALLAVFQSASKIITLKKRWQLALSKGVHFVCNLLLLFVTVYSHLLLVAAGLEAPFLYLYALVYFLQSINFVRIIMRLWLCWKCRPKNPLLYDANYFLCWHTNCYDYCIPYNSVTSSIVITSGDGTTSPISEHDYQIGGYTEKWESGVKDCVVLHSYFTSDYYQLYSTQLSTDTGVEHVTFFIYNKIVDEPEEHVQIHTIDGSSGVVNPVMEPIYDEPTTTTSVPL

SEQ ID NO: 16990 - protein, 275 aa, Artificial Sequence
  SARS-CoV-2__MT039890.1__ORF3a protein
MDLFMRIFTIGTVTLKQGEIKDATPSDFVRATATIPIQASLPFGWLIVGVALLAVFQSASKIITLKKRWQLALSKGVHFVCNLLLLFVTVYSHLLLVAAGLEAPFLYLYALVYFLQSINFVRIIMRLLLCWKCRSKNPLLYDANYFLCWHTNCYDYCIPYNSVTSSIVITSGDGTTSPISEHDYQIGGYTEKWESGVKDCVVLHSYFTSDYYQLYSTQLSTDTGVEHVTFFIYNKIVDEPEEHVQIHTIDVSSGVVNPVMEPIYDEPTTTTSVPL

SEQ ID NO: 16991 - protein, 112 aa, Artificial Sequence
  MERS-CoV/MERS-CoV-Jeddah-human-1__KF958702.1__ORF8b protein
MPIPPLRKMLGIGGDRTEKLIPGMELSNWLPGGTSTTLELDPKQHSHSGLLRMASFGSMKMAPLMLLQLLGRGTLTMIQLLLHNSLPVLSFLKTSTLRGLEAIVNHLQEPLA

SEQ ID NO: 16992 - protein, 112 aa, Artificial Sequence
  MERS-CoV/Al-Hasa_4_2013__KF186564.1__ORF8b protein
MPIPPLRKMLGIGGDRTEKLIPGMELSNWLPGGTSTTLELDPKQHSHSGLLRMASFGSMKMAPLMLLQLLGRGTLTMIQLLLHNSRPVLSFLKTSTLRGLEAIVNHLQEPLA

SEQ ID NO: 16993 - protein, 112 aa, Artificial Sequence; identical to SEQ ID NO: 16992
  MERS-CoV/Riyadh_14_2013__KJ156934.1__ORF8b protein

SEQ ID NO: 16994 - protein, 39 aa, Artificial Sequence
  SARS-CoV/Tor2__NC_004718.3__ORF8a protein
MKLLIVLTCISLCSCICTVVQRCASNKPHVLEDPCKVQH

SEQ ID NO: 16995 - protein, 84 aa, Artificial Sequence
  SARS-CoV/Tor2__NC_004718.3__ORF8b protein
MCLKILVRYNTRGNTYSTAWLCALGKVLPFHRWHTMVQTCTPNVTINCQDPAGGALIARCWYLHEGHQTAAFRDVLVVLNKRTN

SEQ ID NO: 16996 - protein, 121 aa, Artificial Sequence
  Bat SARS-like CoV/WIV1__KF367457.1__ORF8 protein
MKLLIVLGLLTSVYCMHKECSIQECCENQPFQLEDPCPIHYYSDWFVKIGPRKSARLVQLCAGEYGHRVPIHYEMFGNYTISCEPLEINCQNPPVGSLIVRCSYDVDFMEYHDVRVVLDFI

SEQ ID NO: 16997 - protein, 121 aa, Artificial Sequence
  SARS-CoV-2/Wuhan-Hu-1__NC_045512.2/MN908947.2/EPI_ISL_402128__ORF 8 protein (ORF8)
MKFLVFLGIITTVAAFHQECSLQSCTQHQPYVVDDPCPIHFYSKWYIRVGARKSAPLIELCVDEAGSKSPIQYIDIGNYTVSCLPFTINCQEPKLGSLVVRCSFYEDFLEYHDVRVVLDFI

SEQ ID NO: 16998 - protein, 121 aa, Artificial Sequence
  SARS-CoV-2__MT919788.1__ORF8 protein
MKFLVFLGIITTVAAFHQECSLQSCTQHQPYVVDDPCPIHFYSKWYIRVGARKSAPLIELCVDEAGFKSPIQYIDIGNYTVSCLPFTINCQEPKLGSLVVRCSFYEDFLEYHDVRVVLDFI

SEQ ID NO: 16999 - protein, 121 aa, Artificial Sequence
  SARS-CoV-2__MT919994.1__ORF8 protein
MKFLVFLGIITTVAAFHQECSLQSCTQHQPYVVDDPCPIHFYSKWYIRVGARKSAPLIELCVDEAGSKSPIQYIDIGNYTVSCSPFTINCQEPKLGSLVVRCSFYEDFLEYHDVRVVLDFI

SEQ ID NO: 17000 - protein, 121 aa, Artificial Sequence
  SARS-CoV-2__MT919999.1__ORF8 protein
MKFLVFLGIITTVAAFHQECSLQSCTQHQPYVVDDPCPIHFYSKWYIRVGARKSAPLIELCLDEAGSKSPIQYIDIGNYTVSCSPFTINCQEPKLGSLVVRCSFYEDFLEYHDVRVVLDFI

SEQ ID NO: 17001 - protein, 121 aa, Artificial Sequence
  SARS-CoV-2__MT920037.1__ORF8 protein
MKFLVFLGIITTVAAFHQECSLQLCTQHQPYVVDDPCPIHFYSKWYIRVGARKSAPLIELCVDEAGSKLPIQYIDIGNYTVSCLPFTINCQEPKLGSLVVRCSFYEDFLEYHDVRVVLDFI

SEQ ID NO: 17002 - protein, 121 aa, Artificial Sequence
  SARS-CoV-2__MT921009.1__ORF8 protein
MKFLVFLGIITTVAAFHQECSLQLCTQHQPYVVDDPCPIHFYSKWYIRVGARKSAPLIELCVDEAGSKSPIQYIDIGNYTVSCLPFTINCQEPKLGSLVVRCSFYEDFLEYHDVRVVLDFI

SEQ ID NO: 17003 - protein, 121 aa, Artificial Sequence
  SARS-CoV-2__MT913071.1__ORF8 protein
MKFLVFLGIITTVAAFHQECSLQSCTQHQPYVVDDPCPIHFYSKWYIRVGARKSAPLIELCVDESGSKSPIQYIDIGNYTVSCLPFTINCQEPKLGSLVVRCSFYEDFLEYHDVRVVLDFI

SEQ ID NO: 17004 - protein, 121 aa, Artificial Sequence
  SARS-CoV-2__MT913109.1__ORF8 protein
MKFLVFLGIITTVAAFHQECSLQSCTQHQPYVVDDSCPIHFYSKWYIRVGARKSAPLIELCVDEAGSKSPIQYIDIGNYTVSCLPFTINCQEPKLGSLVVRCSFYEDFLEYHDVRVVLDFI

SEQ ID NO: 17005 - protein, 121 aa, Artificial Sequence
  SARS-CoV-2__MT911807.1__ORF8 protein
MKFLVFLGIITTVAAFHQECSLQSCTQHQPYVVDDPCPIHFYSKWYIRVGARKSAPLIELCVDEAGSKSPIQYIDIGNYTVSCLPFTINCQEPKLGSLVVRCSFYEDFLGYHDVRVVLDFI

SEQ ID NO: 17006 - protein, 121 aa, Artificial Sequence
  SARS-CoV-2__MT893659.1__ORF8 protein
MKFLVFLGIITTVAAFHQECSLQSCTQHQPYVVDDPCPIHFYSKWYIRVGARKSAPLIELCVDEVGSKSPIQYIDIGNYTVSCLPFTINCQEPKLGSLVVRCSFYEDFLEYHDVRVVLDFI

SEQ ID NO: 17007 - protein, 121 aa, Artificial Sequence
  SARS-CoV-2__MT893685.1__ORF8 protein
MKFLVFLGIITTVAAFHQECSLQSCTQHQPYVVDDPCPIHFYSKWHIRVGARKSAPLIELCVDEAGSKSPIQYIDIGNYTVSCLPFTINCQEPKLGSLVVRCSFYEDFLEYHDVRVVLDFI

SEQ ID NO: 17008 - protein, 121 aa, Artificial Sequence
  SARS-CoV-2__MT890281.1__ORF8 protein
MKFLVFLGIITTVAAFHQECSLQSCTQHQPYLVDDPCPIHFYSKWYIRVGARKSAPLIELCVDEAGSKSPIQYIDIGNYTVSCLPFTINCQEPKLGSLVVRCSFYEDFLEYHDVRVVLDFI

SEQ ID NO: 17009 - protein, 121 aa, Artificial Sequence
  SARS-CoV-2__MT890301.1__ORF8 protein
MKFLVFLGIITTVAAFHQECSLQSCTQHQPYVVDDPCPIHFYSKWYIRVGARKSAPLIELCVDEPGSKSPIQYIDIGNYTVSCLPFTINCQEPKLGSLVVRCSFYEDFLEYHDVRVVLDFI

SEQ ID NO: 17010 - protein, 121 aa, Artificial Sequence
  SARS-CoV-2__MT883499.1__ORF8 protein
MKFLVFLGIITTVAAFHQECSLQSCTQHQPYVVDDPCPIHFYSKWYIRVGARKSVPLIELCVDEAGSKSPIQYIDIGNYTVSCLPFTINCQEPKLGSLVVRCSFYEDFLEYHDVRVVLDFI

SEQ ID NO: 17011 - protein, 121 aa, Artificial Sequence
  SARS-CoV-2__MT883503.1__ORF8 protein
MKFLVFLGIITTVAAFHQECSLQSCTQHQPYVVDDPCPIHFYSKWYIRVGARKSAPLIELCLDEAGSKSPIQYIDIGNYTVSCLPFTINCQEPKLGSLVVRCSFYEDFLEYHDVRVVLDFI

SEQ ID NO: 17012 - protein, 125 aa, Artificial Sequence
  SARS-CoV-2__MT886367.1__ORF8 protein
MKFLVFLGIITTVAAFHQECSLQSCTQHQPYVVDDPCPIHFYSKWYIRVGARKSAPLIELCVDEAGSKSPIQYIDIGNYTVSCSPFTINCQEPKLGSLVVRCSFYEDFLEYHDVRVVLDFSKRTN

SEQ ID NO: 17013 - protein, 121 aa, Artificial Sequence
  SARS-CoV-2__MT873075.1__ORF8 protein
MKFLVFLGIITTVAAFHQECSLQSFTQHQPYVVDDPCPIHFYSKWYIRVGARKSAPLIELCVDEAGSKSPIQYIDIGNYTVSCLPFTINCQEPKLGSLVVRCSFYEDFLEYHDVRVVLDFI

SEQ ID NO: 17014 - protein, 121 aa, Artificial Sequence
  SARS-CoV-2__MT873148.1__ORF8 protein
MKFLVFLGIITTVAAFHQECILQSCTQHQPYVVDDPCPIHFYSKWYIRVGARKSAPLIELCVDEAGSKSPIQYIDIGNYTVSCLPFTINCQEPKLGSLVVRCSFYEDFLEYHDVRVVLDFI

SEQ ID NO: 17015 - protein, 121 aa, Artificial Sequence
  SARS-CoV-2__MT873152.1__ORF8 protein
MKFLVFLGIITTVAAFHQECSLQSCIQHQPYVVDDPCPIHFYSKWYIRVGARKSAPLIELCVDEAGSKSPIQYIDIGNYTVSCLPFTINCQEPKLGSLVVRCSFYEDFLEYHDVRVVLDFI

SEQ ID NO: 17016 - protein, 121 aa, Artificial Sequence
  SARS-CoV-2__MT873255.1__ORF8 protein
MKFLVFLGIITTVAAFHQECSLQSCTQHQPYVVDDPCLIHFYSKWYIRVGARKSAPLIELCVDEAGSKSPIQYIDIGNYTVSCLPFTINCQEPKLGSLVVRCSFYEDFLEYHDVRVVLDFI

SEQ ID NO: 17017 - protein, 121 aa, Artificial Sequence
  SARS-CoV-2__MT873439.1__ORF8 protein
MKFLVFLGIITTVAAFHQECSLQSCTQHQPYVVDDPCPIHFYSKWYIRVGARKSAPLIELCVDEAGSKSPIQYIDIGNYTVSCLPFTINCQEPKLGSLVVRCSFYEDFLEYHDVRVVLDLI

SEQ ID NO: 17018 - protein, 121 aa, Artificial Sequence
  SARS-CoV-2__MT873503.1__ORF8 protein
MKFLVFLGIITTVTAFHQECSLQSCTQHQPYVVDDPCPIHFYSKWYIRVGARKSAPLIELCVDEAGSKSPIQYIDIGNYTVSCLPFTINCQEPKLGSLVVRCSFYEDFLEYHDVRVVLDFI

SEQ ID NO: 17019 - protein, 121 aa, Artificial Sequence
  SARS-CoV-2__MT873509.1__ORF8 protein
MKFLVFLGIITTVAAFHQECSLQLCTQHQPYVVDDSCPIHFYSKWYIRVGARKSAPLIELCVDEAGSKSPIQYIDIGNYTVSCLPFTINCQEPKLGSLVVRCSFYEDFLEYHDVRVVLDFI

SEQ ID NO: 17020 - protein, 121 aa, Artificial Sequence
  SARS-CoV-2__MT875354.1__ORF8 protein
MKFLVFLGIITTVAAFHQECSLQSCTQHQPYVVDDPCPIHFYSKWYIRVGARKSAPLIELCVDEAGSKSPIQYIDIGNYTVSCLPFTIYCQEPKLGSLVVRCSFYEDFLEYHDVRVVLDFI

SEQ ID NO: 17021 - protein, 121 aa, Artificial Sequence
  SARS-CoV-2__MT876599.1__ORF8 protein
MKFLVFLGIITTVAAFHQECSLQSCTQHQPYVVDDPCPVHFYSKWYIRVGARKSAPLIELCVDEAGSKSPIQYIDIGNYTVSCLPFTINCQEPKLGSLVVRCSFYEDFLEYHDVRVVLDFI

SEQ ID NO: 17022 - protein, 121 aa, Artificial Sequence
  SARS-CoV-2__MT872501.1__ORF8 protein
MKFLVFLGIITTVAAFYQECSLQSCTQHQPYVVDDPCPIHFYSKWYIRVGARKSAPLIELCVDEAGSKSPIQYIDIGNYTVSCSPFTINCQEPKLGSLVVRCSFYEDFLEYHDVRVVLDFI

SEQ ID NO: 17023 - protein, 121 aa, Artificial Sequence
  SARS-CoV-2__MT846006.1__ORF8 protein
MKFLVFLGIITTVAAFHQECSLQSCTQHQPYVVDDPCPIHFYSKWYIRVGARKSAPLIELCVDEAGSKSPIQYIDIGNYTVSCLPFTINCQEPKFGSLVVRCSFYEDFLEYHDVRVVLDFI

SEQ ID NO: 17024 - protein, 121 aa, Artificial Sequence
  SARS-CoV-2__MT846007.1__ORF8 protein
MKFLVFLGIITTVAAFHQECSLQSCTQHQPYVVDDPCPIHFYSKWYIRVGARKSAPLIELCVDEAGSKSPIQYIDIGNYTVSCLPFTINCQEPKLGSLVVRCSFYEDFLDYHDVRVVLDFI

SEQ ID NO: 17025 - protein, 121 aa, Artificial Sequence
  SARS-CoV-2__MT846420.1__ORF8 protein
MKFLVFLGIITTVAAFHQECSLQSCTQHQPYVVDDPCPIHFYSKWYIRVGARKSAPLIELCVGEAGSKSPIQYIDIGNYTVSCSPFTINCQEPKLGSLVVRCSFYEDFLEYHDVRVVLDFI

SEQ ID NO: 17026 - protein, 121 aa, Artificial Sequence
  SARS-CoV-2__MT846452.1__ORF8 protein
MKFLVFLGIITNVAAFHQECSLQSCTQHQPYVVDDPCPIHFYSKWYIRVGARKSAPLIELCVDEAGSKSPIQYIDIGNYTVSCLPFTINCQEPKLGSLVVRCSFYEDFLEYHDVRVVLDFI

SEQ ID NO: 17027 - protein, 121 aa, Artificial Sequence
  SARS-CoV-2__MT846478.1__ORF8 protein
MKFLVFLRIITTVAAFHQECSLQSCTQHQPYVVDYPCPIHFYSKWYIRVGARKSAPLIELCVDEAGSKSPIQYIDIGNYTVSCLPFTINCQEPKLGSLVVRCSFYEDFLEYHDVRVVLDFI

SEQ ID NO: 17028 - protein, 121 aa, Artificial Sequence
  SARS-CoV-2__MT846647.1__ORF8 protein
MKFLVFLGIITTVAAFHQECSLQSCTQHQPYVVDDPCPIHFYSKWYIRVGARKSAPLIESCVDEAGSKSPIQYIDIGNYTVSCLPFTINCQEPKLGSLVVRCSFYEDFLEYHDVRVVLDFI

SEQ ID NO: 17029 - protein, 121 aa, Artificial Sequence
  SARS-CoV-2__MT847226.1__ORF8 protein
MKFLVFLGIIITVAAFHQECSLQSCTQHQPYVVDDPCPIHFYSKWYIRVGARKSAPLIELCVDEAGSKSPIQYIDIGNYTVSCLPFTINCQEPKLGSLVVRCSFYEDFLEYHDVRVVLDFI

SEQ ID NO: 17030 - protein, 121 aa, Artificial Sequence
  SARS-CoV-2__MT843305.1__ORF8 protein
MKFLVFLGIITTVAAFHQECSLQSCTQHQPYVVNDPCPIHFYSKWYIRVGARKSAPLIELCVDEAGSKSPIQYIDIGNYTVSCLPFTINCQEPKLGSLVVRCSFYEDFLEYHDVRVVLDFI

SEQ ID NO: 17031 - protein, 121 aa, Artificial Sequence
  SARS-CoV-2__MT831123.1__ORF8 protein
MKFFVFLGIITTVAAFHQECSLQSCTQHQPYVVDDPCPIHFYSKWYIRVGARKSAPLIELCVNEAGSKSPIQYIDIGNYTVSCLPFTINCQEPKLGSLVVRCSFYEDFLEYHDVRVVLDFI

SEQ ID NO: 17032 - protein, 121 aa, Artificial Sequence
  SARS-CoV-2__MT831186.1__ORF8 protein
MKFLVFLGIITTVAAFHQECSLQSCTQHQPYVVDDPCPIHFYSKWYIRVGAIKSAPLIELCVDEAGSKSPIQYIDIGNYTVSCLPFTINCQEPKLGSLVVRCSFYEDFLEYHDVRVVLDFI

SEQ ID NO: 17033 - protein, 121 aa, Artificial Sequence
  SARS-CoV-2__MT831227.1__ORF8 protein
MKFLVFLGIITTVAAFHQECSLQSCTQHQPYVVDDPSPIHFYSKWYIRVGARKSAPLIELCVDEAGSKSPIQYIDIGNYTVSCLPFTINCQEPKLGSLVVRCSFYEDFLEYHDVRVVLDFI

SEQ ID NO: 17034 - protein, 121 aa, Artificial Sequence
  SARS-CoV-2__MT831230.1__ORF8 protein
MKFLVFLGIITTVAAFHQECSLQSCTQHQPYVVDDPCPIHFYSKWYIRVGARKSAPLIELCVNEAGSKSPIQYIDIGNYTVSCLPFTINCQEPKLGSLVVRCSFYEDFLEYHDVRVVLDFI

SEQ ID NO: 17035 - protein, 121 aa, Artificial Sequence
  SARS-CoV-2__MT831282.1__ORF8 protein
MKFLVFLGIITTVAAFHQDCSLQSCTQHQPYVVDDPCPIHFYSKWYIRVGARKSAPLIELCVDEAGSKSPIQYIDIGNYTVSCSPFTINCQEPKLGSLVVRCSFYEDFLEYHDVRVVLDFI

SEQ ID NO: 17036 - protein, 121 aa, Artificial Sequence
  SARS-CoV-2__MT831623.1__ORF8 protein
MKFLVFLGIITTVAAFHQECSLQSCTQHQPYVVDDPCPIHFYSKWYIRVGVRKSAPLIELCVDEAGSKSPIQYIDIGNYTVSCLPFTINCQEPKLGSLVVRCSFYEDFLEYHDVRVVLDFI

SEQ ID NO: 17037 - protein, 121 aa, Artificial Sequence
  SARS-CoV-2__MT831735.1__ORF8 protein
MKFLVFLGIITTVAAFHQECSLQSCTQHQPYVVDDPCPIHFYSKCYIRVGARKSAPLIELCVDEAGSKSPIQYIDIGNYTVSCLPFTINCQEPKLGSLVVRCSFYEDFLEYHDVRVVLDFI

SEQ ID NO: 17038 - protein, 121 aa, Artificial Sequence
  SARS-CoV-2__MT831739.1__ORF8 protein
MKFLVFLGIITTVAAFHQECSLQSCTQHQPYVVDDPCPIHFYSKWYIRVGARKSAPLIELCVDEAGSKSPIQYIDIGNYTVSCLPFTINCQEPKLGNLVVRCSFYEDFLEYHDVRVVLDFI

SEQ ID NO: 17039 - protein, 121 aa, Artificial Sequence
  SARS-CoV-2__MT831821.1__ORF8 protein
MKFLVFLGIITTVAAFHQECSLQSCTQHQPYVVDDPFPIHFYSKWYIRVGARKSAPLIELCVDEAGSKSPIQYIDIGNYTVSCLPFTINCQEPKLGSLVVRCSFYEDFLEYHDVRVVLDFI

SEQ ID NO: 17040 - protein, 121 aa, Artificial Sequence
  SARS-CoV-2__MT833958.1__ORF8 protein
MKFLVFLGIITTVAAFHQECSLQSCTQHQPYVVDDPCPIHFYSKWYIRVGARKSAPLIELCVDEAGSKSPIHYIDIGNYTVSCLPFTINCQEPKLGSLVVRCSFYEDFLEYHDVRVVLDFI

SEQ ID NO: 17041 - protein, 121 aa, Artificial Sequence
  SARS-CoV-2__MT834344.1__ORF8 protein
MKFLVFLGIITTVAAFHQECSLQSCTQHQPYVVDDPCPIHFYSKWYIRVGARKSAPLIELCVDEAGSKSPIQYIDIGNYTVSCLPFTINCQELKLGSLVVRCSFYEDFLEYHDVRVVLDFI

SEQ ID NO: 17042 - protein, 121 aa, Artificial Sequence
  SARS-CoV-2__MT834622.1__ORF8 protein
MKFLVFLRIITTVAAFHQECSLQSCTQHQPYVVDDPCPIHFYSKWYIRVGARKSAPLIELCVDEAGSKSPIQYIDIGNYTVSCLPFTINCQEPKLGSLVVRCSFYEDFLEYHDVRVVLDFI

SEQ ID NO: 17043 - protein, 121 aa, Artificial Sequence
  SARS-CoV-2__MT834647.1__ORF8 protein
MKFLVFLGIITTVAAFHQECSLQSCTQHQPYVVDDPCPIHFYSKWYIRVGARKSAPLIELCVDEAGSKSPIQYIDIGNYTVSCSPFTINCQEPKLGSLVVRCSSYEDFLEYHDVRVVLDFI

SEQ ID NO: 17044 - protein, 121 aa, Artificial Sequence
  SARS-CoV-2__MT827821.1__ORF8 protein
MKFLFFLGIITTVAAFHQECSLQSCTQHQPYVVDDPCPIHFYSKWYIRVGARKSAPLIELCVDEAGSKSPIQYIDIGNYTVSCSPFTINCQEPKLGSLVVRCSFYEDFLEYHDVRVVLDFI

SEQ ID NO: 17045 - protein, 121 aa, Artificial Sequence
  SARS-CoV-2__MT825091.1__ORF8 protein
MKFLVFLGIITTVAAFHQECSLQSCTQHQPYVVDDPCPIHFYSKWYIRVGARKSAPLIELCMDEAGSKSPIQYIDIGNYTVSCLPFTINCQEPKLGSLVVRCSFYEDFLEYHDVRVVLDFI

SEQ ID NO: 17046 - protein, 121 aa, Artificial Sequence
  SARS-CoV-2__MT821566.1__ORF8 protein
MKFLVFFGIITTVAAFHQECSLQSCTQHQPYVVDDPCPIHFYSKWYIRVGARKSAPLIELCVDEAGSKSPIQYIDIGNYTVSCLPFTINCQEPKLGSLVVRCSFYEDFLEYHDVRVVLDFI

SEQ ID NO: 17047 - protein, 121 aa, Artificial Sequence
  SARS-CoV-2__MT821663.1__ORF8 protein
MKFLVFLGIIITVAAFHQECSLQSCTQHQPYVVDDPCPIHFYSKWYIRVGARKSAPLIELCVDEAGSKSPIQYIDIGNYTVSCSPFTINCQEPKLGSLVVRCSFYEDFLEYHDVRVVLDFI

SEQ ID NO: 17048 - protein, 121 aa, Artificial Sequence
  SARS-CoV-2__MT821773.1__ORF8 protein
MKFLVFLGIITTVAAFHQECSLQSCTQHQPYVVDDPCPIHFYSKWYIRVGARKSAPLIELCVDEAGSKSPIQYIDIGNYTVSCSPFTINCQEPKLGSLVVRCSFYEDFLQYHDVRVVLDFI

SEQ ID NO: 17049 - protein, 121 aa, Artificial Sequence
  SARS-CoV-2__MT810566.1__ORF8 protein
MKFLVFLGIITTVAAFHQECSLQSCTQHQPYVVDDPCPIHFYSKWYIRVGARKSAPLIELCVDEAGSKSPIQYIDIGNYTASCLPFTINCQEPKLGSLVVRCSFYEDFLEYHDVRVVLDFI

SEQ ID NO: 17050 - protein, 121 aa, Artificial Sequence
  SARS-CoV-2__MT810601.1__ORF8 protein
MKFLVFLGIITTVAAFHQECSLQSCTQHQPYVVDDPCPIHFYSKWYIRVGARKSAPLIELCVDEAGSKSPIQYIDIGNYTVSCLPFTINCQEPKLCSLVVRCSFYEDFLEYHDVRVVLDFI

SEQ ID NO: 17051 - protein, 121 aa, Artificial Sequence
  SARS-CoV-2__MT810624.1__ORF8 protein
MKFFVFLGIITTVAAFHQECSLQSCTQHQPYVVDDPCPIHFYSKWYIRVGARKSAPLIELCVDEAGSKSPIQYIDIGNYTVSCLPFTINCQEPKLGSLVVRCSFYEDFLEYHDVRVVLDFI

SEQ ID NO: 17052 - protein, 121 aa, Artificial Sequence
  SARS-CoV-2__MT811022.1__ORF8 protein
MKFLVFLGIITTVAAFHQECSLQSCTQHQPYVVDDPCPIHFYSKWYIRVGARKSAPLIELCVDEAGSKSPIQHIDIGNYTVSCLPFTINCQEPKLGSLVVRCSFYEDFLEYHDVRVVLDFI

SEQ ID NO: 17053 - protein, 121 aa, Artificial Sequence
  SARS-CoV-2__MT811486.1__ORF8 protein
MKFLVFLGIITTVAAFHQECSLQSCTKHQPYVVDDPCPIHFYSKWYIRVGARKSAPLIELCVDEAGSKSPIQYIDIGNYTVSCLPFTINCQEPKLGSLVVRCSFYEDFLEYHDVRVVLDFI

SEQ ID NO: 17054 - protein, 121 aa, Artificial Sequence
  SARS-CoV-2__MT811528.1__ORF8 protein
MKILVFLGIITTVAAFHQECSLQSCTQHQPYVVDDPCPIHFYSKWYIRVGARKSAPLIELCVDEAGSKSPIQYIDIGNYTVSCLPFTINCQEPKLGSLVVRCSFYEDFLEYHDVRVVLDFI

SEQ ID NO: 17055 - protein, 121 aa, Artificial Sequence
  SARS-CoV-2__MT811533.1__ORF8 protein
MKFLVFLGIITTVAAFHQECSLQSCTQHQPYVVDDPCPIHFYSKWYIRVGARKSAPLIELCVDEAGSKSPIQYIDIGNYTVSCLPFTINCQEPKLGSLVVRCSFYEDFLEYHDVRVVLDVL

SEQ ID NO: 17056 - protein, 121 aa, Artificial Sequence
  SARS-CoV-2__MT811534.1__ORF8 protein
MKFLVFLGIITTVAAFHQECSLQSCTQHQPYVVDDPCPIHFYSKWYIRVGARKSAPLIELCVDEAGSKSPIQYIDIGNYTVSCLPFTINCQEPKLGSLVVRCSFYEDFLECHDVRVVLDFI

SEQ ID NO: 17057 - protein, 121 aa, Artificial Sequence
  SARS-CoV-2__MT806884.1__ORF8 protein
MKFLVFLGIITTVAAFHQECSLQLCTQHQPYVVDDPCPIHFYSKWYIRVGARKSAPLIELCVDEAGFKSPIQYIDIGNYTVSCLPFTINCQEPKLGSLVVRCSFYEDFLEYHDVRVVLDFI

SEQ ID NO: 17058 - protein, 121 aa, Artificial Sequence
  SARS-CoV-2__MT800031.1__ORF8 protein
MKFLVFLGIITTVSAFHQECSLQSCTQHQPYVVDDPCPIHFYSKWYIRVGARKSAPLIELCVDEAGSKSPIQYIDIGNYTVSCLPFTINCQEPKLGSLVVRCSFYEDFLEYHDVRVVLDFI

SEQ ID NO: 17059 - protein, 121 aa, Artificial Sequence
  SARS-CoV-2__MT795889.1__ORF8 protein
MKFLVFLGIITTVAAFHQECSLQSCTQHQPYVFDDPCPIHFYSKWYIRVGARKSAPLIELCVDEAGSKSPIQYIDIGNYTVSCLPFTINCQEPKLGSLVVRCSFYEDFLEYHDVRVVLDFI

SEQ ID NO: 17060 - protein, 121 aa, Artificial Sequence
  SARS-CoV-2__MT791870.1__ORF8 protein
MKFLVFLGIITTVAAFHQECSLQSCTQHQPYVVDDPCPIHFYSKLYIRVGARKSAPLIELCVDEAGSKSPIQYIDIGNYTVSCLPFTINCQEPKLGSLVVRCSFYEDFLEYHDVRVVLDFI

SEQ ID NO: 17061 - protein, 121 aa, Artificial Sequence
  SARS-CoV-2__MT786817.1__ORF8 protein
MKFLVFLGIITTVAAFHQECSLQSCTQHQPYVVDDPCPIHFYSKWYIRVGAKKSAPLIELCVDEAGSKSPIQYIDIGNYTVSCLPFTINCQEPKLGSLVVRCSFYEDFLEYHDVRVVLDFI

SEQ ID NO: 17062 - protein, 112 aa, Artificial Sequence
  SARS-CoV-2__MT782382.1__ORF8 protein
MKFLVFLGIITTVAAFHQECSLQSCTQHQPYVVDDPCIRVGARKSAPLIELCVDEAGSKSPIQYIDIGNYTVSCLPFTINCQEPKLGSLVVRCSFYEDFLEYHDVRVVLDFI

SEQ ID NO: 17063 - protein, 121 aa, Artificial Sequence
  SARS-CoV-2__MT777677.1__ORF8 protein
MKFLVFLGIITTVAAFHQECSLQSCTQHQPYVVDYPCPIHFYSKWYIRVGARKSAPLIELCVDEAGSKSPIQYIDIGNYTVSCLPFTINCQEPKLGSLVVRCSFYEDFLEYHDVRVVLDFI

SEQ ID NO: 17064 - protein, 121 aa, Artificial Sequence
  SARS-CoV-2__MT757030.1__ORF8 protein
MKFLVFLGIITTVAALHQECSLQSCTQHQPYVVDDPCPIHFYSKWYIRVGARKSAPLIELCLDEAGSKSPIQYIDIGNYTVSCSPFTINCQEPKLGSLVVRCSFYEDFLEYHDVRVVLDFI

SEQ ID NO: 17065 - protein, 121 aa, Artificial Sequence
  SARS-CoV-2__MT757105.1__ORF8 protein
MKFLVFLGIITTVAAFHQECSLQLCTQHQPYVVDDPCPIHFYSKWYIRVGARKSAPLIELCLDEAGSKSPIQYIDIGNYTVSCLPFTINCQEPKLGSLVVRCSFYEDFLEYHDVRVVLDFI

SEQ ID NO: 17066 - protein, 121 aa, Artificial Sequence
  SARS-CoV-2__MT757116.1__ORF8 protein
MKFLVFLGIITTVAAFHQECSLQLCTQHQPYVVDDPCSIHFYSKWYIRVGARKSAPLIELCVDEAGSKSPIQYIDIGNYTVSCLPFTINCQEPKLGSLVVRCSFYEDFLEYHDVRVVLDFI

SEQ ID NO: 17067 - protein, 121 aa, Artificial Sequence
  SARS-CoV-2__MT750459.1__ORF8 protein
MKFLVFLGIITTVAAFHQECSLQSCTQHQPYVVDDPCPIHFYSKWYIRVGARKSAPLIELCVDESGSKSPIQYIDIGNYTVSCSPFTINCQEPKLGSLVVRCSFYEDFLEYHDVRVVLDFI

SEQ ID NO: 17068 - protein, 121 aa, Artificial Sequence
  SARS-CoV-2__MT750487.1__ORF8 protein
MKFLVFLGIITTVAAFHQECSLQSCTQHQPYVVDDPCPTHFYSKWYIRVGARKSAPLIELCVDEAGSKSPIQYIDIGNYTVSCLPFTINCQEPKLGSLVVRCSFYEDFLEYHDVRVVLDFI

SEQ ID NO: 17069 - protein, 121 aa, Artificial Sequence
  SARS-CoV-2__MT740384.1__ORF8 protein
MKFLVFLGIITTVAAFHQECSLQSCTQHQPYVVDDPCRIHFYSKWYIRVGARKSAPLIELCVDEAGSKSPIQYIDIGNYTVSCLPFTINCQEPKLGSLVVRCSFYEDFLEYHDVRVVLDFI

SEQ ID NO: 17070 - protein, 121 aa, Artificial Sequence
  SARS-CoV-2__MT734055.1__ORF8 protein
MKFLVFLGIITTVAAFHQECSLQSCTQHQPYVVDDPCPIHFYSKWYIRVGARKSAPLIELCVDDAGSKSPIQYIDIGNYTVSCLPFTINCQEPKLGSLVVRCSFYEDFLEYHDVRVVLDFI

SEQ ID NO: 17071 - protein, 121 aa, Artificial Sequence
  SARS-CoV-2__MT704111.1__ORF8 protein
MKFLVFLGIITTVAAFHQECSLQSCTQHQPHVVDDPCPIHFYSKWYIRVGARKSAPLIELCVDEAGSKSPIQYIDIGNYTVSCLPFTINCQEPKLGSLVVRCSFYEDFLEYHDVRVVLDFI

SEQ ID NO: 17072 - protein, 121 aa, Artificial Sequence
  SARS-CoV-2__MT683389.1__ORF8 protein
MKFLVFLGIITTVAAFHQECSLQSCTQHQPYVVGDPCPIHFYSKWYIRVGARKSAPLIELCVDEAGSKSPIQYIDIGNYTVSCLPFTINCQEPKLGSLVVRCSFYEDFLEYHDVRVVLDFI

SEQ ID NO: 17073 - protein, 121 aa, Artificial Sequence
  SARS-CoV-2__MT679161.1__ORF8 protein
MKFLVFLGIITTVAAFHQECSLQSCTQHQPYVVDDPCPIHFYSKWYIRVGARKSAPLIELCVDEAGSKSPILYIDIGNYTVSCLPFTINCQEPKLGSLVVRCSFYEDFLEYHDVRVVLDFI

SEQ ID NO: 17074 - protein, 121 aa, Artificial Sequence
  SARS-CoV-2__MT642081.1__ORF8 protein
MKFLVFLGIITTVAAFHQECSLQSCTQHQPYVVDDPCPIHFYSKWYIRVGARKSAPLIELCVDEAGSKSPIQYIDICNYTVSCLPFTINCQEPKLGSLVVRCSFYEDFLEYHDVRVVLDFI

SEQ ID NO: 17075 - protein, 121 aa, Artificial Sequence
  SARS-CoV-2__MT642109.1__ORF8 protein
MKFLVFLGIITTVAASHQECSLQSCTQHQPYVVDDPCPIHFYSKWYIRVGARKSAPLIELCVDEAGSKSPIQYIDIGNYTVSCLPFTINCQEPKLGSLVVRCSFYEDFLEYHDVRVVLDFI

SEQ ID NO: 17076 - protein, 121 aa, Artificial Sequence
  SARS-CoV-2__MT642177.1__ORF8 protein
MKFLVFLGIITTVAAFHQECSLQSCTQHQPYVVDDPCPIHFYSKWYIRVGARKSAPLIELCVDEAGSKSPIHYIDIGNYTVSCSPFTINCQEPKLGSLVVRCSFYEDFLEYHDVRVVLDFI

SEQ ID NO: 17077 - protein, 121 aa, Artificial Sequence
  SARS-CoV-2__MT630423.1__ORF8 protein
MKFLVFLGIITTVAAFHQECSLQSCTQHQPYVVDDPCPIHFYSKLYIRVGARKSAPLIELCVDEAGSKSPIQYIDIGNYTVSCSPFTINCQEPKLGSLVVRCSFYEDFLEYHDVRVVLDFI

SEQ ID NO: 17078 - protein, 121 aa, Artificial Sequence
  SARS-CoV-2__MT632817.1__ORF8 protein
MKFLVFLGIITTVAAFHQECSLQSCTQHQPYVVDDPCPIHFYSKWYIRVGARKSAPLIELCVDEAGFKSPIQYIDIGNYTVSCSPFTINCQEPKLGSLVVRCSFYEDFLEYHDVRVVLDFI

SEQ ID NO: 17079 - protein, 121 aa, Artificial Sequence
  SARS-CoV-2__MT632919.1__ORF8 protein
MKFLVFLGIIATVAAFHQECSLQSCTQHQPYVVDDPCPIHFYSKWYIRVGARKSAPLIELCVDEAGSKSPIQYIDIGNYTVSCSPFTINCQEPKLGSLVVRCSFYEDFLEYHDVRVVLDFI

SEQ ID NO: 17080 - protein, 121 aa, Artificial Sequence
  SARS-CoV-2__MT607245.1__ORF8 protein
MKFLVFLGIITTVAAFHQECSLQSCTQHQPYVVDDPCPIHFYSKWYIRVGARKSAPLIELCVDEACSKSPIQYIDIGNYTVSCLPFTINCQEPKLGSLVVRCSFYEDFLEYHDVRVVLDFI

SEQ ID NO: 17081 - protein, 121 aa, Artificial Sequence
  SARS-CoV-2__MT609558.1__ORF8 protein
MKFLVFLGIITTVAAFHQECSLQSCTQHQPYVVDDLCPIHFYSKWYIRVGARKSAPLIELCVDEAGSKSPIQYIDIGNYTVSCLPFTINCQEPKLGSLVVRCSFYEDFLEYHDVRVVLDFI

SEQ ID NO: 17082 - protein, 125 aa, Artificial Sequence
  SARS-CoV-2__MT568638.1__ORF8 protein
MKFLVFLGIITTVAAFHQECSLQSCTQHQPYVVDDPCPIHFYSKWYIRVGARKSAPLIELCVDEAGSKSPIQYIDIGNYTVSCSPFTINCQEPKLGSLVVRCSFYEDFLEYHDVRVVLEFSKRTN

SEQ ID NO: 17083 - protein, 121 aa, Artificial Sequence
  SARS-CoV-2__MT520189.1__ORF8 protein
MKFLVFLGIITTVAAFHQECSLQSCTQHQPYVVDDSCPIHFYSKWYIRVGARKSAPLIELCLDEAGSKSPIQYIDIGNYTVSCSPFTINCQEPKLGSLVVRCSFYEDFLEYHDVRVVLDFI

SEQ ID NO: 17084 - protein, 121 aa, Artificial Sequence
  SARS-CoV-2__MT534313.1__ORF8 protein
MKFLVFLGIIKTVAAFHQECSLQSCTQHQPYVVDDPCPIHFYSKWYIRVGARKSAPLIELCVDEAGSKSPIQYIDIGNYTVSCLPFTINCQEPKLGSLVVRCSFYEDFLEYHDVRVVLDFI

SEQ ID NO: 17085 - protein, 121 aa, Artificial Sequence
  SARS-CoV-2__MT511079.1__ORF8 protein
MKFLVFLGIITTVAAFHQECSLQSCTQHQPYVVDDPCSIHFYSKWYIRVGARKSAPLIELCVDEAGSKSPIQYIDIGNYTVSCLPFTINCQEPKLGSLVVRCSFYEDFLEYHDVRVVLDFI

SEQ ID NO: 17086 - protein, 121 aa, Artificial Sequence
  SARS-CoV-2__MT509510.1__ORF8 protein
MKFLVFLEIITTVAAFHQECSLQSCTQHQPYVVDDPCPIHFYSKWYIRVGARKSAPLIELCVDEAGSKSPIQYIDIGNYTVSCLPFTINCQEPKLGSLVVRCSFYEDFLEYHDVRVVLDFI

SEQ ID NO: 17087 - protein, 121 aa, Artificial Sequence
  SARS-CoV-2__MT506707.1__ORF8 protein
MKFLVFLGIITTVAAFHQECSLQSCTQHQPYVVDDPCPIHFYSKWYIRVGSRKSAPLIELCVDEAGSKSPIQYIDIGNYTVSCLPFTINCQEPKLGSLVVRCSFYEDFLEYHDVRVVLDFI

SEQ ID NO: 17088 - protein, 121 aa, Artificial Sequence
  SARS-CoV-2__MT482119.1__ORF8 protein
MKFLVFLGIITTVAAFHQECSLQSCTQHQPYVVDDPCPIHFYSKWYIRVGARKSAPLIELCVDEAGSKSPIQYIDIGNYTVSCLPFTINCQEPKLGSLVVRCSFYENFLEYHDVRVVLDFI

SEQ ID NO: 17089 - protein, 121 aa, Artificial Sequence
  SARS-CoV-2__MT467253.1__ORF8 protein
MKFLVFLGIITTVAAFHQECSLQSCTQHQPYVVDDPCPIHFYSKWYIRVGARKSAPLIELCVDEAGSKSPIQYIDIGNYTVSCLPFTINCQEPKLGSLVVRCSFYEDFLEYHDVRVVLDFL

SEQ ID NO: 17090 - protein, 121 aa, Artificial Sequence
  SARS-CoV-2__MT470123.1__ORF8 protein
MKFLVFLGIITTVAAFHQECSLQSCTQHQPYVVDDPCPIHFYSKWYIRVGARKSAPLIELCVDEAGSKSPIQYIDIGNYTVSCLPFTINCQEPKLGSLVVRCSFYEDFLEYHDVRVVLDFF

SEQ ID NO: 17091 - protein, 121 aa, Artificial Sequence
  SARS-CoV-2__MT459881.1__ORF8 protein
MKFLVFLGIITTVAAFHQECSLQSCTQHQPYVVDDPCPIHFYSKWYIRVGARKSAPLIELCVDEAGSKSPIQYIDIGNYTVSCLPFTINCQEPKLGSLVVRCSFYGDFLEYHDVRVVLDFI

SEQ ID NO: 17092 - protein, 121 aa, Artificial Sequence
  SARS-CoV-2__MT461632.1__ORF8 protein
MKFLVFLGIITTVAAFHQECSLQLCTQHQPYVVDDPCPIHFYSKSYIRVGARKSAPLIELCVDEAGSKSPIQYIDIGNYTVSCLPFTINCQEPKLGSLVVRCSFYEDFLEYHDVRVVLDFI

SEQ ID NO: 17093 - protein, 121 aa, Artificial Sequence
  SARS-CoV-2__MT461664.1__ORF8 protein
MKFLVFLGIITTVAAFHQECSLQSCTQHQPYVVDDPCPIHFYSKWYIRVGARKSAPLIELCVDEAASKSPIQYIDIGNYTVSCLPFTINCQEPKLGSLVVRCSFYEDFLEYHDVRVVLDFI

SEQ ID NO: 17094 - protein, 121 aa, Artificial Sequence
  SARS-CoV-2__MT451177.1__ORF8 protein
MKFLVFLGIITTVAAFHQECSLQSCTQHQPYVVDDPCPIHFYSKWYIRVGARKSAPLIELCVDEAGSKSPIQYIDIGNYTVSCLPFTINCQEPKLGSLVVRCSFYEDFLEYHDFRVVLDFI

SEQ ID NO: 17095 - protein, 121 aa, Artificial Sequence
  SARS-CoV-2__MT451592.1__ORF8 protein
MKFLVFLVIITTVAAFHQECSLQSCTQHQPYVVDDPCPIHFYSKWYIRVGARKSAPLIELCVDEAGSKSPIQYIDIGNYTVSCLPFTINCQEPKLGSLVVRCSFYEDFLEYHDVRVVLDFI

SEQ ID NO: 17096 - protein, 121 aa, Artificial Sequence
  SARS-CoV-2__MT252757.1__ORF8 protein
MKFLVFLGIITTVAAFHQECSLQSCTQHQPYVVDDPCPIHFYSKWYIRVGARKSAPLIELCVDEAGSKSPIQYIDIGNYTVSCSPFTINCQEPKLGSLVVRCSFYEDFLEYQDVRVVLDFI

SEQ ID NO: 17097 - protein, 121 aa, Artificial Sequence
  SARS-CoV-2__MT358654.1__ORF8 protein
MKFLVFLGIITTVAAFHQECSLQSCTQHQPYVVDDPCPIHFYSKWYIRVGARKSAPLIELCVDEAGSKSPIQYIDIGNYTVSCLPFTINCQEPKLGSLVLRCSFYEDFLEYHDVRVVLDFI

SEQ ID NO: 17098 - RNA, 660 nt, Artificial Sequence
  MERS-CoV/MERS-CoV-Jeddah-human-1__KF958702.1__membrane protein (M) CDS gc
augagcaacaugacccagcugaccgaggcccagaucaucgccaucaucaaggacuggaacuucgcguggucccucaucuuccugcugaucacgaucgugcuccaguacggcuaccccagccgcuccaugaccgucuacguguucaagauguucgugcuguggcugcucuggccgagcuccauggcccugagcaucuucuccgccaucuaccccaucgaccuggccagccagaucaucuccgggaucgucgccgcggugagcgccaugauguggaucuccuacuucgugcagagcauccgccucuucaugcggaccggcuccugguggagcuucaaccccgagaccaacugccugcugaacguccccuucgggggcacgaccguggugcggccgcucgucgaggacuccaccagcgugaccgccguggucacgaacgggcaccugaagauggccggcaugcacuucggcgcgugcgacuacgaccgccugcccaacgaggugaccguggccaagcccaacguccucaucgcccugaagauggugaagcggcaguccuacgggaccaacagcggcguggccaucuaccaccgcuacaaggccgggaacuaccgguccccgcccaucaccgcggacaucgagcuggcccuccugcgcgccuga

SEQ ID NO: 17099 - RNA, 660 nt, Artificial Sequence
  MERS-CoV/Al-Hasa_4_2013__KF186564.1__membrane protein (M) CDS gc
augagcaacaugacccagcugaccgaggcccagaucaucgccaucaucaaggacuggaacuucgcguggucccucaucuuccugcugaucacgaucgugcuccaguacggcuaccccagccgcuccaugaccgucuacguguucaagauguucgugcuguggcugcucuggccgagcuccauggcccugagcaucuucuccgccgucuaccccaucgaccuggccagccagaucaucuccgggaucguggccgcggugagcgccaugauguggaucuccuacuucguccagagcauccgccucuucaugcggaccggcuccugguggagcuucaaccccgagaccaacugccugcugaacgugcccuucgggggcacgaccgugguccggccgcucguggaggacuccaccagcgugaccgccgucgugacgaacgggcaccugaagauggccggcaugcacuucggcgcgugcgacuacgaccgccugcccaacgaggugaccgucgccaagcccaacgugcucaucgcccugaagauggugaagcggcaguccuacgggaccaacagcggcgucgccaucuaccaccgcuacaaggccgggaacuaccgguccccgcccaucaccgcggacaucgagcuggcccuccugcgcgccuga

SEQ ID NO: 17100 - RNA, 660 nt, Artificial Sequence; identical to SEQ ID NO: 17098
  MERS-CoV/Riyadh_14_2013__KJ156934.1__membrane protein (M) CDS gc

SEQ ID NO: 17101 - RNA, 660 nt, Artificial Sequence; identical to SEQ ID NO: 17099
  MERS-CoV/England 1__NC_038294.1__membrane protein (M) CDS gc

SEQ ID NO: 17102 - RNA, 666 nt, Artificial Sequence
  SARS-CoV/Tor2__NC_004718.3__membrane protein (M) CDS gc
auggccgacaacggcaccaucaccguggaggagcugaagcagcuccuggagcaguggaaccuggucaucggguuccucuuccuggccuggaucaugcugcuccaguucgcguacagcaaccgcaaccgguuccuguacaucaucaagcugguguuccucuggcugcuguggcccgugacgcucgccugcuucguccuggccgccguguaccgcaucaacugggugaccggcgggaucgccaucgcgauggccugcaucgucggccugauguggcucuccuacuucguggccagcuuccggcuguucgcccgcacccgguccauguggagcuucaacccggagaccaacauccugcucaacgugccccugcgcgggacgaucgucacccggccccugauggaguccgagcucgugaucggcgcggugaucauccgcggccaccuccggauggccgggcacagccugggccgcugcgacaucaaggaccugcccaaggagaucaccgucgccaccucccggacgcugagcuacuacaagcugggggccucccagcgcgugggcaccgacagcggguucgccgcguacaaccgguaccgcaucggcaacuacaagcucaacaccgaccacgccggcuccaacgacaacaucgcccugcuggugcaguga

SEQ ID NO: 17103 - RNA, 693 nt, Artificial Sequence
  HCoV/OC43__NC_006213.1__membrane protein (M) CDS gc
augagcuccaagaccacccccgccccgguguacaucuggacggccgacgaggcgaucaaguuccugaaggaguggaacuucagccucggcaucauccugcuguucaucaccaucauccuccaguucggguacaccucccgcagcauguucguguacgugaucaagaugaucauccuguggcugauguggccccucaccaucauccugacgaucuucaacugcguguacgcccugaacaacgucuaccucggccuguccaucguguucaccaucguggccaucaucauguggaucgucuacuucgugaacagcauccggcuguucauccgcaccggguccuucuggagcuucaaccccgagaccaacaaccucaugugcaucgacaugaagggcacgauguacgugcggcccaucaucgaggacuaccacacccugaccgucaccaucauccgcgggcaccuguacauccagggcaucaagcucggcacgggguacucccuggccgaccugccggccuacaugaccguggcgaaggugacccaccucugcaccuacaagcggggcuuccuggaccgcaucagcgacacguccggguucgccgucuacgucaagagcaaggugggcaacuaccggcugcccuccacccagaaggggagcggcauggacaccgcccuccugcgcaacaacaucuga

SEQ ID NO: 17104 - RNA, 672 nt, Artificial Sequence
  HCoV/HKU1__NC_006577.2__membrane protein (M) CDS gc
augaacaagagcuuccugccccaguucaccuccgaccaggccgugaccuuccucaaggaguggaacuucagccugggcgugauccuccuguucaucacgaucauccugcaguucggguacaccucccgcagcauguucguguaccugaucaagaugaucauccucuggcugauguggccgcugaccaucacccucacgaucuucaacugcuucuacgcccugaacaacgcguuccuggccuucuccaucguguucaccaucaucagcaucgucaucuggauccucuacuucgugaacuccauccggcuguucauccgcaccggcagcuggugguccuucaaccccgagaccaacaaccugaugugcaucgacaugaaggggaagauguucgugcggcccgucaucgaggacuaccacacgcucaccgccaccgugauccgcggccaccuguacauccagggggugaagcugggcaccggcuacacgcucagcgaccugcccgucuacgugaccguggccaagguccaggugcugugcaccuacaagcgggccuuccucgacaagcuggacgugaacuccggguucgcggucuucgucaagagcaaggugggcaacuaccgccugccguccagcaagcccuccgggauggacaccgcccuccugcgggccuga

SEQ ID NO: 17105 - RNA, 678 nt, Artificial Sequence
  HCoV/229E/BN1/GER/2015__KU291448.1__membrane protein (M) CDS gc
augagcaacgacaacugcaccggcgacaucgugacccaccugaagaacuggaacuucggguggaacgucauccucacgaucuucaucgugauccugcaguucggccacuacaaguacucccgccuguucuacgggcucaagaugcuggugcuguggcuccuguggccccugguccucgcccugagcaucuucgacaccugggccaacugggacuccaacugggcguucguggccuucagcuuccugauggccguguccacccucgucaugugggugauguacuucgccaacagcuuccggcuguuccgccgggcccgcaccuucugggcguggaacccggaggugaacgccaucacggucaccaccgugcugggccagaccuacuaccagcccauccagcaggcccccacggggaucaccgugacccuccuguccggcguccuguacguggacggccaccggcucgccagcggggugcagguccacaaccugcccgaguacaugaccguggcggugccguccacgaccaucaucuacagccgcgucggccgguccgugaacagccagaacuccaccggguggguguucuacguccgcgugaagcacggcgacuucagcgccguguccagccccauguccaacaugaccgagaacgagcggcugcuccacuucuucuga

SEQ ID NO: 17106 - RNA, 681 nt, Artificial Sequence
  HCoV/NL63/RPTEC/2004__JX504050.1__membrane protein (M) CDS gc
augagcaacuccagcgugccccugcucgaggucuacgugcaccuccgcaacuggaacuucuccuggaaccugauccugacccuguucaucgugguccugcaguacggccacuacaaguacagccggcuccuguacgggcugaagauguccgugcucuggugccuguggccgcuggugcucgcccugagcaucuucgacugcuucgucaacuucaacguggacuggguguucuucggcuucuccauccugaugagcaucaucacccucugccugugggucauguacuucgugaacuccuuccgccuguggcggcgcgugaagacguucugggccuucaaccccgagaccaacgcgaucaucagccuccaggucuacgggcacaacuacuaccugcccgugauggccgcccccaccggcgugacccugacgcuccuguccgggguccugcucguggacggccacaagaucgccacccgggugcaggucggccagcugccgaaguacgugaucguggccacccccagcaccacgaucgucugcgaccgcguggggcgguccgugaacgagaccagccagaccggcugggcguucuacguccgcgccaagcacggggacuucuccggcguggccagccaggaggggguccuguccgagcgggagaagcuccugcaccugaucuga

SEQ ID NO: 17107 - RNA, 666 nt, Artificial Sequence
  Bat SARS-like CoV/WIV1__KF367457.1__membrane protein (M) CDS gc
auggccgagaacggcaccaucagcguggaggagcugaagcgccuccuggagcaguggaaccuggucaucggguuccucuuccuggccuggaucaugcugcuccaguucgcguacuccaaccggaaccgcuuccuguacaucaucaagcugguguuccucuggcugcuguggcccgugacccucgccugcuucguccuggccgccguguaccggaucaacugggugacgggcgggaucgccaucgcgauggccugcaucgucggccugauguggcucagcuacuucaucgccuccuuccgccuguucgcccggacccgcagcaugugguccuucaacccggagaccaacauccugcucaacgugccccugcgggggaccaucgugacgcgcccccugauggagagcgagcucgucaucggcgcggugaucauccggggccaccuccgcauggccgggcacucccugggccggugcgacaucaaggaccugcccaaggagaucaccguggccaccagccgcacccuguccuacuacaagcugggggccagccagcgggucggcacggacuccggguucgccgcguacaaccgcuaccggaucggcaacuacaagcucaacaccgaccacgccggcagcaacgacaacaucgcccugcuggugcaguga

SEQ ID NO: 17108 - RNA, 669 nt, Artificial Sequence
  BatCoV/HKU9-1 BF_005I__NC_009021.1__membrane protein (M) CDS gc
augagcaacaacugcaccaacaccgugccccgcccggaggucaucgccgcccugaaggacuggaacuucgcgguguccgugauccuccuguucaucacgguccugcuccaguggggcuaccccagccggugcaagcccaucugggugaucaagauguucauccuguggcugcucuggccccuguccaucgccgccgccguguucgccgcgauccacccgaucaacagcgucgccuucggguucgccaucgccuucgcgugcaucuccggcaucauguggcugagcuacuucaucuccagcuuccgccuccugugccggaccggguccgccuggagcuucaugcccgagaccgacaugcugaucaacaucccccuccugggccgcaccgugacgcggcccaucaucuccgacagcccggccgugcaguuccugaucauccgcggggagcuccgguucgacggcuucacccugggccgcugcgaccccggggacaugcccgacaucgucaccaucgcccggcccaacgcccugcacugguacaagcgcgcgcucacccggaacauguacacgcgcuccgccauccugguguacaucaaguacaaggugggcaaccaccggguccagaacaccaccgaggacggggaccgccuggccauguucguggccuga

SEQ ID NO: 17109 - RNA, 654 nt, Artificial Sequence
  PDCoV/Swine/Thailand/S5011/2015__KU051641.1__membrane protein (M) CDS gc
augagcgacgccgaggaguggcagaucaucguguucaucgccaucaucugggcgcugggcgucauccuccagggcggguacgccacccgcaaccgggugaucuacgugaucaagcugauccugcucuggcugcugcagcccuucacccucgucgugacgaucuggaccgccguggaccgcuccagcaagaaggacgccgucuucaucguguccaucaucuucgccgugcugaccuucaucagcugggcgaaguacugguacgacuccauccggcugcucaugaagacccgcagcgccugggcccuguccccggagagccggcugcucgccgggaucauggaccccaugggcacguggcgcugcauccccaucgaccacauggcgcccauccugaccccggucgugaagcacgggaagcugaagcuccacggccaggagcuggccaacggcaucuccgugcggaacccgccccaggacauggucaucgugagccccuccgacaccuuccacuacaccuucaagaagcccguggagagcaacaacgaccccgaguucgccguccugaucuaccagggggaccgcgccuccaacgccggccuccacacgaucaccaccagcaaggcgggggacgcccggcuguacaaguacauguga

SEQ ID NO: 17110 - RNA, 681 nt, Artificial Sequence
  PEDV/NPL-PEDv/2013/P10__KJ778616.1__membrane protein (M) CDS gc
augagcaacggcuccauccccguggacgaggucauccagcaccuccgcaacuggaacuucaccuggaacaucauccugaccauccugcugguggugcuccaguacgggcacuacaaguacagcgccuuccuguacggcgucaagauggccauccuguggauccucuggccgcuggugcuggcgcucucccuguucgacgccugggccagcuuccaggugaacugggucuucuucgccuucuccauccugauggccugcaucacgcucaugcuguggaucauguacuucgugaacagcauccggcuguggcgccggacccacuccugguggagcuucaaccccgagaccgacgcgcuccugaccacguccgugauggggcgccaggucugcauccccgugcugggcgcccccaccggggugacccucacccugcugagcggcacgcuccuggucgagggcuacaagguggccaccggggugcaggucucccagcugccgaacuucgugaccguggccaaggcgaccacgaccaucgucuacggccggguggggcgcagcgugaacgccuccagcggcaccgggugggccuucuacguccgguccaagcacggcgacuacagcgccguguccaaccccagcuccgugcucaccgacagcgagaagguccugcaccugguguga

SEQ ID NO: 17111 - RNA, 687 nt, Artificial Sequence
  MHV/A59__NC_048217.1__membrane protein (M) CDS gc
augagcuccaccacccaggcccccgagccgguguaccaguggacggccgacgaggcggugcaguuccugaaggaguggaacuucagccucggcaucauccugcuguucaucaccaucauccuccaguucggguacaccucccgcagcauguucaucuacguggugaagaugaucauccuguggcugauguggccccucaccaucguccugugcaucuucaacugcguguacgcccugaacaacguguaccucggcuucuccaucgucuucacgaucgugagcaucgugaucuggaucauguacuucgucaacuccauccggcuguucauccgcaccgggagcuggugguccuucaaccccgagaccaacaaccugaugugcaucgacaugaagggcaccguguacgugcggcccaucaucgaggacuaccacacgcucaccgccaccaucauccgcgggcaccuguacaugcagggcgucaagcugggcaccggguucagccucuccgaccugccggccuacgugacgguggccaaggucagccaccugugcaccuacaagcgggcguuccucgacaagguggacggcguguccggguucgccgucuacgucaagagcaaggugggcaacuaccgccugcccuccaacaagcccagcggggccgacaccgcccugcuccggaccuga

SEQ ID NO: 17112 - RNA, 669 nt, Artificial Sequence
  SARS-CoV-2/Wuhan-Hu-1__NC_045512.2/MN908947.2/EPI_ISL_402128__mem brane protein (M) CDS gc
auggccgacagcaacggcaccaucaccguggaggagcugaagaagcuccuggagcaguggaaccuggucaucggguuccucuuccugacguggaucugccugcuccaguucgccuacgcgaaccgcaaccgguuccuguacaucaucaagcugaucuuccucuggcugcuguggcccgugacccucgccugcuucgugcuggccgccgucuaccgcaucaacuggaucaccggcgggaucgccaucgcgauggccugccuggugggccucauguggcuguccuacuucaucgccagcuuccggcuguucgcccgcacccgguccauguggagcuucaacccggagacgaacauccuccugaacgugccccugcacgggaccauccucacccgcccccugcuggaguccgagcucgucaucggcgcggugauccugcggggccaccuccgcaucgccgggcaccaccugggccggugcgacaucaaggaccugcccaaggagaucaccguggccacgagccgcacccuguccuacuacaagcucggggccagccagcgggucgccggcgacuccggguucgcggccuacagccgcuaccggaucggcaacuacaagcugaacaccgaccacuccagcuccagcgacaacaucgcccugcucgugcaguga

SEQ ID NO: 17113 - RNA, 669 nt, Artificial Sequence
  SARS-CoV-2__MT919771.1__membrane protein (M) CDS gc
auggccgacagcaacggcaccaucaccguggaggagcugaagaagcuccuggagcaguggaaccuggucaucggguuccucuucuucacguggaucugccugcugcaguucgccuacgcgaaccgcaaccgguuccucuacaucaucaagcugaucuuccuguggcuccuguggcccgugacccuggccugcuucgugcucgccgccgucuaccgcaucaacuggaucaccggcgggaucgccaucgcgauggccugccuggugggccugauguggcucuccuacuucaucgccagcuuccggcuguucgcccgcacccgguccauguggagcuucaacccggagacgaacauccugcucaacgugccccugcacgggaccauccugacccgcccccuccuggaguccgagcuggucaucggcgcggugauccuccggggccaccuccgcaucgccgggcaccaccugggccggugcgacaucaaggaccugcccaaggagaucaccguggccacgagccgcacccuguccuacuacaagcugggggccagccagcgggucgccggcgacuccggguucgcggccuacagccgcuaccggaucggcaacuacaagcucaacaccgaccacuccagcuccagcgacaacaucgcccugcuggugcaguga

SEQ ID NO: 17114 - RNA, 669 nt, Artificial Sequence
  SARS-CoV-2__MT913062.1__membrane protein (M) CDS gc
auggccgacagcaacggcaccaucaccguggaggagcugaagaagcuccuggagcaguggaaccuggucaucggguuccucuuccugacguggaucugccugcuccaguucgccuacgcgaaccgcaaccgguuccuguacaucaucaagcugaucuuccucuggcugcuguggcccgugacccucgccugcuucgugcuggccgccgucuaccgcaucaacuggaucaccggcgggaucgccaucgcgauggccugccuggugggccucauguggcuguccuacuucaucgccagcuuccggcuguucgcccgcacccgguccauguggagcuucaacccggagacgaacauccuccugaacgugccccugcacgggaccauccucacccgcccccugcuggaguccgagcucgucaucggcgcggugauccugcggggccaccuccgcaucgccgggcaccaccugggccggugcgacaucaaggaccugcccaaggagaucaccguggccacgagccgcaugcuguccuacuacaagcucggggccagccagcgggucgccggcgacuccggguucgcggccuacagccgcuaccggaucggcaacuacaagcugaacaccgaccacuccagcuccagcgacaacaucgcccugcucgugcaguga

SEQ ID NO: 17115 - RNA, 669 nt, Artificial Sequence
  SARS-CoV-2__MT913095.1__membrane protein (M) CDS gc
auggccgacagcaacggcaccaucaccguggaggagcugaagaagcuccuggagcaguggaaccuggucaucggguuccucuuccugacguggaucugccugcuccaguucgccuacgcgaaccgcaaccgguuccuguacaucaucaagcugaucuuccucuggcugcuguggcccgugacccucgccugcuucgugcuggccgccuucuaccgcaucaacuggaucaccggcgggaucgccaucgcgauggccugccuggucggccucauguggcuguccuacuucaucgccagcuuccggcuguucgcccgcacccgguccauguggagcuucaacccggagacgaacauccuccugaacgugccccugcacgggaccauccucacccgcccccugcuggaguccgagcucgugaucggcgcggucauccugcggggccaccuccgcaucgccgggcaccaccugggccggugcgacaucaaggaccugcccaaggagaucaccguggccacgagccgcacccuguccuacuacaagcucggggccagccagcggguggccggcgacuccggguucgcggccuacagccgcuaccggaucggcaacuacaagcugaacaccgaccacuccagcuccagcgacaacaucgcccugcucguccaguga

SEQ ID NO: 17116 - RNA, 669 nt, Artificial Sequence
  SARS-CoV-2__MT913138.1__membrane protein (M) CDS gc
auggccgacagcaacggcaccaucaccguggaggagcugaagaagcuccuggagcaguggaaccuggucaucggguuccucuuccugacguggaucugccugcuccaguucgccuacgcgaaccgcaaccgguuccuguacaucaucaagcugaucuuccucuggcugcuguggcccgugacccucgccugcuucgugcuggccgccgucuaccgcaucaacuggaucaccggcgggaucgccaucgcgauggccugccuggugggccucauguggcuguccuacuucaucgccagcuuccggcuguucgcccgcacccgguccauguggagcuucaacccggagacgaacauccuccugaacgugccccugcacgggaccauccucacccgcccccugcuggaguccgagcucgucaucggcgcggugauccugcggggccaccuccgcaucgccgggcaccaccugggccggugcgacaucaaggaccugcccaaggagaucaccguggccacgagccugacccucuccuacuacaagcugggggccagccagcgcgucgccggcgacuccggguucgcggccuacagccgguaccgcaucggcaacuacaagcugaacaccgaccacuccagcuccagcgacaacaucgcccuccuggugcaguga

SEQ ID NO: 17117 - RNA, 669 nt, Artificial Sequence
  SARS-CoV-2__MT913144.1__membrane protein (M) CDS gc
auggccgacagcaacggcaccaucaccguggaggagcugaagaagcuccuggagcaguggaaccugaucaucggguuccucuuccugacguggaucugccugcuccaguucgccuacgcgaaccgcaaccgguuccuguacaucaucaagcugaucuuccucuggcugcuguggcccgucacccucgccugcuucgugcuggccgccguguaccgcaucaacuggaucaccggcgggaucgccaucgcgauggccugccuggucggccucauguggcuguccuacuucaucgccagcuuccggcuguucgcccgcacccgguccauguggagcuucaacccggagacgaacauccuccugaacgugccccugcacgggaccauccucacccgcccccugcuggaguccgagcucgugaucggcgcggucauccugcggggccaccuccgcaucgccgggcaccaccugggccggugcgacaucaaggaccugcccaaggagaucaccguggccacgagccgcacccuguccuacuacaagcucggggccagccagcggguggccggcgacuccggguucgcggccuacagccgcuaccggaucggcaacuacaagcugaacaccgaccacuccagcuccagcgacaacaucgcccugcucguccaguga

SEQ ID NO: 17118 - RNA, 669 nt, Artificial Sequence
  SARS-CoV-2__MT911566.1__membrane protein (M) CDS gc
auggccggcagcaacgggaccaucaccguggaggagcugaagaagcuccuggagcaguggaaccuggucaucggcuuccucuuccugacguggaucugccugcuccaguucgccuacgcgaaccgcaaccgguuccuguacaucaucaagcugaucuuccucuggcugcuguggcccgugacccucgccugcuucgugcuggccgccgucuaccgcaucaacuggaucaccgggggcaucgccaucgcgauggccugccugguggggcucauguggcuguccuacuucaucgccagcuuccggcuguucgcccgcacccgguccauguggagcuucaacccggagacgaacauccuccugaacgugccccugcacggcaccauccucacccgcccccugcuggaguccgagcucgucaucggcgcggugauccugcgggggcaccuccgcaucgccggccaccaccuggggcggugcgacaucaaggaccugcccaaggagaucaccguggccacgagccgcacccuguccuacuacaagcucggcgccagccagcgggucgccggggacuccggcuucgcggccuacagccgcuaccggaucggcaacuacaagcugaacaccgaccacuccagcuccagcgacaacaucgcccugcucgugcaguga

SEQ ID NO: 17119 - RNA, 669 nt, Artificial Sequence
  SARS-CoV-2__MT892971.1__membrane protein (M) CDS gc
auggccgacagcaacggcaccaucaccguggaggagcugaagaagcuccuggagcaguggaaccuggucaucggguuccucuuccugacguggaucugccugcuccaguucgccuacgcgaaccgcaaccgguuccuguacaucaucaagcugaucuuccucuggcugcuguggcccgugacccucgccuccuucgugcuggccgccgucuaccgcaucaacuggaucaccggcgggaucgccaucgcgauggccugccuggugggccucauguggcugagcuacuucaucgccuccuuccggcuguucgcccgcacccggagcaugugguccuucaacccggagacgaacauccuccugaacgugccccugcacgggaccauccucacccgcccccugcuggagagcgagcucgucaucggcgcggugauccugcggggccaccuccgcaucgccgggcaccaccugggccggugcgacaucaaggaccugcccaaggagaucaccguggccacgucccgcacccugagcuacuacaagcucggggccucccagcgggucgccggcgacagcggguucgcggccuacucccgcuaccggaucggcaacuacaagcugaacaccgaccacagcuccagcuccgacaacaucgcccugcucgugcaguga

SEQ ID NO: 17120 - RNA, 669 nt, Artificial Sequence
  SARS-CoV-2__MT883499.1__membrane protein (M) CDS gc
auggccuacagcaacggcaccaucaccguggaggagcugaagaagcuccuggagcaguggaaccuggucaucggguuccucuuccugacguggaucugccugcuccaguucgccuacgcgaaccgcaaccgguuccuguacaucaucaagcugaucuuccucuggcugcuguggcccgugacccucgccugcuucgugcuggccgccgucuaccgcaucaacuggaucaccggcgggaucgccaucgcgauggccugccuggugggccucauguggcuguccuacuucaucgccagcuuccggcuguucgcccgcacccgguccauguggagcuucaacccggagacgaacauccuccugaacgugccccugcacgggaccauccucacccgcccccugcuggaguccgagcucgucaucggcgcggugauccugcggggccaccuccgcaucgccgggcaccaccugggccggugcgacaucaaggaccugcccaaggagaucaccguggccacgagccgcacccuguccuacuacaagcucggggccagccagcgggucgccggcgacuccggguucgcggccuacagccgcuaccggaucggcaacuacaagcugaacaccgaccacuccagcuccagcgacaacaucgcccugcucgugcaguga

SEQ ID NO: 17121 - RNA, 669 nt, Artificial Sequence
  SARS-CoV-2__MT883502.1__membrane protein (M) CDS gc
auggccgacagcaacggcaccaucaccguggaggagcugaagaagcuccuggagcaguggaaccuggucaucggguuccucuuccugacguggaucugccugcuccaguucgccuacgcgaaccgcaaccgguuccuguacaucaucaagcugaucuuccucuggcugcuguggccccucacccuggccugcuucgugcuggccgccguguaccgcaucaacuggaucaccggcgggaucgccaucgcgauggccugccucgucggccugauguggcuguccuacuucaucgccagcuuccgccucuucgcccggacccgguccauguggagcuucaacccggagacgaacauccugcugaacgugccccuccacgggaccauccugacccgcccccugcucgaguccgagcuggugaucggcgcggucauccugcggggccaccuccgcaucgccgggcaccaccugggccggugcgacaucaaggaccugcccaaggagaucaccguggccacgagccgcacccucuccuacuacaagcugggggccagccagcggguggccggcgacuccggguucgcggccuacagccgcuaccggaucggcaacuacaagcugaacaccgaccacuccagcuccagcgacaacaucgcccuccugguccaguga

SEQ ID NO: 17122 - RNA, 669 nt, Artificial Sequence
  SARS-CoV-2__MT873185.1__membrane protein (M) CDS gc
auggccgacagcaacggcaccaucaccguggaggagcugaagaagcuccuggagcaguggaaccuggucaucggguuccucuuccugacguggaucugccugcuccaguucgccuacgcgaaccgcaaccgguuccuguacaucaucaagcugaucuuccucuggcugcuguggcccgugacccucgccugcuucgugcuggccgccgucuaccgcaucaacuggaucaccggcgggaucgccaucgcgauguccugccuggugggccucauguggcugagcuacuucaucgccuccuuccggcuguucgcccgcacccggagcaugugguccuucaacccggagacgaacauccuccugaacgugccccugcacgggaccauccucacccgcccccugcuggagagcgagcucgucaucggcgccgugauccugcggggccaccuccgcaucgcggggcaccaccugggccggugcgacaucaaggaccugcccaaggagaucaccguggccacgucccgcacccugagcuacuacaagcucggggccucccagcgggucgccggcgacagcggguucgccgcguacucccgcuaccggaucggcaacuacaagcugaacaccgaccacagcuccagcuccgacaacaucgcccugcucgugcaguga

SEQ ID NO: 17123 - RNA, 669 nt, Artificial Sequence
  SARS-CoV-2__MT873187.1__membrane protein (M) CDS gc
auggccgacagcaacggcaccaucaccguggaggagcugaagaagcuccuggagcaguggaaccuggucaucggguuccucuuccugacguggaucugccugcuccaguucgccuacgcgaaccgcaaccgguuccuguacaucaucaagcugaucuuccucuggcugcuguggcccgugacccucgccugcuucgugcuggccgccgucuaccgcaucaacuggaucaccggcgggaucgccaucgcgauggccugccuggugggccucauguggcuguccuacuucaucgccagcuuccggcuguucgcccgcacccgguccauguggagcuucaacccggagacgaacauccuccugaacgugccccugcacgggaccauccucacccgcccccugcuggaguccgagcucgucaucggcgcggugauccugcggggccaccuccgcaucgccgggcaccaccugggccggugcgacaucaaggaccugcccaaggagaucaccguggccacgagccgcacccuguccuacuacaagcucggggccagccagcgggucgccggcgacuccggguucgcggccuacagccgcuaccggaucggcaacuacaagcugaacaccuaccacuccagcuccagcgacaacaucgcccugcucgugcaguga

SEQ ID NO: 17124 - RNA, 669 nt, Artificial Sequence
  SARS-CoV-2__MT873268.1__membrane protein (M) CDS gc
auggccgacagcaacggcaccaucaccguggaggagcugaagaagcuccuggagcaguggaaccuggucaucggguuccucuuccugacguggaucugccugcuccaguucgccuacgcgaaccgcaaccgguuccuguacaucaucaagcugaucuuccucuggcugcuguggcccgugacccucgccugcuucgugcuggccgccgucuaccgcaucaacuggaucaccggcgggaucgccaucgcgauggccugccuggugggccucauguggcuguccuacuucaucgccagcuuccggcuguucgcccgcacccgguccauguggagcuucaacccggagacgaacauccuccugaacgugccccugcacgacaccauccucacccgcccccugcuggaguccgagcucgucaucggggcggugauccugcggggccaccuccgcaucgccggccaccaccuggggcggugcgacaucaaggaccugcccaaggagaucaccguggccacgagccgcacccuguccuacuacaagcucggcgccagccagcgggucgccggggacuccggcuucgcggccuacagccgcuaccggaucgggaacuacaagcugaacaccgaccacuccagcuccagcgacaacaucgcccugcucgugcaguga

SEQ ID NO: 17125 - RNA, 669 nt, Artificial Sequence
  SARS-CoV-2__MT873272.1__membrane protein (M) CDS gc
augagcgacuccaacggcaccaucaccguggaggagcugaagaagcuccuggagcaguggaaccuggucaucggguuccucuuccugacguggaucugccugcuccaguucgccuacgccaaccgcaaccgguuccuguacaucaucaagcugaucuuccucuggcugcuguggcccgugacccucgcgugcuucgugcuggccgccgucuaccgcaucaacuggaucaccggcgggaucgccaucgccauggcgugccuggugggccucauguggcugagcuacuucaucgccuccuuccggcuguucgcccgcacccggagcaugugguccuucaacccggagacgaacauccuccugaacgugccccugcacgggaccauccucacccgcccccugcuggagagcgagcucgucaucggcgccgugauccugcggggccaccuccgcaucgcggggcaccaccugggccggugcgacaucaaggaccugcccaaggagaucaccguggccacgucccgcacccugagcuacuacaagcucggggccucccagcgggucgccggcgacagcggguucgccgcguacucccgcuaccggaucggcaacuacaagcugaacaccgaccacagcuccagcuccgacaacaucgcccugcucgugcaguga

SEQ ID NO: 17126 - RNA, 669 nt, Artificial Sequence
  SARS-CoV-2__MT873351.1__membrane protein (M) CDS gc
auggccgacagcaacggcaccaucaccguggaggagcugaagaagcuccuggagcaguggaaccuggucaucggguuccucuuccugacguggaucugccugcuccaguucgccuacgcgaaccgcaaccgguuccuguacaucaucaagcugaucuuccucuggcugcuguggcccgugacccucgccugcuucgugcuggccgccgucuaccgcaucaacuggaucaccggcgggaucgccaucgcgauggccugccuggugggccucauguggcuguccuacuucaucgccagccugcgccucuucgcccggacccgguccauguggagcuucaacccggagacgaacauccugcugaacgugccccuccacgggaccauccugacccgcccccugcucgaguccgagcuggucaucggcgcggugauccugcggggccaccuccgcaucgccgggcaccaccugggccggugcgacaucaaggaccugcccaaggagaucaccguggccacgagccgcacccucuccuacuacaagcugggggccagccagcgggucgccggcgacuccggguucgcggccuacagccgcuaccggaucggcaacuacaagcugaacaccgaccacuccagcuccagcgacaacaucgcccuccuggugcaguga

SEQ ID NO: 17127 - RNA, 669 nt, Artificial Sequence
  SARS-CoV-2__MT872501.1__membrane protein (M) CDS gc
auggccgacagcaacggcaccaucaccguggaggagcugaagaagcuccuggagcaguggaaccuggucaucggguuccucuuccugacguggaucugccugcuccaguucgccuacgcgaaccgcaaccgguuccuguacaucaucaagcugaucuuccucuggcugcuguggcccgugacccucgccugcuucgugcuggccgccgucuaccgcaucaacuggaucaccggcgggaucgccaucgcgauggccugccuggugggccucauguggcuguccuacuucaucgccagcuuccggcuguucgcccgcacccgguccaucuggagcuucaacccggagacgaacauccuccugaacgugccccugcacgggaccauccucacccgcccccugcuggaguccgagcucgucaucggcgcggugauccugcggggccaccuccgcaucgccgggcaccaccugggccggugcgacaucaaggaccugcccaaggagaucaccguggccacgagccgcacccuguccuacuacaagcucggggccagccagcgggucgccggcgacuccggguucgcggccuacagccgcuaccggaucggcaacuacaagcugaacaccgaccacuccagcuccagcgacaacaucgcccugcucgugcaguga

SEQ ID NO: 17128 - RNA, 669 nt, Artificial Sequence
  SARS-CoV-2__MT846468.1__membrane protein (M) CDS gc
auggccgacagcaacggcaccaucaccguggaggagcugaagaagcuccuggagcaguggaaccuggucaucggguuccucuuccugacguggaucugccugcuccaguucgccuacgcgaaccgcaaccgguuccuguacaucaucaagcugaccuuccucuggcugcuguggcccgugacccucgccugcuucgugcuggccgccgucuaccgcaucaacuggaucaccggcgggaucgccaucgcgauggccugccuggugggccucauguggcuguccuacuucaucgccagcuuccggcuguucgcccgcacgcgguccauguggagcuucaacccggagaccaacauccuccugaacgugccccugcacgggaccauccucacccgcccccugcuggaguccgagcucgucaucggcgcggugauccugcggggccaccuccgcaucgccgggcaccaccugggccggugcgacaucaaggaccugcccaaggagaucacgguggccaccagccgcacccuguccuacuacaagcucggggccagccagcgggucgccggcgacuccggguucgcggccuacagccgcuaccggaucggcaacuacaagcugaacaccgaccacuccagcuccagcgacaacaucgcccugcucgugcaguga

SEQ ID NO: 17129 - RNA, 669 nt, Artificial Sequence
  SARS-CoV-2__MT846494.1__membrane protein (M) CDS gc
auggccgacagcaacggcaccaucaccguggaggagcugaagaagcuccuggagcaguggaaccuggucaucggguuccucuuccugacguggaucugccugcuccaguucgccuacgcgaaccgcaaccgguuccuguacaucaucaagcugaucuuccucuggcugcuguggcccgugacccucgccugcuucgugcuggccuccgucuaccgcaucaacuggaucaccggcgggaucgccaucgccauggcgugccuggugggccucauguggcugagcuacuucaucgccuccuuccggcuguucgcccgcacccggagcaugugguccuucaacccggagacgaacauccuccugaacgugccccugcacgggaccauccucacccgcccccugcuggagagcgagcucgucaucggcgccgugauccugcggggccaccuccgcaucgcggggcaccaccugggccggugcgacaucaaggaccugcccaaggagaucaccguggccacgucccgcacccugagcuacuacaagcucggggccucccagcgggucgccggcgacagcggguucgccgcguacucccgcuaccggaucggcaacuacaagcugaacaccgaccacagcuccagcuccgacaacaucgcccugcucgugcaguga

SEQ ID NO: 17130 - RNA, 669 nt, Artificial Sequence
  SARS-CoV-2__MT846567.1__membrane protein (M) CDS gc
augguggacagcaacggcaccaucaccgucgaggagcugaagaagcuccuggagcaguggaaccuggugaucggguuccucuuccugacguggaucugccugcuccaguucgccuacgccaaccgcaaccgguuccuguacaucaucaagcugaucuuccucuggcugcuguggcccgugacccucgcgugcuucguccuggccgccguguaccgcaucaacuggaucaccggcgggaucgccaucgccauggcgugccuggugggccucauguggcuguccuacuucaucgccagcuuccggcuguucgcccgcacccgguccauguggagcuucaacccggagacgaacauccuccugaacgucccccugcacgggaccauccucacccgcccccugcuggaguccgagcucgugaucggcgccgugauccugcggggccaccuccgcaucgcggggcaccaccugggccggugcgacaucaaggaccugcccaaggagaucaccgucgccacgagccgcacccuguccuacuacaagcucggggccagccagcggguggccggcgacuccggguucgccgcguacagccgcuaccggaucggcaacuacaagcugaacaccgaccacuccagcuccagcgacaacaucgcccugcucgugcaguga

SEQ ID NO: 17131 - RNA, 669 nt, Artificial Sequence
  SARS-CoV-2__MT846668.1__membrane protein (M) CDS gc
auggccgacagcaacggcaccaucaccguggaggagcugaagaagcuccuggagcaguggaaccuggucaucggguuccucuuccugacguggaucugccugcuccaguucgccuacgcgaaccgcaaccgguuccuguacaucaucaagcugaucuuccucuggcugcuguggcccgugacccucgccugcuucgugcuggccgccgucuaccgcaucaacuggaucaccggcgggaucgccaucgcgauggccugccuggugggccucauguggcuguccuacuucaucgccagcuuccggcuguucgcccgcacccgguccauguggagcuucaacccggagacgaacauccuccugaacgugccccugcacgggaccauccucacccgcccccugcuggaguccgagcucgucaucggcgcggugauccugcggggccaccuccgcaucgccgggcaccaccugggccggugcgacaucaaggaccugcccaaggagaucaccguggccacgagccgcacccuguccuacuacaagcucggggccagccagcgggucaccggcgacuccggguucgccgcguacagccgcuaccggaucggcaacuacaagcugaacaccgaccacuccagcuccagcgacaacaucgcccugcucgugcaguga

SEQ ID NO: 17132 - RNA, 669 nt, Artificial Sequence
  SARS-CoV-2__MT843737.1__membrane protein (M) CDS gc
auggccgacagcaacggcaccaucaccguggaggagcugaagaagcuccuggagcaguggaaccugcucaucggguuccuguuccugacguggaucugccuccugcaguucgccuacgcgaaccgcaaccgguuccuguacaucaucaagcucaucuuccuguggcugcucuggcccgucacccuggccugcuucgugcuggccgccguguaccgcaucaacuggaucaccggcgggaucgccaucgcgauggccugccucgucggccugauguggcuguccuacuucaucgccagcuuccgccucuucgcccggacccgguccauguggagcuucaacccggagacgaacauccugcugaacgugccccuccacgggaccauccugacccgcccccugcucgaguccgagcuggugaucggcgcggucauccugcggggccaccuccgcaucgccgggcaccaccugggccggugcgacaucaaggaccugcccaaggagaucaccguggccacgagccgcacccucuccuacuacaagcugggggccagccagcggguggccggcgacuccggguucgcggccuacagccgcuaccggaucggcaacuacaagcugaacaccgaccacuccagcuccagcgacaacaucgcccuccugguccaguga

SEQ ID NO: 17133 - RNA, 669 nt, Artificial Sequence
  SARS-CoV-2__MT831141.1__membrane protein (M) CDS gc
auggccgacagcaacggcaccaucaccguggaggagcugaagaagcuccuggagcaguggaaccuggucaucggguuccucuuccugacguggaucugccugcuccaguucgccuacgcgaaccgcaaccgguuccuguacaucaucaagcugaucuuccucuggcugcuguggcccgugacccucgccugcuucgugcuggccgccgucuaccgcaucaacuggaucaccggcgggaucgccaucgcgauggccugccuggugggccucauguggcuguccuacuucaucgccagcuuccggcuguucgugcgcacccgguccauguggagcuucaacccggagacgaacauccuccugaacgucccccugcacgggaccauccucacccgcccccugcuggaguccgagcucgugaucggcgccgugauccugcggggccaccuccgcaucgcggggcaccaccugggccggugcgacaucaaggaccugcccaaggagaucaccgucgccacgagccgcacccuguccuacuacaagcucggggccagccagcggguggccggcgacuccggguucgccgcguacagccgcuaccggaucggcaacuacaagcugaacaccgaccacuccagcuccagcgacaacaucgcccugcucgugcaguga

SEQ ID NO: 17134 - RNA, 669 nt, Artificial Sequence
  SARS-CoV-2__MT831423.1__membrane protein (M) CDS gc
auggccgacagcaacggcaccaucaccguggaggagcugaagaagcuccuggagcaguggaaccuggucaucggguuccucuuccugacguggaucugccugcuccaguucgccuacgcgaaccgcaaccgguuccuguacaucaucaagcugaucuuccucuggcugcuguggcccgugacccucgccugcuucgugcuggccgccgucuaccgcaucaacuggaucacgugcggcaucgccaucgcgauggccugccugguggggcucauguggcuguccuacuucaucgccagcuuccggcuguucgcccgcacccgguccauguggagcuucaacccggagaccaacauccuccugaacgugccccugcacggcaccauccucacccgcccccugcuggaguccgagcucgucaucggggcggugauccugcggggccaccuccgcaucgccggccaccaccuggggcggugcgacaucaaggaccugcccaaggagaucaccguggccacgagccgcacccuguccuacuacaagcucggcgccagccagcgggucgccggggacuccggcuucgcggccuacagccgcuaccggaucgggaacuacaagcugaacaccgaccacuccagcuccagcgacaacaucgcccugcucgugcaguga

SEQ ID NO: 17135 - RNA, 669 nt, Artificial Sequence
  SARS-CoV-2__MT831469.1__membrane protein (M) CDS gc
auggccgacagcaacggcaccaucaccguggaggagcugaagcgccuccuggagcaguggaaccuggucaucggguuccucuuccugacguggaucugccugcuccaguucgccuacgcgaaccggaaccgcuuccuguacaucaucaagcugaucuuccucuggcugcuguggcccgugacccucgccugcuucgugcuggccgccgucuaccggaucaacuggaucaccggcgggaucgccaucgcgauggccugccuggugggccucauguggcuguccuacuucaucgccagcuuccgccuguucgcccggacccgcuccauguggagcuucaacccggagacgaacauccuccugaacgugccccugcacgggaccauccucacccggccccugcuggaguccgagcucgucaucggcgcggugauccugcgcggccaccuccggaucgccgggcaccaccugggccgcugcgacaucaaggaccugcccaaggagaucaccguggccacgagccggacccuguccuacuacaagcucggggccagccagcgcgucgccggcgacuccggguucgcggccuacagccgguaccgcaucggcaacuacaagcugaacaccgaccacuccagcuccagcgacaacaucgcccugcucgugcaguga

SEQ ID NO: 17136 - RNA, 669 nt, Artificial Sequence
  SARS-CoV-2__MT834027.1__membrane protein (M) CDS gc
auggccgacagcaacggcaccaucaccguggaggagcugaagaagcuccuggagcaguggaaccuggucaucggguuccucuuccugacguggaucugccugcuccaguucgccuacgcgaaccgcaaccgguuccuguacaucaucaagcugaucuuccucuggcugcuguggcccgugacccucgccugcuucgugcuggccgccgucuaccgcaucaacuggaucaccggcgggaucgccaucgcgauggccugccuggugggccucauguggcuguccuacuucaucgccagcuuccggcuguucgcccgcacccgguccauguggagcuucaacccggagacgaacauccuccugaacgugccccuguacgggaccauccucacccgcccccugcuggaguccgagcucgucaucggcgcggugauccugcggggccaccuccgcaucgccgggcaccaccugggccggugcgacaucaaggaccugcccaaggagaucaccguggccacgagccgcacccuguccuacuacaagcucggggccagccagcgggucgccggcgacuccggguucgcggccuacagccgcuaccggaucggcaacuacaagcugaacaccgaccacuccagcuccagcgacaacaucgcccugcucgugcaguga

SEQ ID NO: 17137 - RNA, 669 nt, Artificial Sequence
  SARS-CoV-2__MT834697.1__membrane protein (M) CDS gc
auggccgacagcaacggcaccaucaccguggaggagcugaagaagcuccuggagcaguggaaccuggucaucggguuccucuuccugacguggaucugccugcuccaguucgccuacgcgaaccgcaaccgguuccuguacaucaucaagcugaucuuccucuggcugcuguggcccgugacccucgccugcuucgugcuggccgccgucuaccgcaucaacuggaucaccggcgggaucgccaucgcgauggccugccuggugggccucauguggcuguccuacuucaucagcuccuuccggcuguucgcccgcacccggagcaugugguccuucaacccggagacgaacauccuccugaacgugccccugcacgggaccauccucacccgcccccugcuggagagcgagcucgucaucggcgccgugauccugcggggccaccuccgcaucgcggggcaccaccugggccggugcgacaucaaggaccugcccaaggagaucaccguggccacgucccgcacccugagcuacuacaagcucggggccucccagcgggucgccggcgacagcggguucgccgcguacucccgcuaccggaucggcaacuacaagcugaacaccgaccacagcuccagcuccgacaacaucgcccugcucgugcaguga

SEQ ID NO: 17138 - RNA, 669 nt, Artificial Sequence
  SARS-CoV-2__MT825091.1__membrane protein (M) CDS gc
auggccgacagcaacggcaccaucaccguggaggagcuggagaagcuccuggagcaguggaaccuggucaucggguuccucuuccugacguggaucugccugcuccaguucgccuacgcgaaccgcaaccgguuccuguacaucaucaagcugaucuuccucuggcugcuguggaccgugacccucgccugcuucgugcuggccgccgucuaccgcaucaacuggaucaccggcgggaucgccaucgcgauggccugccuggugggccucauguggcuguccuacuucaucgccagcuuccggcuguucgcccgcacgcgguccauguggagcuucaaccccgagaccaacauccuccugaacgugccgcugcacgggaccauccucacccgcccccugcuggaguccgagcucgucaucggcgcggugauccugcggggccaccuccgcaucgccgggcaccaccugggccggugcgacaucaaggaccugcccaaggagaucacgguggccaccagccgcacccuguccuacuacaagcucggggccagccagcgggucgccggcgacuccggguucgcggccuacagccgcuaccggaucggcaacuacaagcugaacaccgaccacuccagcuccagcgacaacaucgcccugcucgugcaguga

SEQ ID NO: 17139 - RNA, 669 nt, Artificial Sequence
  SARS-CoV-2__MT821547.1__membrane protein (M) CDS gc
auggccgacagcaacggcaccaucaccguggaggagcuggagaagcuccuggagcaguggaaccuggucaucggguuccucuuccugacguggaucugccugcuccaguucgccuacgcgaaccgcaaccgguuccuguacaucaucaagcugaucuuccucuggcugcuguggcccgugacccucgccugcuucgugcuggccgccgucuaccgcaucaacuggaucaccggcgggaucgccaucgcgauggccugccuggugggccucauguggcuguccuacuucaucgccagcuuccggcuguucgcccgcacccgguccauguggagcuucaacccggagacgaacauccuccugaacgugccccugcacgggaccauccucacccgcccccugcuggaguccgagcucgucaucggcgcggugauccugcggggccaccuccgcaucgccgggcaccaccugggccggugcgacaucaaggaccugcccaaggagaucaccguggccacgagccgcacccuguccuacuacaagcucggggccagccagcgggucgccggcgacuccggguucgcggccuacagccgcuaccggaucggcaacuacaagcugaacaccgaccacuccagcuccagcgacaacaucgcccugcucgugcaguga

SEQ ID NO: 17140 - RNA, 669 nt, Artificial Sequence
  SARS-CoV-2__MT821560.1__membrane protein (M) CDS gc
auggccgacagcaacggcaccaucaccguggaggagcuggagaagcuccuggagcaguggaaccuggucaucggguuccucuuccugacguggaucugccugcuccaguucgccuacgcgaaccgcaaccgguuccuguacaucaucaagcugaucuuccucuggcugcuguggcccgugacccucgccuucuucgugcuggccgccgucuaccgcaucaacuggaucaccggcgggaucgccaucgcgauggccugccuggugggccucauguggcuguccuacuucaucgccagcuuccggcuguucgcccgcacccgguccauguggagcuucaacccggagacgaacauccuccugaacgugccccugcacgggaccauccucacccgcccccugcuggaguccgagcucgucaucggcgcggugauccugcggggccaccuccgcaucgccgggcaccaccugggccggugcgacaucaaggaccugcccaaggagaucaccguggccacgagccgcacccuguccuacuacaagcucggggccagccagcgggucgccggcgacuccggguucgcggccuacagccgcuaccggaucggcaacuacaagcugaacaccgaccacuccagcuccagcgacaacaucgcccugcucgugcaguga

SEQ ID NO: 17141 - RNA, 669 nt, Artificial Sequence
  SARS-CoV-2__MT811164.1__membrane protein (M) CDS gc
auggccgacagcaacggcaccaucaccguggaggagcugaagaagcuccuggagcaguggaaccuggucaucggguuccucuuccugacguggaucugccugcuccaguucgccuacgcgaaccgcaaccgguuccuguacaucaucaagcugaucuuccucuggcugcuguggcccgugacccucgccugcuucgugcuggccgccgucuaccgcaucaacuggaucaccggcgggaucgccaucgcgauggccugccuggugggccucauguggcuguccuacuucaucgccagcuuccggcuguucgcccgcacccgguccauguggagcuucaacccggagacgaacauccuccugaacgugccccugcacgggaccauccucacccgcccccugcuggagaacgagcucgucaucggcgcggugauccugcggggccaccuccgcaucgccgggcaccaccugggccggugcgacaucaaggaccugcccaaggagaucaccguggccacgucccgcacccugagcuacuacaagcucggggccucccagcgggucgccggcgacagcggguucgcggccuacucccgcuaccggaucggcaacuacaagcugaacaccgaccacagcuccagcuccgacaacaucgcccugcucgugcaguga

SEQ ID NO: 17142 - RNA, 669 nt, Artificial Sequence
  SARS-CoV-2__MT811448.1__membrane protein (M) CDS gc
auggccgacagcaacggcaccaucaccguggaggagcugaagaagcuccuggagcaguggaaccuggucaucggguuccucuuccugacguggaucugccugcuccaguucgccuacgcgaaccgcaaccgguuccuguacaucaucaagcugaucuuccucuggcugcuguggcccgugacccucgccugcuucgugcuggccgccgucuaccgcaucaacuggaucaccggcgggaucgccaucuccauggcgugccuggugggccucauguggcugagcuacuucaucgccuccuuccggcuguucgcccgcacccggagcaugugguccuucaacccggagacgaacauccuccugaacgugccccugcacgggaccauccucacccgcccccugcuggagagcgagcucgucaucggcgccgugauccugcggggccaccuccgcaucgcggggcaccaccugggccggugcgacaucaaggaccugcccaaggagaucaccguggccacgucccgcacccugagcuacuacaagcucggggccucccagcgggucgccggcgacagcggguucgccgcguacucccgcuaccggaucggcaacuacaagcugaacaccgaccacagcuccagcuccgacaacaucgcccugcucgugcaguga

SEQ ID NO: 17143 - RNA, 669 nt, Artificial Sequence
  SARS-CoV-2__MT806776.1__membrane protein (M) CDS gc
auggccgacagcaacggcaccaucaccguggaggagcugaagaagcuccuggagcaguggaaccuggucaucggguuccucuuccugacguggaucugccugcuccaguucgccuacgcgaaccgcaaccgguuccuguacaucaucaagcugaucuuccucuggcugcuguggcccgugacccucgccugcuucgugcuggccgccgucuaccgcaucaacuggaucaccggcgggaucgccaucgcgauggccugccuggugggccucauguggcugaucuacuucaucgccuccuuccggcuguucgcccgcacccggagcaugugguccuucaacccggagacgaacauccuccugaacgugccccugcacgggaccauccucacccgcccccugcuggagagcgagcucgucaucggcgcggugauccugcggggccaccuccgcaucgccgggcaccaccugggccggugcgacaucaaggaccugcccaaggagaucaccguggccacgucccgcacccugagcuacuacaagcucggggccucccagcgggucgccggcgacagcggguucgcggccuacucccgcuaccggaucggcaacuacaagcugaacaccgaccacagcuccagcuccgacaacaucgcccugcucgugcaguga

SEQ ID NO: 17144 - RNA, 669 nt, Artificial Sequence
  SARS-CoV-2__MT806783.1__membrane protein (M) CDS gc
auggccgacagcaacggcaccaucaccguggaggagcugaagaagcuccuggagcaguggaaccuggucaucggguuccucuuccugacguggaucugccugcuccaguucgccuacgcgaaccgcaaccgguuccuguacaucaucaagcugaucuuccucuggcugcuguggcccgugacccucgccugcuucgugcuggccgccgucuaccgcaucaacuggaucaccggcgggaucgccaucgcgauggccugccuggugggccucauguggcuguccuacuucaucgccagcuuccggcuguucgcccgcacccgguccauguggagcuucaacccggagacgaacauccuccugaacgugccccugcacgggaccauccucacccgcccccugcuggaguccgagcucgucaucggcgcggugauccugcggggccaccuccgcaucgccgggcaccaccugggccggugcgacaucaaggaccugcccaaggagaucaccguggccacgagccgcacccuguccuacuacaagcucggggccagccagcgggucgccggcgacuccggguucgcggccuacagccgcuaccggaucggcaacuacaagcugaacaucgaccacuccagcuccagcgacaacaucgcccugcucgugcaguga

SEQ ID NO: 17145 - RNA, 669 nt, Artificial Sequence
  SARS-CoV-2__MT799972.1__membrane protein (M) CDS gc
auggccgacagcaacggcaccaucaccguggaggagcugaagaagcuccuggagcaguggaaccuggucaucggguuccucuuccugacguggaucugccugcuccaguucgccuacgcgaaccgcaaccgguuccuguacaucaucaagcugaucuuccucuggcugcuguggcccgugacccucgccugcuucgugcuggccgccgucuaccgcaucaacuggaucaccggcgggaucgccaucgcgauggccugccuggugggccucauguggcuguccuacuucaucgccagcuuccggcuguucgcccgcacccgguccauguggagcuucaacccggagacgaacauccuccugaacgugccccugcacgggaccauccucacccgcccccugcuggaguccgagcucgucaucggcguggugauccugcggggccaccuccgcaucgcggggcaccaccugggccggugcgacaucaaggaccugcccaaggagaucaccgucgccacgagccgcacccuguccuacuacaagcucggggccagccagcggguggccggcgacuccggguucgccgcguacagccgcuaccggaucggcaacuacaagcugaacaccgaccacuccagcuccagcgacaacaucgcccugcucgugcaguga

SEQ ID NO: 17146 - RNA, 669 nt, Artificial Sequence
  SARS-CoV-2__MT799976.1__membrane protein (M) CDS gc
auggccgacagcaacggcaccaucaccguggaggagcugaagaagcuccuggagcaguggaaccuggucaucggguuccucuuccugacguggaucugccugcuccaguucgccuacgcgaaccgcaaccgguuccuguacaucaucaagcugaucuuccucuggcugcuguggcccgugacccucgugugcuucguccuggccgccguguaccgcaucaacuggaucaccggcgggaucgccaucgccauggcgugccuggugggccucauguggcuguccuacuucaucgccagcuuccggcuguucgcccgcacccgguccauguggagcuucaacccggagacgaacauccuccugaacgucccccugcacgggaccauccucacccgcccccugcuggaguccgagcucgugaucggcgccgugauccugcggggccaccuccgcaucgcggggcaccaccugggccggugcgacaucaaggaccugcccaaggagaucaccgucgccacgagccgcacccuguccuacuacaagcucggggccagccagcggguggccggcgacuccggguucgccgcguacagccgcuaccggaucggcaacuacaagcugaacaccgaccacuccagcuccagcgacaacaucgcccugcucgugcaguga

SEQ ID NO: 17147 - RNA, 669 nt, Artificial Sequence
  SARS-CoV-2__MT795901.1__membrane protein (M) CDS gc
auggccgacagcaacggcaccaucaccguggaggagcugaagaagcuccuggagcaguggaaccuggucaucggguuccucuuccugacguggaucugccugcuccaguucgccuacgcgaaccgcaaccgguuccuguacaucaucaagcugaucuuccucuggcugcuguggcccgugacccucgccugcuucgugcuggccgccgucuaccgcaucaacuggaucaccggcgggaucgccaucgcgauggccugccuggugggccucauguggcuguccuacuucaucgccagcuuccggcuguucgcccgcacccgguccauguggagcuucaacccggagacgaacauccuccugaacgugccccugcacgggaccauccucacccgcccccugcuggaguccgagcucgucaucggcgcggugauccugcggggccaccuccgcaucgccgggcacuaccugggccggugcgacaucaaggaccugcccaaggagaucaccguggccacgagccgcacccuguccuacuacaagcucggggccagccagcgggucgccggcgacuccggguucgcggccuacagccgcuaccggaucggcaacuacaagcugaacaccgaccacuccagcuccagcgacaacaucgcccugcucgugcaguga

SEQ ID NO: 17148 - RNA, 669 nt, Artificial Sequence
  SARS-CoV-2__MT791885.1__membrane protein (M) CDS gc
auggccgacagcaacggcaccaucaccguggaggagcugaagaagcuccuggagcaguggaaccuggucaucggguuccucuuccugacguggaucugccugcuccaguucgccuacgcgaaccgcaaccgguuccuguacaucaucaagcugaucuuccucuggcugcuguggcccgugacccucgccugcuucgugcuggccgccgucuaccgcaucaacuggaucaccggcgggaucgccaucgcgauggccugccuggugggccucauguggcuguccuacuucaucgccagcuuccggcuguucgcccgcacccgguccauguggagcuucaacccggagacgaacauccuccugaacgugccccugcacgggaccauccucacccgcccccugcuggaguccgagcucgucaucggcgcggugauccugcggggccaccuccgcaucgccgggcaccaccugggccugugcgacaucaaggaccugcccaaggagaucaccguggccacgagccggacccucuccuacuacaagcugggggccagccagcgcgucgccggcgacuccggguucgcggccuacagccgguaccgcaucggcaacuacaagcugaacaccgaccacuccagcuccagcgacaacaucgcccuccuggugcaguga

SEQ ID NO: 17149 - RNA, 669 nt, Artificial Sequence
  SARS-CoV-2__MT759588.1__membrane protein (M) CDS gc
auggccgacagcaacggcaccaucaccguggaggagcugaagaagcuccuggagcaguggaaccuggucaucggguuccucuuccugacguggaucugccugcuccaguucgccuacgcgaaccgcaaccgguuccuguacaucaucaagcugaucuuccucuggcugcuguggcccgugacccucgccugcuucgugcuggccgccgucuaccgcaucaacuggaucaccggcgggaucgccaucgcgauggccugccuggugggccucauguggcuguccuacuucaucgccagcuuccggcuguucgcccgcacccucuccauguggagcuucaacccggagacgaacauccugcugaacgugccccuccacgggaccauccugacccggccccugcucgaguccgagcuggucaucggcgcggugauccugcgcggccaccuccggaucgccgggcaccaccugggccgcugcgacaucaaggaccugcccaaggagaucaccguggccacgagccggacccucuccuacuacaagcugggggccagccagcgcgucgccggcgacuccggguucgcggccuacagccgguaccgcaucggcaacuacaagcugaacaccgaccacuccagcuccagcgacaacaucgcccuccuggugcaguga

SEQ ID NO: 17150 - RNA, 669 nt, Artificial Sequence
  SARS-CoV-2__MT745712.1__membrane protein (M) CDS gc
auggccgacagcaacggcaccaucaccguggaggagcugaagaagcuccuggagcaguggaaccuggucaucggguuccucuuccugacguggaucugccugcuccaguucgccuacgcgaaccgcaaccgguuccuguacaucaucaagcugaucuuccucuggcugcuguggcccgugacccucgccugcuucgugcuggccgccgucuaccgcaucaaccugaucaccggcgggaucgccaucgcgauggccugccucgugggccugauguggcuguccuacuucaucgccagcuuccgccucuucgcccggacccgguccauguggagcuucaacccggagacgaacauccugcugaacgugccccuccacgggaccauccugacccgcccccugcucgaguccgagcuggucaucggcgcggugauccugcggggccaccuccgcaucgccgggcaccaccugggccggugcgacaucaaggaccugcccaaggagaucaccguggccacgagccgcacccucuccuacuacaagcugggggccagccagcgggucgccggcgacuccggguucgcggccuacagccgcuaccggaucggcaacuacaagcugaacaccgaccacuccagcuccagcgacaacaucgcccuccuggugcaguga

SEQ ID NO: 17151 - RNA, 669 nt, Artificial Sequence
  SARS-CoV-2__MT750032.1__membrane protein (M) CDS gc
auggccgacagcaacggcaccaucaccguggaggagcugaagaagcuccuggagcaguggaaccuggucaucggguuccucuuccugacguggaucugccugcuccaguucgccuacgcgaaccgcaaccgguuccuguacaucaucaagcugaucuuccucuggcugcuguggcccgugacccucgccugcuucgugcuggccgccgucuaccgcaucaacuggaucaccggcgggaucgccaucgcgauggccugccuggugggccucauguggcuguccuacuucaucgccagcuuccggcuguucgcccgcacccgguccauguggagcuucaacccggagacgaacauccuccugaacgugccccugcacgggaccauccucacccgcccccugcuggaguccgagcucgucaucggcgcggugauccugcggggccaccuccgcaucgccgggcaccaccugggccggugcgacaucaaggaccugcccaaggagaucaccguggccacgagccgcacccuguccuacuacaagcucggggccagccagcgggucgccggcgacuccggguucgcggccuacagccgcugccggaucggcaacuacaagcugaacaccgaccacuccagcuccagcgacaacaucgcccugcucgugcaguga

SEQ ID NO: 17152 - RNA, 669 nt, Artificial Sequence
  SARS-CoV-2__MT750363.1__membrane protein (M) CDS gc
auggccgacagcaacggcaccaucaccguggaggagcugaagaagcuccuggagcaguggaaccuggucaucggguuccucuuccugacguggaucugccugcuccaguucgccuacgcgaaccgcaaccgguuccuguacaucaucaagcugaucuuccucuggcugcuguggcccgugacccucgccugcuucgugcuggccgccgucuaccgcaucaacuggaucaccggcgggaucgccaucgcgauggccugcuucgugggccugauguggcucuccuacuucaucgccagcuuccggcuguucgcccgcacccgguccauguggagcuucaacccggagacgaacauccugcucaacgugccccugcacgggaccauccugacccgcccccuccuggaguccgagcuggucaucggcgcggugauccuccggggccaccuccgcaucgccgggcaccaccugggccggugcgacaucaaggaccugcccaaggagaucaccguggccacgagccgcacccuguccuacuacaagcugggggccagccagcgggucgccggcgacuccggguucgcggccuacagccgcuaccggaucggcaacuacaagcucaacaccgaccacuccagcuccagcgacaacaucgcccugcuggugcaguga

SEQ ID NO: 17153 - RNA, 669 nt, Artificial Sequence
  SARS-CoV-2__MT740395.1__membrane protein (M) CDS gc
auggccgacagcaacggcaccaucaccgccgaggagcugaagaagcuccuggagcaguggaaccuggugaucggguuccucuuccugacguggaucugccugcuccaguucgcguacgccaaccgcaaccgguuccuguacaucaucaagcugaucuuccucuggcugcuguggcccgucacccucgccugcuucgugcuggccgccguguaccgcaucaacuggaucaccggcgggaucgcgaucgccauggccugccuggucggccucauguggcuguccuacuucaucgccagcuuccggcuguucgcgcgcacccgguccauguggagcuucaacccggagacgaacauccuccugaacgugccccugcacgggaccauccucacccgcccccugcuggaguccgagcucgugaucggcgccgucauccugcggggccaccuccgcaucgccgggcaccaccugggccggugcgacaucaaggaccugcccaaggagaucaccguggccacgagccgcacccuguccuacuacaagcucggggccagccagcggguggcgggcgacuccggguucgccgccuacagccgcuaccggaucggcaacuacaagcugaacaccgaccacuccagcuccagcgacaacaucgcccugcucguccaguga

SEQ ID NO: 17154 - RNA, 669 nt, Artificial Sequence
  SARS-CoV-2__MT731744.1__membrane protein (M) CDS gc
auggccgacuucaacggcaccaucaccguggaggagcugaagaagcuccuggagcaguggaaccuggucaucggguuccucuuccugacguggaucugccugcuccaguucgccuacgcgaaccgcaaccgguuccuguacaucaucaagcugaucuuccucuggcugcuguggcccgugacccucgccugcuucgugcuggccgccgucuaccgcaucaacuggaucaccggcgggaucgccaucgcgauggccugccuggugggccucauguggcugagcuacuucaucgccuccuuccggcuguucgcccgcacccggagcaugugguccuucaacccggagacgaacauccuccugaacgugccccugcacgggaccauccucacccgcccccugcuggagagcgagcucgucaucggcgcggugauccugcggggccaccuccgcaucgccgggcaccaccugggccggugcgacaucaaggaccugcccaaggagaucaccguggccacgucccgcacccugagcuacuacaagcucggggccucccagcgggucgccggcgacagcggguucgcggccuacucccgcuaccggaucggcaacuacaagcugaacaccgaccacagcuccagcuccgacaacaucgcccugcucgugcaguga

SEQ ID NO: 17155 - RNA, 669 nt, Artificial Sequence
  SARS-CoV-2__MT706390.1__membrane protein (M) CDS gc
auggccgacagcaacggcaccaucaccguggaggagcugaagaagcuccuggagcaguggaaccuggucaucggguuccucuuccugacguggaucugccugcuccaguucgccuacgcgaaccgcaaccgguuccuguacaucaucaagcugaucuuccucuggcugcuguggcccgugacccucgccugcuucgugcuggccgccgucuaccgcaucaacuggaucaccggcgggaucgccaucgcgauggccugccuggugggccucauguggcuguccuacuucaucgccagcuuccggcuguucgcccgcacccgguccauguggagcuucaacccggagacgaacauccuccugaacgugccccugcacgggaccaucgucacccgcccccuccuggaguccgagcuggugaucggcgcggugauccuccggggccaccuccgcaucgccgggcaccaccugggccggugcgacaucaaggaccugcccaaggagaucaccgucgccacgagccgcacccuguccuacuacaagcugggggccagccagcggguggccggcgacuccggguucgcggccuacagccgcuaccggaucggcaacuacaagcucaacaccgaccacuccagcuccagcgacaacaucgcccugcuggugcaguga

SEQ ID NO: 17156 - RNA, 669 nt, Artificial Sequence
  SARS-CoV-2__MT655135.1__membrane protein (M) CDS gc
auggccgacagcaacggcaccaucaccguggaggagcugaagaagcuccuggagcaguggaaccuggucaucggguuccucuuccugacguggaucugccugcuccaguucgccuacgcgaaccgcaaccgguuccuguacaucaucaagcugaucuuccucuggcugcuguggcccgugacccugaccugcuucgugcuggccgccgucuaccgcaucaacuggaucaccggcgggaucgccaucgccauggcgugccuggugggccucauguggcuguccuacuucaucgccagcuuccggcuguucgcccgcacgcgguccauguggagcuucaacccggagaccaacauccuccugaacgugccccugcacgggaccauccucacccgcccccugcuggaguccgagcucgucaucggcgccgugauccugcggggccaccuccgcaucgcggggcaccaccucggccggugcgacaucaaggaccugcccaaggagaucacgguggccaccagccgcacccuguccuacuacaagcucggggccagccagcgggucgccggcgacuccggguucgccgcguacagccgcuaccggaucggcaacuacaagcugaacaccgaccacuccagcuccagcgacaacaucgcccugcucgugcaguga

SEQ ID NO: 17157 - RNA, 669 nt, Artificial Sequence
  SARS-CoV-2__MT641735.1__membrane protein (M) CDS gc
auggccgacagcaacggcaccaucaccguggaggagcugaagaagcuccuggagcaguggaaccuggucaucggguuccucuuccugacguggaucugccugcuccaguucgccuacgcgaaccgcaaccgguucuucuacaucaucaagcugaucuuccuguggcuccuguggcccgugacccuggccugcuucgugcucgccgccgucuaccgcaucaacuggaucaccggcgggaucgccaucgcgauggccugccuggugggccugauguggcucuccuacuucaucgccagcuuccggcuguucgcccgcacccgguccauguggagcuucaacccggagacgaacauccugcucaacgugccccugcacgggaccauccugacccgcccccuccuggaguccgagcuggucaucggcgcggugauccuccggggccaccuccgcaucgccgggcaccaccugggccggugcgacaucaaggaccugcccaaggagaucaccguggccacgagccgcacccuguccuacuacaagcugggggccagccagcgggucgccggcgacuccggguucgcggccuacagccgcuaccggaucggcaacuacaagcucaacaccgaccacuccagcuccagcgacaacaucgcccugcuggugcaguga

SEQ ID NO: 17158 - RNA, 669 nt, Artificial Sequence
  SARS-CoV-2__MT641744.1__membrane protein (M) CDS gc
auggccgacagcaacggcaccaucaccguggaggagcugaagaagcuccuggagcaguggaaccuggucaucggguuccucuuccugacguggaucugccugcuccaguucgccuacgcgaaccgcaaccgguuccuguacaucaucaagcugaucuuccucuggcugcuguggcccgugacccucgccugcuucgugcuggccgccgucuaccgcaucaacuggaucaccggcgggaucgccaucgcgauggccugccuggugggccucauguggcuguccuacuucaucgccagcuuccggcuguucgcccgcacccgguccauguggagcuucaacccggagacgaacauccuccugaacgugccccugcacgggaccauccucacccgcccccugcuggaguccgagcucgucaucggcgcggugauccugcacggccaccuccggaucgccgggcaccaccugggccgcugcgacaucaaggaccugcccaaggagaucaccguggccacgagccggacccuguccuacuacaagcucggggccagccagcgcgucgccggcgacuccggguucgcggccuacagccgguaccgcaucggcaacuacaagcugaacaccgaccacuccagcuccagcgacaacaucgcccugcucgugcaguga

SEQ ID NO: 17159 - RNA, 669 nt, Artificial Sequence
  SARS-CoV-2__MT642078.1__membrane protein (M) CDS gc
auggccgacagcaacggcaccaucaccguggaggagcugaagaagcuccuggagcaguggaaccuggucaucggguuccucuuccugacguggaucugccugcuccaguucgccuacgcgaaccgcaaccgguuccuguacaucaucaagcugaucuuccucuggcugcuguggcccgugacccucgccuucuucgugcuggccgccgucuaccgcaucaacuggaucaccggcgggaucgccaucgcgauggccugccuggugggccucauguggcuguccuacuucaucgccagcuuccggcuguucgcccgcacccgguccauguggagcuucaacccggagacgaacauccuccugaacgugccccugcacgggaccauccucacccgcccccugcuggaguccgagcucgucaucggcgcggugauccugcggggccaccuccgcaucgccgggcaccaccugggccggugcgacaucaaggaccugcccaaggagaucaccguggccacgagccgcacccuguccuacuacaagcucggggccagccagcgggucgccggcgacuccggguucgcggccuacagccgcuaccggaucggcaacuacaagcugaacaccgaccacuccagcuccagcgacaacaucgcccugcucgugcaguga

SEQ ID NO: 17160 - RNA, 669 nt, Artificial Sequence
  SARS-CoV-2__MT627217.1__membrane protein (M) CDS gc
auggccgacagcaacggcaccaucaccguggaggagcugaagaagcuccuggagcaguggaaccuggucaucguguuccucuuccugacguggaucugccugcuccaguucgccuacgcgaaccgcaaccgguuccuguacaucaucaagcugaucuuccucuggcugcuguggcccgugacccucgccugcuucguccuggccgccguguaccgcaucaacuggaucaccgggggcaucgccaucgcgauggccugccugguggggcucauguggcuguccuacuucaucgccagcuuccggcuguucgcccgcacccgguccauguggagcuucaacccggagacgaacauccuccugaacgucccccugcacggcaccauccucacccgcccccugcuggaguccgagcucgugaucggggcggugauccugcggggccaccuccgcaucgccggccaccaccuggggcggugcgacaucaaggaccugcccaaggagaucaccgucgccacgagccgcacccuguccuacuacaagcucggcgccagccagcggguggccggggacuccggcuucgcggccuacagccgcuaccggaucgggaacuacaagcugaacaccgaccacuccagcuccagcgacaacaucgcccugcucgugcaguga

SEQ ID NO: 17161 - RNA, 669 nt, Artificial Sequence
  SARS-CoV-2__MT627751.1__membrane protein (M) CDS gc
auggccgacagcaacggcaccaucaccguggaggagcugaagaagcuccuggagcaguggaaccuggucaucggguuccucuuccugacguggaucugccugcuccaguucgccuacgcgaaccgcaaccgguuccuguacaucaucaagcugaucuuccucuggcugcuguggcccgugacccucgccugcuucgugcuggccgccaucuaccgcaucaacuggaucaccggcgggaucgccaucgcgauggccugccuggucggccucauguggcuguccuacuucaucgccagcuuccggcuguucgcccgcacccgguccauguggagcuucaacccggagacgaacauccuccugaacgugccccugcacgggaccauccucacccgcccccugcuggaguccgagcucgugaucggcgcggucauccugcggggccaccuccgcaucgccgggcaccaccugggccggugcgacaucaaggaccugcccaaggagaucaccguggccacgagccgcacccuguccuacuacaagcucggggccagccagcggguggccggcgacuccggguucgcggccuacagccgcuaccggaucggcaacuacaagcugaacaccgaccacuccagcuccagcgacaacaucgcccugcucguccaguga

SEQ ID NO: 17162 - RNA, 594 nt, Artificial Sequence
  SARS-CoV-2__MT632615.1__membrane protein (M) CDS gc
uuccuguuccucaccuggaucugccugcugcaguucgccuacgccaaccgcaaccgguuccucuacaucaucaagcugaucuuccuguggcuccuguggcccgugacccuggcgugcuucguccucgccgccguguaccgcaucaacuggaucacgggcgggaucgccaucgccauggcgugccuggugggccugauguggcucagcuacuucaucgccuccuuccggcuguucgcccgcacccggagcaugugguccuucaacccggagaccaacauccugcucaacgucccccugcacgggaccauccugacgcgcccccuccuggagagcgagcuggugaucggcgccgugauccuccgggggcaccuccgcaucgcgggccaccaccugggccggugcgacaucaaggaccugcccaaggagaucaccgucgccaccucccgcacccugagcuacuacaagcugggggccucccagcggguggccggcgacagcggguucgccgcguacucccgcuaccggaucggcaacuacaagcucaacacggaccacagcuccagcuccgacaacaucgcccugcuggugcaguga

SEQ ID NO: 17163 - RNA, 669 nt, Artificial Sequence
  SARS-CoV-2__MT568645.1__membrane protein (M) CDS gc
auggccgacagcaacggcaccaucaccguggaggaguucaagaagcugcucgagcaguggaaccuggucaucggguuccuguuccucacguggaucugccugcugcaguucgccuacgcgaaccgcaaccgguuccucuacaucaucaagcugaucuuccuguggcuccuguggcccgugacccuggccugcuucgugcucgccgccgucuaccgcaucaacuggaucaccggcgggaucgccaucgcgauggccugccuggugggccugauguggcucuccuacuucaucgccagcuuccggcuguucgcccgcacccgguccauguggagcuucaacccggagacgaacauccugcucaacgugccccugcacgggaccauccugacccgcccccuccuggaguccgagcuggucaucggcgcggugauccuccggggccaccuccgcaucgccgggcaccaccugggccggugcgacaucaaggaccugcccaaggagaucaccguggccacgagccgcacccuguccuacuacaagcugggggccagccagcgggucgccggcgacuccggguucgcggccuacagccgcuaccggaucggcaacuacaagcucaacaccgaccacuccagcuccagcgacaacaucgcccugcuggugcaguga

SEQ ID NO: 17164 - RNA, 669 nt, Artificial Sequence
  SARS-CoV-2__MT520347.1__membrane protein (M) CDS gc
auggccgacagcaacggcaccaucaccguggaggagcugaagaagcuccuggagcaguggaaccuggucaucggguuccucuuccugacguggaucugccugcuccaguucgccuacgcgaaccgcaaccgguuccuguacaucaucaagcugaucuuccucuggcugcuguggcccgugacccucgccugcuucgugcuggccgccgucuaccgcaucaacuggaucaccggcgggaucgccaucgcgauggccugccuggugucccucauguggcugagcuacuucaucgccuccuuccggcuguucgcccgcacccggagcaugugguccuucaacccggagacgaacauccuccugaacgugccccugcacggcaccauccucacccgcccccugcuggagagcgagcucgucaucggggcggugauccugcggggccaccuccgcaucgccggccaccaccuggggcggugcgacaucaaggaccugcccaaggagaucaccguggccacgucccgcacccugagcuacuacaagcucggcgccucccagcgggucgccggggacagcggcuucgcggccuacucccgcuaccggaucgggaacuacaagcugaacaccgaccacagcuccagcuccgacaacaucgcccugcucgugcaguga

SEQ ID NO: 17165 - RNA, 669 nt, Artificial Sequence
  SARS-CoV-2__MT520458.1__membrane protein (M) CDS gc
auggccgacagcaacggcaccaucaccguggaggagcugaagaagcuccuggagcaguggaaccuggucaucggguuccucuuccugacguggaucugccugcuccaguucgccuacgcgaaccgcaaccgguuccuguacaucaucaagcugaucuuccucuggcugcuguggcccgugacccucgccugcuucgugcuggccgccgucuaccgcaucaacuggaucaccggcgggaucgccaucgcgauggccugccuggugggccucauguggcuguccuacuucaucgccagcuuccggcuguucgcccgcacccgguccauguggagcuucaacccggagacgaacauccuccugaacgugccccugcacgggaccauccucacccgcucccugcuggagagcgagcucgucaucggcgcggugauccugcggggccaccuccgcaucgccgggcaccaccugggccggugcgacaucaaggaccugcccaaggagaucaccguggccacgucccgcacccugagcuacuacaagcucggggccucccagcgggucgccggcgacagcggguucgcggccuacucccgcuaccggaucggcaacuacaagcugaacaccgaccacagcuccagcuccgacaacaucgcccugcucgugcaguga

SEQ ID NO: 17166 - RNA, 669 nt, Artificial Sequence
  SARS-CoV-2__MT558681.1__membrane protein (M) CDS gc
auggccgacagcaacggcaccaucaccguggaggagcugaagaagcuccuggagcaguggaaccuggucaucggguuccucuuccugacguggaucugccugcuccaguucgccuacgcgaaccgcaaccgguuccuguacaucaucaagcugaucuuccucuggcugcuguggcccgugacccucgccugcuucgugcuggccgccgucuaccgcaucaacuggaucaccggcgggaucgccaucgcgauggccugccuggugggccucauguggcuguccuacuucaucgccagcuuccggcuguucgcccgcacccgguccauguggagcuucaacccggagacgaacauccuccugaacgugccccugcacgggaccauccucacccgcccccugcuggaguccgagcucgucaucggcgcggugaucuuccggggccaccuccgcaucgccgggcaccaccugggccggugcgacaucaaggaccugcccaaggagaucaccguggccacgagccgcacccuguccuacuacaagcugggggccagccagcgggucgccggcgacuccggguucgcggccuacagccgcuaccggaucggcaacuacaagcucaacaccgaccacuccagcuccagcgacaacaucgcccugcuggugcaguga

SEQ ID NO: 17167 - RNA, 669 nt, Artificial Sequence
  SARS-CoV-2__MT507282.1__membrane protein (M) CDS gc
auggccgacagcaacggcaccaucaccguggaggagcugaagaagcuccuggagcaguggaaccuggucaucggguuccucuuccugacguggaucugccugcuccaguucgccuacgcgaaccgcaaccgguuccuguacaucaucaagcugaucuuccucuggcugcuguggcccgugacccucgccugcuucgugcuggccgccgucuaccgcaucaacuggaucaccggcgggaucgccaucgcgauggccugccuggugggccucauguggcuguccuacuucaucgccagcuuccggcuguucgcccgcacccgguccauguggagcuucaacccggagacgaacauccuccugaacgugccccugcacgggaccauccucacccgcccccugcuggaguccgagaucgucaucggcgcggugauccuccggggccaccuccgcaucgccgggcaccaccugggccggugcgacaucaaggaccugcccaaggagaucaccguggccacgagccgcacccuguccuacuacaagcugggggccagccagcgggucgccggcgacuccggguucgcggccuacagccgcuaccggaucggcaacuacaagcucaacaccgaccacuccagcuccagcgacaacaucgcccugcuggugcaguga

SEQ ID NO: 17168 - RNA, 669 nt, Artificial Sequence
  SARS-CoV-2__MT477859.1__membrane protein (M) CDS gc
auggccgacagcaacggcaccaucaccguggaggagcugaagaagcuccuggagcaguggaaccuggucaucggguuccucuuccugacguggaucugccugcuccaguucgccuacgcgaaccgcaaccgguuccuguacaucaucaagcugaucuuccucuggcugcuguggcccgugacccucgccugcuucgugcuggccgccgucuaccgcaucaacuggaucaccggcgggaucgccaucgcgauggccugccuggugggccucauguggcuguccuacuucaucgccagcuuccggcuguucgcccgcacccgguccauguggagcuucaacccggagacgaacauccuccugaacgugcccuuccacgggaccauccugacccgcccccuccuggaguccgagcuggucaucggcgcggugauccuccggggccaccuccgcaucgccgggcaccaccugggccggugcgacaucaaggaccugcccaaggagaucaccguggccacgagccgcacccuguccuacuacaagcugggggccagccagcgggucgccggcgacuccggguucgcggccuacagccgcuaccggaucggcaacuacaagcucaacaccgaccacuccagcuccagcgacaacaucgcccugcuggugcaguga

SEQ ID NO: 17169 - RNA, 669 nt, Artificial Sequence
  SARS-CoV-2__MT470125.1__membrane protein (M) CDS gc
auggccgacagcaacggcaccaucaccguggaggagcugaagaagcuccuggagcaguggaaccuggucaucggguuccucuuccugacguggaucugccugcuccaguucgccuacgcgaaccgcaaccgguuccuguacaucaucaagcugaucuuccucuggcugcuguggcccgugacccucgccugcuucgugcuggccgucguguaccgcaucaacuggaucaccggcgggaucgccaucgccauggcgugccuggugggccucauguggcuguccuacuucaucgccagcuuccggcuguucgcccgcacccgguccauguggagcuucaacccggagacgaacauccuccugaacgucccccugcacgggaccauccucacccgcccccugcuggaguccgagcucgugaucggcgccgugauccugcggggccaccuccgcaucgcggggcaccaccugggccggugcgacaucaaggaccugcccaaggagaucaccgucgccacgagccgcacccuguccuacuacaagcucggggccagccagcggguggccggcgacuccggguucgccgcguacagccgcuaccggaucggcaacuacaagcugaacaccgaccacuccagcuccagcgacaacaucgcccugcucgugcaguga

SEQ ID NO: 17170 - RNA, 669 nt, Artificial Sequence
  SARS-CoV-2__MT451051.1__membrane protein (M) CDS gc
auggccgacagcaacggcaccaucaccguggaggagcugaagaagcuccuggagcaguggaaccuggucaucggguuccucuuccugacguggaucugccugcuccaguucgccuacgcgaaccgcaaccgguuccuguacaucaucaagcugaucuuccucuggcugcuguggcccgugacccucgccugcuucgugcuggccgccgucuaccgcaucaacuggaucaccggcgggaucgccaucgcgauggccugccuggugggccucauguggcuguccuacuucaucgccagcuuccggcuguucgcccgcacccgguccauguggagcuucaacccggagacgaacauccuccugaacgugccccugcacgggaccauccucacccgcccccugcuggaguccgagcucgucaucggcgcggugauccugcggggccaccuccgcaucgccgggcaccaccugggccggugcgacaucaaggaccugcccaaggagaucaccguggccacgagccgcacccuguccuacuacaagcucggggccagccagcgggucgccggcgacuccggguucgcggccuacagccgcuaccggaucggcaacuacaagcugaacaccgaccacuccagcuccaucgacaacaucgcccugcucgugcaguga

SEQ ID NO: 17171 - RNA, 669 nt, Artificial Sequence
  SARS-CoV-2__MT429186.1__membrane protein (M) CDS gc
auggccgacagcaacggcaccaucaccguggaggagcugaagaagcuccuggagcaguggaaccuggucaucggguuccucuuccugacguggaucugccugcuccaguucuccuacgccaaccgcaaccgguuccuguacaucaucaagcugaucuuccucuggcugcuguggcccgugacccucgcgugcuucgugcuggccgccgucuaccgcaucaacuggaucaccggcgggaucgccaucgccauggcgugccuggugggccucauguggcugagcuacuucaucgccuccuuccggcuguucgcccgcacccggagcaugugguccuucaacccggagacgaacauccuccugaacgugccccugcacgggaccauccucacccgcccccugcuggagagcgagcucgucaucggcgccgugauccugcggggccaccuccgcaucgcggggcaccaccugggccggugcgacaucaaggaccugcccaaggagaucaccguggccacgucccgcacccugagcuacuacaagcucggggccucccagcgggucgccggcgacagcggguucgccgcguacucccgcuaccggaucggcaacuacaagcugaacaccgaccacagcuccagcuccgacaacaucgcccugcucgugcaguga

SEQ ID NO: 17172 - RNA, 669 nt, Artificial Sequence
  SARS-CoV-2__MT358656.1__membrane protein (M) CDS gc
auggccgacagcaacggcaccaucaccguggaggagcugaagaagcuccuggagcaguggaaccuggucaucggguuccucuuccugacguggaucugccugcuccaguucgccuacgcgaaccgcaaccgguuccuguacaucaucaagcugaucuuccucuggcugcuguggcccgugacccucgccugcuucgugcuggccgccgucuaccgcaucaacuggaucaccggcgggaucgccaucgcgauggccugccuggugggccucauguggcuguccuacuucaucgccagcuuccggcuguucgcccgcacccgguccauguggagcuucaacccggagacgaacauccuccugaacgugccccugcacgggaccauccucacccgcccccugcuggaguccgagcucgucaucggcgcggugauccugcggggccaccuccgcaucgccgggcaccaccugggccggugcgacaucaaggaccugcccaaggagaucaccguggccacgagccgcacccuguccuacuacaagcucggggccagccagcgggucgccggcaacuccggguucgcggccuacagccgcuaccggaucggcaacuacaagcugaacaccgaccacuccagcuccagcgacaacaucgcccugcucgugcaguga

SEQ ID NO: 17173 - RNA, 1242 nt, Artificial Sequence
  MERS-CoV/MERS-CoV-Jeddah-human-1__KF958702.1__nucleocapsid protein (N) CDS gc
auggccagccccgccgcgccgcgcgccguguccuucgccgacaacaacgacaucaccaacaccaaccugagccggggccgcgggcggaaccccaagccccgcgccgcccccaacaacacggucuccugguacaccggccucacccagcacgggaaggugccgcugaccuucccgcccggccagggggugccccugaacgcgaacagcacgcccgcccagaacgccggcuacuggcggcgccaggaccggaagaucaacaccggcaacgggaucaagcagcucgcgccccgcugguacuucuacuacaccggcaccgggcccgaggccgcccugcccuuccgggccgucaaggacggcaucgugugggugcacgaggacggggccacggacgccccguccaccuucggcacccgcaaccccaacaacgacagcgcgaucgucacccaguucgcccccggcacgaagcugcccaagaacuuccacaucgaggggaccggcgggaacucccagagcuccagccgggccuccagcgugucccgcaacagcucccggagcuccagccagggcucccgcagcggcaacagcacccgggggaccuccccgggccccagcgggaucggcgccgucgggggcgaccuccuguaccuggaccuccugaaccgccugcaggcccucgaguccggcaaggugaagcagagccagcccaaggugaucacgaagaaggacgcggccgccgccaagaacaagaugcggcacaagcgcaccuccaccaagagcuucaacauggugcaggccuucgggcugcggggccccggggaccugcagggcaacuucggggaccuccagcugaacaagcugggcaccgaggacccgcgcuggccccagaucgcggagcucgcccccacggccuccgccuucaugggcaugagccaguucaagcugacccaccagaacaacgacgaccacgggaaccccgucuacuuccugcgguacuccggcgccaucaagcucgacccgaagaaccccaacuacaacaaguggcuggagcugcucgagcagaacaucgacgcguacaagaccuuccccaagaaggagaagaagcagaaggcccccaaggaggagagcaccgaccagauguccgagccgcccaaggagcagcgcgugcaggggagcaucacgcagcgcacccggacccgccccuccgugcagccgggccccaugaucgacgucaacaccgacuga

SEQ ID NO: 17174 - RNA, 1242 nt, Artificial Sequence; identical to SEQ ID NO: 17173
  MERS-CoV/Al-Hasa_4_2013__KF186564.1__nucleocapsid protein (N) CDS gc

SEQ ID NO: 17175 - RNA, 1242 nt, Artificial Sequence; identical to SEQ ID NO: 17173
  MERS-CoV/Riyadh_14_2013__KJ156934.1__nucleocapsid protein (N) CDS gc

SEQ ID NO: 17176 - RNA, 1236 nt, Artificial Sequence
  MERS-CoV/England 1__NC_038294.1__nucleocapsid protein (N) CDS gc
auggccagccccgccgcgccgcgcgccguguccuucgccgacaacaacgacaucaccaacaccaaccugagccggggccgcgggcggaaccccaagccccgcgccgcccccaacaacacggucuccugguacaccggccucacccagcacgggaaggugccgcugaccuucccgcccggccagggggugccccugaacgcgaacagcacgcccgcccagaacgccggcuacuggcggcgccaggaccggaagaucaacaccggcaacgggaucaagcagcucgcgccccgcugguacuucuacuacaccggcaccgggcccgaggccgcccugcccuuccgggccgucaaggacggcaucgugugggugcacgaggacggggccacggacgccccguccaccuucggcacccgcaaccccaacaacgacagcgcgaucgucacccaguucgcccccggcacgaagcugcccaagaacuuccacaucgaggggaccggcgggaacucccagagcuccagccgggccuccagcgugucccgcaacagcucccggagcuccagccagggcucccgcagcggcaacagcacccgggggaccuccccgggccccagcgggaucggcgccgucgggggcgaccuccuguaccuggaccuccugaaccgccugcaggcccucgaguccggcaaggugaagcagagccagcccaaggugaucacgaagaaggacgcggccgccgccaagaacaagaugcggcacaagcgcaccuccaccaagagcuucaacauggugcaggccuucgggcugcggggccccggggaccugcagggcaacuucggggaccuccagcugaacaagcugggcaccgaggacccgcgcuggccccagaucgcggagcucgcccccacggccuccgccuucaugggcaugagccaguucaagcugacccaccagaacaacgacgaccacgggaaccccgucuacuuccugcgguacuccggcgccaucaagcucgacccgaagaaccccaacuacaacaaguggcuggagcugcucgagcagaacaucgacgcguacaagaccuuccccaagaaggagaagaagcagaaggcccccaaggaggagagcaccgaccagauguccgagccgcccaaggagcaccgcgugcaggggacgcagcgcacccggacccgccccagcgugcagccgggccccaugaucgacgucaacaccgacuga

SEQ ID NO: 17177 - RNA, 1269 nt, Artificial Sequence
  SARS-CoV/Tor2__NC_004718.3__nucleocapsid protein (N) CDS gc
augagcgacaacggcccccaguccaaccagcgcagcgccccgcggaucaccuucgggggccccaccgacuccacggacaacaaccagaacgggggccgcaacggggcccggcccaagcagcgccggccccagggccugccgaacaacaccgcgagcugguucaccgcccucacccagcacggcaaggaggagcugcgcuucccccgggggcagggcgugcccaucaacacgaacuccgggcccgacgaccagaucggcuacuaccgccgggccacccgccggguccgcgggggcgacggcaagaugaaggagcugagcccgcggugguacuucuacuaccucgggaccggccccgaggccucccugcccuacggggccaacaaggagggcaucguguggguggcgaccgagggcgcccugaacacgcccaaggaccacaucgggacccgcaacccgaacaacaacgccgccaccguccuccagcugccccagggcaccacgcugcccaagggguucuacgcggagggcagccgcgggggcucccaggccagcucccggagcuccagccggucccgcggcaacagccggaacuccacccccgggagcucccgcggcaacagcccggcccggauggccagcgggggcggggagaccgcccucgcgcugcugcuccuggaccgccugaaccagcucgaguccaaggugagcggcaagggccagcagcagcaggggcagaccgugacgaagaaguccgccgccgaggccagcaagaagccccgccagaagcggaccgccaccaagcaguacaacgucacccaggcguucggccgccgggggcccgagcagacgcagggcaacuucggggaccaggaccugauccgccagggcaccgacuacaagcacuggccccagaucgcccaguucgccccguccgccagcgccuucuucggcaugucccggaucgggauggaggugacccccagcggcaccuggcugacguaccacggggcgaucaagcucgacgacaaggacccccaguucaaggacaacgugauccugcugaacaagcacaucgacgccuacaagaccuucccgcccaccgagcccaagaaggacaagaagaagaagaccgacgaggcccagccccucccccagcgccagaagaagcagccgacggucacccugcugcccgccgccgacauggacgacuucucccggcagcuccagaacagcauguccggcgcgagcgccgacuccacccaggccuga

SEQ ID NO: 17178 - RNA, 1347 nt, Artificial Sequence
  HCoV/OC43__NC_006213.1__nucleocapsid protein (N) CDS gc
augagcuucacccccggcaagcaguccagcucccgcgccagcuccgggaaccggagcggcaacgggauccugaagugggccgaccaguccgaccaguuccgcaacgugcagacccggggccgccgggcgcagccgaagcagacggccaccagccagcagcccuccgggggcaacgucgugcccuacuacagcugguucuccggcaucacccaguuccagaaggggaaggaguucgaguucguggagggccaggggguccccaucgccccgggcgugcccgccaccgaggccaagggguacugguaccgccacaaccggcgcagcuucaagacggcggacggcaaccagcggcagcuccugccccgcugguacuucuacuaccugggcaccgggccccacgccaaggaccaguacggcaccgacaucgacgggguguacugggucgccuccaaccaggccgacgugaacaccccggcggacaucguggaccgggaccccagcuccgacgaggccauccccacgcgcuucccgcccggcaccguccucccccagggcuacuacaucgaggggagcggccgguccgcccccaacagccgcuccaccagccggaccagcucccgcgccagcuccgccgggagccggucccgcgcgaacagcggcaaccggacgcccaccuccggggugaccccggacauggccgaccagaucgccagccuggugcuggccaagcucggcaaggacgccaccaagccccagcaggucacgaagcacaccgcgaaggaggugcgccagaagauccugaacaagccccggcagaagcgcucccccaacaagcagugcaccgugcagcagugcuucggcaagcgcgggccgaaccagaacuucggcgggggcgagaugcugaagcucgggaccagcgacccccaguuccccauccuggccgagcuggcccccacggccggcgccuucuucuucggcucccggcucgagcuggcgaagguccagaaccugagcgggaacccggacgagccccagaaggacguguacgagcuccgcuacaacggcgccauccgguucgacuccacccugagcggguucgagaccaucaugaaggugcugaacgagaaccucaacgccuaccagcagcaggacggcaugaugaacaugucccccaagccccagcgccagcgggggcacaagaacggccagggcgagaacgacaacaucagcgucgccgugccgaagucccgcgugcagcagaacaagagccgggagcugaccgccgaggacaucucccugcucaagaagauggacgagcccuacacggaggacaccagcgagaucuga

SEQ ID NO: 17179 - RNA, 1326 nt, Artificial Sequence
  HCoV/HKU1__NC_006577.2__nucleocapsid protein (N) CDS gc
augagcuacacccccggccacuacgccgggucccgcagcuccagcggcaaccgguccgggauccugaagaagaccagcugggccgaccaguccgagcgcaacuaccagacguucaaccggggccgcaagacccagccgaaguucaccgugagcacccagccccaggggaacacgaucccccacuacuccugguucagcggcaucacccaguuccagaagggccgggacuucaaguucuccgacgggcagggcguccccaucgcguucggggugccgcccagcgaggccaagggcuacugguaccgccacucccggcgcagcuucaagaccgccgacgggcagcagaagcagcuccugccccggugguacuucuacuaccugggcaccggccccuacgccaacgccuccuacggggagagccucgagggcguguucugggucgcgaaccaccaggccgacacguccaccccgagcgacguguccagccgcgaccccaccacccaggaggccauccccacgcgguucccgcccgggaccauccugccccagggcuacuacguggagggcagcgggcgcuccgccagcaacucccggcccggcagccgcucccagagccgggggcccaacaaccgcucccugagccgguccaacagcaacuuccgccacuccgacagcaucgucaagccggacauggcggacgagaucgccaaccucgugcuggccaagcugggcaaggacuccaagccccagcaggucaccaagcagaacgccaaggagauccggcacaagauccucaccaagccccgccagaagcggacgcccaacaagcacugcaacgugcagcagugcuucgggaagcgcggcccgagccagaacuucggcaacgccgagaugcugaagcuggggaccaacgacccccaguuccccauccucgcggagcuggcccccaccccgggcgccuucuucuucggguccaagcuggaccucgugaagcgcgacagcgaggccgacucccccgugaaggacgucuucgagcugcacuacagcggcuccauccgguucgacagcacccugcccggguucgagacgaucaugaaggugcucgaggagaaccugaacgccuacgugaacagcaaccagaacaccgacuccgacagccuguccagcaagccccagcgcaagcggggcgucaagcagcucccggagcaguucgacucccugaaccugagcgcgggcacccagcacaucuccaacgacuucacccccgaggaccacagccuccuggccacgcuggacgaccccuacguggaggacuccguggccuga

SEQ ID NO: 17180 - RNA, 1170 nt, Artificial Sequence
  HCoV/229E/BN1/GER/2015__KU291448.1__nucleocapsid protein (N) CDS gc
auggccaccgugaagugggccgacgcgagcgagccccagcgcggccggcaggggcgcaucccguacucccuguacagcccccuccuggucgacuccgagcagcccuggaaggugaucccccggaaccuggugccggucaacaagaaggacaagaacaagcucaucggcuacuggaacgugcagaagcgcuuccggacccgcaaggggaagcggguggaccugagccccaagcugcacuucuacuaccucggcacggggccccacaaggacgccaaguuccgcgagcgggucgagggcguggugugggucgccguggacggcgccaagaccgagcccaccggguacggcgugcgccggaagaacuccgagccggagaucccccacuucaaccagaagcugcccaacggggucaccguggccgaggagcccgacagccgcgcgccgucccggagccagucccgcagccagucccggagccgcggcgaguccaagagccagucccggaaccccagcuccgaccgcaaccacaacagccaggacgacaucaugaaggccguggccgccgcgcugaagucccucggguucgacaagccccaggagaaggacaagaaguccgccaagacgggcacccccaagccgagccggaaccagagccccgccagcucccagagcgccgccaagauccuggcgcgcucccagagcuccgagaccaaggagcagaagcacgagaugcagaagccccgguggaagcgccagcccaacgacgacgucaccagcaacgugacgcagugcuucggcccgcgcgaccuggaccacaacuucggguccgccggcguggucgccaacggggugaaggccaagggcuacccccaguucgccgagcucgugcccagcaccgcggccaugcuguucgacucccacaucgucagcaaggaguccggcaacaccguggugcugaccuucacgacccgggucaccgugcccaaggaccacccgcaccucgggaaguuccuggaggagcugaacgccuucacccgcgagaugcagcagcagccccuccugaaccccagcgcccuggaguucaaccccucccagacgagcccggccaccgucgagcccgugcgggacgagguguccaucgagaccgacaucaucgacgaggucaacuga

SEQ ID NO: 17181 - RNA, 1134 nt, Artificial Sequence
  HCoV/NL63/RPTEC/2004__JX504050.1__nucleocapsid protein (N) CDS gc
auggccagcgugaacugggccgacgaccgcgcggcccggaagaaguucccgccgcccuccuucuacaugccccugcucgucagcuccgacaaggcccccuaccgcgugaucccccggaaccuggugcccaucggcaaggggaacaaggacgagcagaucggcuacuggaacguccaggagcgcuggcggaugcgccgggggcagcgcguggaccugccgcccaaggugcacuucuacuaccucggcaccgggccccacaaggaccugaaguuccggcagcgcagcgacggcgucguguggguggccaaggagggcgccaagaccgucaacacgucccuggggaaccggaagcgcaaccagaagccccucgagcccaaguucagcaucgcgcugcccccggagcuguccgugguggaguucgaggaccggagcaacaacuccagccgcgccuccagccgguccagcacccgcaacaacucccgggacagcucccgcagcaccucccggcagcagagccgcacccggagcgacuccaaccagagcuccagcgaccucgucgccgccgugacgcuggcgcugaagaaccucggcuucgacaaccaguccaagagccccuccagcuccgggaccagcacccccaagaagcccaacaagccgcugucccagccccgcgccgacaagcccagccagcugaagaagccccgcuggaagcgggugccgacccgcgaggagaacgucauccagugcuucggcccccgggacuucaaccacaacaugggggacuccgaccucgugcagaacggcguggacgccaagggcuucccccagcuggccgagcugauccccaaccaggccgcccucuucuucgacagcgaggucuccacggacgaggugggggacaacgugcagaucaccuacaccuacaagaugcuggucgcgaaggacaacaagaaccugccgaaguucaucgagcagaucagcgccuucaccaagcccuccagcaucaaggagaugcagucccagagcagccacguggcccagaacacggugcucaacgccuccauccccgagagcaagccccuggcggacgacgacuccgccaucaucgagaucgucaacgaggugcugcacuga

SEQ ID NO: 17182 - RNA, 1269 nt, Artificial Sequence
  Bat SARS-like CoV/WIV1__KF367457.1__nucleocapsid protein (N) CDS gc
augagcgacaacggcccccaguccaaccagcgcagcgccccgcggaucaccuucgggggccccaccgacuccacggacaacaaccagaacgggggccgcaacggggcccggcccaagcagcgccggccccagggccugccgaacaacaccgcgagcugguucaccgcccucacccagcacggcaaggaggagcugcgcuucccccgggggcagggcgugcccaucaacacgaacuccgggcccgacgaccagaucggcuacuaccgccgggccacccgccggguccgcgggggcgacggcaagaugaaggagcugagcccgcggugguacuucuacuaccucgggaccggccccgaggccucccugcccuacggggccaacaaggagggcaucguguggguggcgaccgagggcgcccugaacacgcccaaggaccacaucgggacccgcaacccgaacaacaacgccgccaccguccuccagcugccccagggcaccacgcugcccaagggguucuacgcggagggcagccgcgggggcucccaggccagcucccggagcuccagccggucccgcggcaacagccggaacuccacccccgggagcucccgcggcaacagcccggcccggauggccagcgggggcggggagaccgcccucgcgcugcugcuccuggaccgccugaaccagcucgaguccaaggugagcggcaagggccagcagcagcaggggcagaccgugacgaagaaguccgccgccgaggccagccgcaagccccggcagaagcgcaccgccaccaagcaguacaacgucacccaggcguucggccggcgcgggcccgagcagacgcagggcaacuucggggaccaggaccugauccggcagggcaccgacuacaagcacuggccccagaucgcccaguucgccccguccgccagcgccuucuucggcaugucccgcaucgggauggaggugacccccagcggcaccuggcugacguaccacggggcgaucaagcucgacgacaaggacccccaguucaaggacaacgugauccugcugaacaagcacaucgacgccuacaagaccuucccgcccaccgagcccaagaaggacaagaagaagaagaccgacgaggcccagccccucccccagcggcagaagaagcagccgacggucacccugcugcccgccgccgacauggacgacuucucccgccagcuccagaacagcauguccggcgcgagcgccgacuccacccaggccuga

SEQ ID NO: 17183 - RNA, 1407 nt, Artificial Sequence
  BatCoV/HKU9-1 BF_005I__NC_009021.1__nucleocapsid protein (N) CDS gc
augagcggccgcaaccggucccgcagcgggacccccuccccgaaggugaccuucaagcaggagagcgacggcuccgacagcgaguccgagcggcgcaacgggaaccggaacggcgcccgccccaagaacaacaacagccggggguccgcccccaagcccgagaagccgaaggcggccccgccccagaacgucagcugguucgcgccccuggugcagacgggcaaggccgagcuccgcuucccccggggcgagggggugcccgucucccagggcguggacagcaccuacgagcacggguacuggcugcgcacccagcgguccuuccagaagggcgggaagcagguccuggccaacccccgcugguacuucuacuacaccggcacgggccgguucggggaccuccgcuucggcaccaagaaccccgacaucguguggguggggcaggagggcgccaacaucaaccggcugggcgacauggggacccgcaacccgagcaacgacggcgccauccccgugcagcuggccgggggcauccccaagggguucuacgccgagggccggggcucccgcgggaacagccgguccagcucccgcaacagcagccgggcguccagccgcggcaacucccgcgccagcucccgcggggccagccccggccggccggccgccaaccccuccaccgagcccuggauggcguaccucguccagaagcuggagcggcuggagagccagguguccgggacgaagcccgccaccaagaacccggugcaggucaccaagaacgaggccgccgccaacgcgaagaagcuccgccacaagcggaccgcccacaagggcagcggcgugacggugaacuacgggcgccggggccccggggaccuggagggcaacuucggggaccgcgagaugaucaagcugggcaccgacgacccccgguucgccgccgccgcgcagauggcccccaacgucuccagcuuccucuucaugucccaccugagcacccgcgacgaggacgacgcccuguggcuccacuacaagggcgccaucaagcugccgaaggacgaccccaacuacgagcaguggaccaagauccuggccgagaaccucaacgcguacaaggacuucccgcccacggagcccaagaaggacaagaagaagaaggaggagaccgcccaggacaccgugaucuucgaggacgccuccaccgggacggaccagaccguggucaaggugugggugaaggaccaggacgcccagaccgacgacgaguggcugggcggggacgagaccgucuacgaggacgaggacgaccggcccaagacgcagcgccggcacaagaagcgcggcagcaccgcgucccgggugaccaucgccgaccccaccaacgccggcgccgagcgcagcuga

SEQ ID NO: 17184 - RNA, 1029 nt, Artificial Sequence
  PDCoV/Swine/Thailand/S5011/2015__KU051641.1__nucleocapsid protein (N) CDS gc
auggccgcccccguggucccgaccaccgacgcgagcugguuccaggugcugaaggcccagaacaagaaggccacgcacccccaguuccgcggcaacggggugccccucaacuccgccaucaagcccgccgagaaccacggcuacuggcugcgguacacccgccagaagcccgggggcacccccaucccgcccagcuacgcguucuacuacaccgggacgggcccgcggggcaaccugaaguacggggagcucccgcccaacgacacccccgccaccacccgcgucacgugggugaagggcuccggggccgacaccagcaucaagccccacguggccaagcggaaccccaacaaccccaagcaccagcugcugccccuccgcuucccgaccggcgacgggcccgcgcagggcuuccgggucgaccccuucaacgcccgcggccggccccaggagcgcggguccggcccgcggagccaguccgugaacccccgcgggaccggcaaccagccccggaagcgcgaccagagcgcccccgccgccgugcggcgcaagacgcagcaccaggcgccgaagcggacccugcccaagggcaagaccaucucccaggucuucgggaaccgcagccggaccggcgccaacgugggguccgccgacacggagaagaccggcauggccgacccccgcaucauggcccuggcgcggcacgugcccgggguccaggagaugcuguucgccggccaccucgagagcaacuuccaggccggcgccaucacccugaccuucuccuacagcaugacggugaaggagggguccccggacuacgagcgccucaaggacgcccugaacaccguggucaaccagaccuacgagccgcccaccaagcccacgaaggacaagaagcccgacaagcaggaccagagcgcgaagcccaagcagcagaagaagcccaagaaggugacccugccggccgacaagcaggacugggagugggacgacgccuucgagaucaagcaggaguccgccgccuga

SEQ ID NO: 17185 - RNA, 1326 nt, Artificial Sequence
  PEDV/NPL-PEDv/2013/P10__KJ778616.1__nucleocapsid protein (N) CDS gc
auggccagcguguccuuccaggaccgcggccggaagcgcgucccccugagccucuacgccccgcugcgggugaccaacgacaagccccuguccaaggugcucgcgaacaacgccguccccaccaacaaggggaacaaggaccagcagaucggcuacuggaacgagcagauccgcuggcggaugcgccgcggggagcggaucgagcagcccagcaacuggcacuucuacuaccugggcacggggccgcacgccgaccugcgguaccgcacccggaccgagggcguguucuggguggccaaggagggcgccaagaccgagcccacgaaccucgggguccgcaaggcguccgagaagcccaucauccccaacuucagccagcagcugccguccgugguggagaucgucgagcccaacaccccgcccaccagccgggccaacucccgcagccggucccgcggcaacgggaacaaccggagccgcucccccagcaacaaccggggcaacaaccagucccgcgggaacagccagaaccggggcaacaaccagggccgcggggccucccagaaccgcggcgggaacaacaacaacaacaacaagagccggaaccaguccaagaaccgcaaccagagcaacgaccggggcggcgugaccagccgcgacgaccugguggccgcggucaaggacgcccucaagucccuggggaucggcgagaaccccgacaagcugaagcagcagcagaagcccaagcaggagcggagcgacuccagcgggaagaacacgcccaagaagaacaagucccgcgccaccagcaaggagcgggaccucaaggacaucccggaguggcgccggauccccaagggcgagaacuccguggccgccugcuucgggccccgcggcggcuucaagaacuucggggacgcggaguucguggagaagggcgucgacgccagcggguacgcccagaucgccucccuggcccccaacguggcggcccuccuguucggcgggaacguggccguccgggagcuggccgacagcuacgagaucaccuacaacuacaagaugaccgugccgaaguccgaccccaacguggagcugcucgucagccagguggacgccuucaagacgggcaacgcgaagccccagcgcaagaaggagaagaagaacaagcgggagaccacccagcagcugaacgaggaggccaucuacgacgacgugggcguccccuccgacgugacccacgccaaccuggagugggacacggccgucgacgggggcgacaccgccguggagaucaucaacgagaucuucgacaccgggaacuga

SEQ ID NO: 17186 - RNA, 1365 nt, Artificial Sequence
  MHV/A59__NC_048217.1__nucleocapsid protein (N) CDS gc
augagcuucgugcccggccaggagaacgccgggggccgcuccagcuccgucaaccgggccgggaacggcauccugaagaagaccaccugggcggaccagacggagcgcgggccgaacaaccagaaccggggccgccggaaccagcccaagcagaccgccaccacccagcccaacagcggcuccguggugccccacuacagcugguucuccgggaucacgcaguuccagaagggcaaggaguuccaguucgccgaggggcagggcgucccgaucgccaacgggauccccgccagcgagcagaagggcuacugguaccgccacaaccggcgcuccuucaagacccccgacggccagcagaagcagcuccugccccggugguacuucuacuaccuggggaccggcccgcacgcgggggccagcuacggcgacuccaucgagggcguguucuggguggccaacagccaggccgacaccaacacgcgcuccgacaucgucgagcgggaccccagcucccacgaggcgauccccacccgcuucgcccccgggaccgugcucccgcagggcuucuacguggaggggagcggccgguccgcccccgccagccgcuccgggagccggagccagucccgcggccccaacaaccgggcccgcagcuccagcaaccagcggcagcccgcguccaccgucaagccggacauggccgaggagaucgccgcccuggugcuggccaagcucggcaaggacgcggggcagcccaagcaggucacgaagcagagcgccaaggaggugcgccagaagauccugaacaagccccggcagaagcgcacccccaacaagcagugcccggugcagcagugcuucggcaagcgcgggcccaaccagaacuucggcggguccgagaugcugaagcucggcaccagcgacccccaguuccccauccuggccgagcuggccccgaccgugggcgccuucuucuucggguccaagcucgagcuggucaagaagaacagcggcggggcggacgagcccacgaaggacguguacgagcugcaguacuccggcgccgugcgguucgacagcacccuccccggguucgagaccaucaugaagguccugaacgagaaccugaacgccuaccagaaggacggcggcgccgacguggugucccccaagccgcagcgcaaggggcggcgccaggcccaggagaagaaggacgaggucgacaacgugagcguggcgaagcccaaguccagcguccagcggaacgugucccgcgagcucacccccgaggaccggagccugcuggcccagauccucgacgacggcgucgugccggacgggcuggaggacgacuccaacguguga

SEQ ID NO: 17187 - RNA, 1260 nt, Artificial Sequence
  SARS-CoV-2/Wuhan-Hu-1__NC_045512.2/MN908947.2/EPI_ISL_402128__nuc leocapsid protein (N) CDS gc
augagcgacaacggcccccagaaccagcgcaacgccccgcggaucaccuucgggggccccuccgacagcaccggguccaaccagaacggcgagcgcagcggggcccgguccaagcagcgccggccccagggccugcccaacaacacggcgagcugguucaccgcccucacccagcacggcaaggaggaccugaaguucccgcgcgggcagggcgugcccaucaacaccaacuccagccccgacgaccagaucggguacuaccggcgcgccacgcggcgcauccggggcggggacggcaagaugaaggaccugagcccccgcugguacuucuacuaccucggcaccgggccggaggccggccugcccuacggggccaacaaggacggcaucaucugggucgcgaccgagggcgcccugaacacccccaaggaccacaucgggacgcggaaccccgccaacaacgccgcgaucgugcuccagcugccgcagggcaccacccugcccaagggguucuacgccgagggcucccgcgggggcucccaggccagcucccggagcuccagccgcucccggaacagcucccgcaacagcacccccggcagcucccgggggacgagccccgcccgcauggccggcaacgggggcgacgcggcccucgcccugcugcuccuggaccggcugaaccagcucgaguccaagaugagcgggaagggccagcagcagcagggccagaccgugaccaagaaguccgccgccgaggcgagcaagaagccgcgccagaagcgcaccgccacgaaggccuacaacgucacccaggccuucgggcggcgcggccccgagcagacccaggggaacuucggcgaccaggagcugauccggcaggggaccgacuacaagcacuggccccagaucgcccaguucgcgcccuccgccagcgccuucuucggcaugucccgcaucggcauggaggugacgccgagcgggaccuggcugaccuacaccggcgccaucaagcucgacgacaaggaccccaacuucaaggaccaggugauccugcugaacaagcacaucgacgccuacaagacguucccgcccaccgagcccaagaaggacaagaagaagaaggcggacgagacccaggcccucccccagcggcagaagaagcagcagaccgucacgcugcugcccgccgccgaccucgacgacuucuccaagcagcugcagcagagcauguccagcgcggacuccacccaggccuga

SEQ ID NO: 17188 - RNA, 1260 nt, Artificial Sequence
  SARS-CoV-2__MT919525.1__nucleocapsid protein (N) CDS gc
augagcgacaacggcccccagaaccagcgcaacgccccgcggaucaccuucgggggccccuccgacagcaccggguccaaccagaacggcgagcgcagcggggcccgguccaagcagcgccggccccagggccugcccaacaacacggcgagcugguucaccgcccucacccagcacggcaaggaggaccugaaguucccgcgcgggcagggcgugcccaucaacaccaacuccagccccgacgaccagaucggguacuaccggcgcgccacgcggcgcauccggggcggggacggcaagaugaaggaccugagcccccgcugguacuucuacuaccucggcaccgggccggaggccggccugcccuacggggccaacaaggacggcaucaucugggucgcgaccgagggcgcccugaacacccccaaggaccacaucgggacgcggaaccccgccaacaacgccgcgaucgugcuccagcugccgcagggcaccacccugcccaagggguucuacgccgagggcucccgcgggggcucccaggccagcucccggagcuccagccgcucccggaacagcucccgcaacagcacccccggcagcuccaagcggacgagccccgcccgcauggccgggaacggcggggacgcggcccucgcccugcugcuccuggaccggcugaaccagcucgaguccaagaugagcggcaaggggcagcagcagcagggccagaccgugaccaagaaguccgccgccgaggcgagcaagaagccgcgccagaagcgcaccgccacgaaggccuacaacgucacccaggccuucggccggcgcgggcccgagcagacccagggcaacuucggggaccaggagcugauccggcagggcaccgacuacaagcacuggccccagaucgcccaguucgcgcccuccgccagcgccuucuucgggaugucccgcaucggcauggaggugacgccgagcggcaccuggcugaccuacaccggggccaucaagcucgacgacaaggaccccaacuucaaggaccaggugauccugcugaacaagcacaucgacgccuacaagacguucccgcccaccgagcccaagaaggacaagaagaagaaggcggacgagacccaggcccucccccagcggcagaagaagcagcagaccgucacgcugcugcccgccgccgaccucgacgacuucuccaagcagcugcagcagagcauguccagcgcggacuccacccaggccuga

SEQ ID NO: 17189 - RNA, 1260 nt, Artificial Sequence
  SARS-CoV-2__MT919768.1__nucleocapsid protein (N) CDS gc
augagcgacaacggcccccagaaccagcgcaacgcccugcggaucaccuucgggggcccguccgacagcaccggguccaaccagaacggcgagcgcagcggggcccgguccaagcagcgccggccccagggccuccccaacaacacggcgagcugguucaccgcccugacccagcacggcaaggaggaccugaaguucccccgcgggcagggcgugccgaucaacaccaacuccagccccgacgaccagaucggguacuaccggcgcgccacgcggcgcauccggggcggggacggcaagaugaaggaccucagcccccgcugguacuucuacuaccugggcaccgggcccgaggccggccugccguacggggccaacaaggacggcaucaucugggucgcgaccgagggcgcccucaacacccccaaggaccacaucgggacgcggaaccccgccaacaacgccgcgaucgugcugcagcugccccagggcaccacccucccgaagggguucuacgccgagggcucccgcgggggcucccaggccagcucccggagcuccagccgcucccggaacagcucccgcaacagcacccccggcagcucccgggggacgagccccgcccgcauggccggcaacgggggcgacgcggcccuggcccugcuccugcuggaccggcucaaccagcuggaguccaagaugagcgggaagggccagcagcagcagggccagaccgugaccaagaaguccgccgccgaggcgagcaagaagccccgccagaagcgcaccgccacgaaggccuacaacgucacccaggccuucgggcggcgcggcccggagcagacccaggggaacuucggcgaccaggagcugauccggcaggggaccgacuacaagcacuggccccagaucgcccaguucgcgcccuccgccagcgccuucuucggcaugucccgcaucggcauggaggugacgcccagcgggaccuggcucaccuacaccggcgccaucaagcuggacgacaaggacccgaacuucaaggaccaggugauccugcucaacaagcacaucgacgccuacaagacguucccgcccaccgagcccaagaaggacaagaagaagaaggcggacgagacccaggcccugccccagcggcagaagaagcagcagaccgucacgcugcuccccgccgccgaccuggacgacuucuccaagcagcugcagcagagcauguccagcgcggacuccacccaggccuga

SEQ ID NO: 17190 - RNA, 1260 nt, Artificial Sequence
  SARS-CoV-2__MT919770.1__nucleocapsid protein (N) CDS gc
augagcgacaacggcccccagaaccagcgcaacgccccgcggaucaccuucgggggccccuccgacagcaccggguccaaccagaacggcgagcgcagcggggcccgguccaagcagcgccggccccagggccugcccaacaacacggcgagcugguucaccgcccucacccagcacggcaaggaggaccugaaguucccgcgcgggcagggcgugcccaucaacaccaacuccagccccgacgaccagaucggguacuaccggcgcgccacgcggcgcauccggggcggggacggcaagaugaaggaccugagcccccgcugguacuucuacuaccucggcaccgggccggaggccggccugcccuacggggccaacaaggacggcaucaucugggucgcgaccgagggcgcccugaacacccccaaggaccacaucgggacgcggaaccccgccaacaacgccgcgaucgugcuccagcugccgcagggcaccacccugcccaagggguucuacgccgagggcucccgcgggggcucccaggccagcucccggagcuccagccgcucccggaacagcucccgcaacagcacccccggcagcuccaagcggacgagccccgcccgcauggccgugaacgggggcgacgcggcccucgcccugcugcuccuggaccggcugaaccagcucgaguccaagaugagcgggaagggccagcagcagcaggggcagaccgucaccaagaaguccgccgccgaggcgagcaagaagccgcgccagaagcgcaccgccacgaaggccuacaacgugacccaggccuucggccggcgcggccccgagcagacccaggggaacuucggcgaccaggagcugauccggcaggggaccgacuacaagcacuggccccagaucgcccaguucgcgcccuccgccagcgccuucuucggcaugucccgcaucgggauggaggugacgccgagcggcaccuggcugaccuacaccggcgccaucaagcucgacgacaaggaccccaacuucaaggaccaggucauccugcugaacaagcacaucgacgccuacaagacguucccgcccaccgagcccaagaaggacaagaagaagaaggcggacgagacccaggcccucccccagcggcagaagaagcagcagaccgugacgcugcugcccgccgccgaccucgacgacuucuccaagcagcugcagcagagcauguccagcgcggacuccacccaggccuga

SEQ ID NO: 17191 - RNA, 1239 nt, Artificial Sequence
  SARS-CoV-2__MT919777.1__nucleocapsid protein (N) CDS gc
augagcgacaacggcccccagaaccagcgcaacgggccgcggaucaccuucggcgggcccuccgacagcaccggcuccaaccagaacggggagcgcagcggcgcccgguccaagcagcgccggccccagggccugcccaacaacacggccagcugguucaccgcgcucacccagcacgggaaggaggaccugaaguucccgcgcggccagggggugcccaucaacaccaacuccagccccgacgaccagaucggcuacuaccggcgcgccacgcggcgcauccgcgggggcgacggcaagaugaaggaccugagcccccggugguacuucuacuaccucgggaccggcccggaggccgggcugcccuacggcgccaacaaggacggcaucaucugggucgccaccgagggggcgcugaacacccccaaggaccacaucggcacgcggaaccccgccaacaacgccgccaucgugcuccagcugccgcaggggaccacccugcccaagggcuucuacgcggaggggagccgcggcggcucccaggccagcucccggagcuccagccgcucccggaacagcucccgcaacagcacccccgggagcuccaagcggacguacggcggggacgccgcccucgcccugcugcuccuggaccgccugaaccagcucgagagcaagauguccggcaaggggcagcagcagcagggccagaccgugaccaagaaguccgcggccgaggccuccaagaagccccggcagaagcgcaccgccacgaaggccuacaacgucacccaggcguucggccgccgggggccggagcagacccagggcaacuucggggaccaggagcugauccgccagggcaccgacuacaagcacuggccccagaucgcccaguucgcccccagcgccuccgccuucuucgggaugagccggaucggcauggaggugacgcccuccggcaccuggcugaccuacaccggggcgaucaagcucgacgacaaggacccgaacuucaaggaccaggugauccugcugaacaagcacaucgacgccuacaagacguucccgcccaccgagcccaagaaggacaagaagaagaaggccgacgagacccaggcccucccccagcgccagaagaagcagcagaccgucacgcugcugcccgccgcggaccucgacgacuucagcaagcagcugcagcaguccaugagcuccgccgacagcacccaggccuga

SEQ ID NO: 17192 - RNA, 1260 nt, Artificial Sequence
  SARS-CoV-2__MT919782.1__nucleocapsid protein (N) CDS gc
augagcgacaacggcccccagaaccagcgcaacgccccgcggaucaccuucgggggccccuccgacagcaccggguccaaccagaacggcgagcgcagcggggcccgguccaagcagcgccggccccagggccugcccaacaacacggcgagcugguucaccgcccucacccagcacggcaaggaggaccugaaguucccgcgcgggcagggcgugcccaucaacaccaacuccagccccgacgaccagaucggguacuaccggcgcgccacgcggcgcauccggggcggggacggcaagaugaaggaccugagcccccgcugguacuucuacuaccucggcaccgggccggaggccggccugcccuacggggccaacaaggacggcaucaucugggucgcgaccgagggcgcccugaacacccccaaggaccacaucgggacgcggaaccccgccaacaacgccgcgaucgugcuccagcugccgcagggcaccacccugcccaagggguucuacgccgagggcucccgcgggggcucccaggccagcucccggagcuccagccgcucccggaacagcucccgcaacagcacccccggcagcuccaagcggacgagccccgccaucauggccgggaacggcggggacgcggcccucgcccugcugcuccuggaccgccugaaccagcucgaguccaagaugagcggcaaggggcagcagcagcagggccagaccgugaccaagaaguccgccgccgaggcgagcaagaagccgcggcagaagcgcaccgccacgaaggccuacaacgucacccaggccuucggccgccgggggcccgagcagacccagggcaacuucggggaccaggagcugauccgccagggcaccgacuacaagcacuggccccagaucgcccaguucgcgcccuccgccagcgccuucuucgggaugucccggaucggcauggaggugacgccgagcggcaccuggcugaccuacaccggggccaucaagcucgacgacaaggaccccaacuucaaggaccaggugauccugcugaacaagcacaucgacgccuacaagacguucccgcccaccgagcccaagaaggacaagaagaagaaggcggacgagacccaggcccucccccagcgccagaagaagcagcagaccgucacgcugcugcccgccgccgaccucgacgacuucuccaagcagcugcagcagagcauguccagcgcggacuccacccaggccuga

SEQ ID NO: 17193 - RNA, 1260 nt, Artificial Sequence
  SARS-CoV-2__MT919994.1__nucleocapsid protein (N) CDS gc
augagcgacaacggcccccagaaccagcgcaacgccacccggaucaccuucgggggcccguccgacagcacgggguccaaccagaacggcgagcgcagcggggcccgguccaagcagcgccggccccagggccugcccaacaacaccgcgagcugguucaccgcccucacccagcacggcaaggaggaccugaaguucccccgcgggcagggcgugccgaucaacacgaacuccagccccgacgaccagaucggguacuaccggcgcgccacccggcgcauccggggcggggacggcaagaugaaggaccugagcccccgcugguacuucuacuaccucggcaccgggcccgaggccggccugccguacggggccaacaaggacggcaucaucugggucgcgaccgagggcgcccugaacacgcccaaggaccacaucgggacccggaaccccgccaacaacgccgcgaucgugcuccagcugccccagggcaccacccugccgaagggguucuacgccgagggcagccgcgggggcauccaggccuccagccgguccagcucccgcagccggaacuccagccgcaacuccacgcccggcagcagccgggggaccucccccgcccgcauggccggcaacgggggcgacgcggcccucgcccugcugcuccuggaccggcugaaccagcucgagagcaagauguccgggaagggccagcagcagcagggccagaccgugaccaagaaguccgccgccgaggcguccaagaagccccgccagaagcgcacggccaccaaggccuacaacgucacccaggccuucgggcggcgcggcccggagcagacccaggggaacuucggcgaccaggagcugauccggcaggggacggacuacaagcacuggccccagaucgcccaguucgcgcccagcgccuccgccuucuucggcaugagccgcaucggcauggaggugacccccuccgggaccuggcugaccuacacgggcgccaucaagcucgacgacaaggacccgaacuucaaggaccaggugauccugcugaacaagcacaucgacgccuacaagaccuucccgcccaccgagcccaagaaggacaagaagaagaaggcggacgagacccaggcccucccccagcggcagaagaagcagcagacggucacccugcugcccgccgccgaccucgacgacuucagcaagcagcugcagcaguccaugagcuccgcggacagcacccaggccuga

SEQ ID NO: 17194 - RNA, 1260 nt, Artificial Sequence
  SARS-CoV-2__MT919995.1__nucleocapsid protein (N) CDS gc
augagcgacaacggcccccagaaccagcgcaacgccccgcggaucaccuucgggggccccuccgacagcaccggguccaaccagaacggcgagcgcagcggggcccgguccaagcagcgccggccccagggccugcccaacaacacggcgagcugguucaccgcccucacccagcacggcaaggaggaccugaaguucccgcgcgggcagggcgugcccaucaacaccaacuccagccccgacgaccagaucggguacuaccggcgcgccacgcggcgcauccggggcggggacggcaagaugaaggaccugagcccccgcugguacuucuacuaccucggcaccgggccggaggccggccugcccuacggggccaacaaggacggcaucaucugggucgcgaccgagggcgcccugaacacccccaaggaccacaucgggacgcggaaccccgccaacaacgccgcgaucgugcuccagcugccgcagggcaccacccugcccaagggguucuacgccgagggcagccgcgggggcucccaggccagcuuccgguccagcucccgcagccggaacuccagccgcaacuccacccccggcagcagccgggggacgucccccgcccgcauggccggcaacgggggcgacgcggcccucgcccugcugcuccuggaccggcugaaccagcucgagagcaagauguccgggaagggccagcagcagcagggccagaccgugaccaagaaguccgccgccgaggcguccaagaagccgcgccagaagcgcaccgccacgaaggccuacaacgucacccaggccuucgggcggcgcggccccgagcagacccaggggaacuucggcgaccaggagcugauccggcaggggaccgacuacaagcacuggccccagaucgcccaguucgcgcccagcgccuccgccuucuucggcaugagccgcaucggcauggaggugacgccguccgggaccuggcugaccuacaccggcgccaucaagcucgacgacaaggaccccaacuucaaggaccaggugauccugcugaacaagcacaucgacgccuacaagacguucccgcccaccgagcccaagaaggacaagaagaagaaggcggacgagacccaggcccucccccagcggcagaagaagcagcagaccgucacgcugcugcccgccgccgaccucgacgacuucagcaagcagcugcagcaguccaugagcuccgcggacagcacccaggccuga

SEQ ID NO: 17195 - RNA, 1260 nt, Artificial Sequence
  SARS-CoV-2__MT920005.1__nucleocapsid protein (N) CDS gc
augagcgacaacggcccccagaaccagcgcaacgccccgcggaucaccuucgggggccccuccgacagcaccggguccaaccagaacggcgagcgcagcggggcccgguccaagcagcgccggccccagggccugcccaacaacacggcgagcugguucaccgcccucacccagcacggcaaggaggaccugaaguucccgcgcgggcagggcgugcccaucaacaccaacuccagccccgacgaccagaucggguacuaccggcgcgccacgcggcgcauccggggcggggacggcaagaugaaggaccugagcccccgcugguacuucuacuaccucggcaccgggccggaggccggccugcccuacggggccaacaaggacggcaucaucugggucgcgaccgagggcgcccugaacacccccaaggaccacaucgggacgcggaaccccgccaacaacgccgcgaucgugcuccagcugccgcagggcaccacccugcccaagggguucuacgccgagggcagccgcgggggcauccaggccuccagccgguccagcucccgcagccggaacuccagccgcaacuccacccccggcagcagccgggggacgucccccgcccgcauggccggcaacgggggcgacgcggcccucgcccugcugcuccuggaccggcugaaccagcucgagagcaagauguccgggaagugccagcagcagcagggccagaccgugaccaagaaguccgccgccgaggcguccaagaagccgcgccagaagcgcaccgccacgaaggccuacaacgucacccaggccuucggccggcgcgggcccgagcagacccagggcaacuucggggaccaggagcugauccggcagggcaccgacuacaagcacuggccccagaucgcccaguucgcgcccagcgccuccgccuucuucgggaugagccgcaucggcauggaggugacgccguccggcaccuggcugaccuacaccggggccaucaagcucgacgacaaggaccccaacuucaaggaccaggugauccugcugaacaagcacaucgacgccuacaagacguucccgcccaccgagcccaagaaggacaagaagaagaaggcggacgagacccaggcccucccccagcggcagaagaagcagcagaccgucacgcugcugcccgccgccgaccucgacgacuucagcaagcagcugcagcaguccaugagcuccgcggacagcacccaggccuga

SEQ ID NO: 17196 - RNA, 1260 nt, Artificial Sequence
  SARS-CoV-2__MT913038.1__nucleocapsid protein (N) CDS gc
augagcgacaacggcccccagaaccagcgcaacgccccgcggaucaccuucgggggccccuccgacagcaccggguccaaccagaacggcgagcgcagcggggcccgguccaagcagcgccggccccagggccugcccaacaacacggcgagcugguucaccgcccucacccagcacggcaaggaggaccugaaguucccgcgcgggcagggcgugcccaucaacaccaacuccagccccgacgaccagaucggguacuaccggcgcgccacgcggcgcauccggggcggggacggcaagaugaaggaccugagcccccgcugguacuucuacuaccucggcaccgggccggaggccggccugcccuacggggccaacaaggacggcaucaucugggucgcgaccgagggcgcccugaacacccccaaggaccacaucgggacgcggaaccccgccaacaacgccgcgaucgugcuccagcugccgcagggcaccacccugcccaagggguucuacgccgagggcagccgcgggggcucccaggccuacagccgguccagcucccgcagccggaacuccagccgcaacuccacccccggcagcagccgggggacgucccccgcccgcauggccggcaacgggggcgacgcggcccucgcccugcugcuccuggaccggcugaaccagcucgagagcaagauguccgggaagggccagcagcagcagggccagaccgugaccaagaaguccgccgccgaggcguccaagaagccgcgccagaagcgcaccgccacgaaggccuacaacgucacccaggccuucgggcggcgcggccccgagcagacccaggggaacuucggcgaccaggagcugauccggcaggggaccgacuacaagcacuggccccagaucgcccaguucgcgcccagcgccuccgccuucuucggcaugagccgcaucggcauggaggugacgccguccgggaccuggcugaccuacaccggcgccaucaagcucgacgacaaggaccccaacuucaaggaccaggugauccugcugaacaagcacaucgacgccuacaagacguucccgcccaccgagcccaagaaggacaagaagaagaaggcggacgagacccaggcccucccccagcggcagaagaagcagcagaccgucacgcugcugcccgccgccgaccucgacgacuucagcaagcagcugcagcaguccaugagcuccgcggacagcacccaggccuga

SEQ ID NO: 17197 - RNA, 1260 nt, Artificial Sequence
  SARS-CoV-2__MT913055.1__nucleocapsid protein (N) CDS gc
augagcgacaacggcccccagaaccagcgcaacgccccgcggaucaccuucgggggccccuccgacagcaccggguccaaccagaacggcgagcgcagcggggcccgguccaagcagcgccggccccagggccugcccaacaacacggcgagcugguucaccgcccucacccagcacggcaaggaggaccugaaguucccgcgcgggcagggcgugcccaucaacaccaacuccagccccgacgaccagaucggguacuaccggcgcgccacgcggcgcauccggggcggggacggcaagaugaaggaccugagcccccgcugguacuucuacuaccucggcaccgggccggaggccggccugcccuacggggccaacaaggacggcaucaucugggucgcgaccgagggcgcccugaacacccccaaggaccacaucgggacgcggaaccccgccaacaacgccgcgaucgugcuccagcugccgcagggcaccacccugcccaagggguucuacgccgagggcagccgcgggggcucccaggccagcucccggagcuccagccgcucccggaacagcucccgcaacagcacccccggcagcucccgggggacgagccccgcccgcauggccggcaacgggggcgacgcggcccucgcccugcugcuccuggaccggcugaaccagcucgagaucaagauguccgggaagggccagcagcagcagggccagaccgugaccaagaaguccgccgccgaggcguccaagaagccgcgccagaagcgcaccgccacgaaggccuacaacgucacccaggccuucgggcggcgcggccccgagcagacccaggggaacuucggcgaccaggagcugauccggcaggggaccgacuacaagcacuggccccagaucgcccaguucgcgcccagcgccuccgccuucuucggcaugagccgcaucggcauggaggugacgccguccgggaccuggcugaccuacaccggcgccaucaagcucgacgacaaggaccccaacuucaaggaccaggugauccugcugaacaagcacaucgacgccuacaagacguucccgcccaccgagcccaagaaggacaagaagaagaaggcggacgagacccaggcccucccccagcggcagaagaagcagcagaccgucacgcugcugcccgccgccgaccucgacgacuucagcaagcagcugcagcaguccaugagcuccgcggacagcacccaggccuga

SEQ ID NO: 17198 - RNA, 1260 nt, Artificial Sequence
  SARS-CoV-2__MT913093.1__nucleocapsid protein (N) CDS gc
augagcgacaacggcccccagaaccagcgcaacgccccgcggaucaccuucgggggccccuccgacagcaccggguccaaccagaacggcgagcgcagcggggcccgguccaagcagcgccggccccagggccugcccaacaacacggcgagcugguucaccgcccucacccagcacggcaaggaggaccugaaguucccgcgcgggcagggcgugcccaucaacaccaacuccagccccgacgaccagaucggguacuaccggcgcgccacgcggcgcauccggggcggggacggcaagaugaaggaccugagcccccgcugguacuucuacuaccucggcaccgggccggaggccggccugcccuacggggccaacaaggacggcaucaucugggucgcgaccgagggcgcccugaacacccccaaggaccacaucgggacgcggaaccccgccaacaacgccgcgaucgugcuccagcugccgcagggcaccacccugcccaagggguucuacgccgagggcucccgcgggggcucccaggccagcucccggagcuccagccgcucccggaacagcucccgcaacagcacccccggcagcucccgggggacgagccccggccgcauggccgggaacggcggggacgccgcgcucgcccugcugcuccuggaccggcugaaccagcucgaguccaagaugagcggcaagggccagcagcagcaggggcagaccgugaccaagaaguccgccgccgaggccagcaagaagccgcgccagaagcgcaccgcgacgaaggccuacaacgucacccaggccuucggccggcgcgggcccgagcagacccagggcaacuucggggaccaggagcugauccggcagggcaccgacuacaagcacuggccccagaucgcccaguucgcccccuccgcgagcgccuucuucggcaugucccgcaucgggauggaggugacgccgagcggcaccuggcugaccuacaccggggccaucaagcucgacgacaaggaccccaacuucaaggaccaggugauccugcugaacaagcacaucgacgccuacaagacguucccgcccaccgagcccaagaaggacaagaagaagaaggccgacgagacccaggcgcucccccagcggcagaagaagcagcagaccgucacgcugcugcccgccgccgaccucgacgacuucuccaagcagcugcagcagagcauguccagcgccgacuccacccaggcguga

SEQ ID NO: 17199 - RNA, 1260 nt, Artificial Sequence
  SARS-CoV-2__MT913104.1__nucleocapsid protein (N) CDS gc
augagcgacaacggcccccagaaccagcgcaacgccccgcggaucaccuucgggggccccuccgacagcaccggguccaaccagaacggcgagcgcagcggggcccgguccaagcagcgccggccccagggccugcccaacaacacggcgagcugguucaccgcccucacccagcacggcaaggaggaccugaaguucccgcgcgggcagggcgugcccaucaacaccaacuccagccccgacgaccagaucggguacuaccggcgcgccacgcggcgcauccggggcggggacggcaagaugaaggaccugagcccccgcugguacuucuacuaccucggcaccgggccggaggccggccugcccuacggggccaacaaggacggcaucaucugggucgcgaccgagggcgcccugaacacccccaaggaccacaucgggacgcggaaccccgccaacaacgccgcgaucgugcuccagcugccgcagggcaccacccugcccaagggguucuacgccgagggcucccgcgggggcucccaggccagcucccggagcuccagccgcucccggaacagcucccgcaacagcacccccggcagcucccgggggaucagccccgcccgcauggccggcaacgggggcgacgcggcccucgcccugcugcuccuggaccggcugaaccagcucgaguccaagaugagcgggaagggccagcagcagcagggccagacggugaccaagaaguccgccgccgaggcgagcaagaagccgcgccagaagcgcaccgccaccaaggccuacaacgucacgcaggccuucgggcggcgcggccccgagcagacccaggggaacuucggcgaccaggagcugauccggcaggggaccgacuacaagcacuggccccagaucgcccaguucgcgcccuccgccagcgccuucuucggcaugucccgcaucggcauggaggugaccccgagcgggacguggcugaccuacaccggcgccaucaagcucgacgacaaggaccccaacuucaaggaccaggugauccugcugaacaagcacaucgacgccuacaagaccuucccgcccacggagcccaagaaggacaagaagaagaaggcggacgagacccaggcccucccccagcggcagaagaagcagcagaccgucacccugcugcccgccgccgaccucgacgacuucuccaagcagcugcagcagagcauguccagcgcggacuccacgcaggccuga

SEQ ID NO: 17200 - RNA, 1260 nt, Artificial Sequence
  SARS-CoV-2__MT913111.1__nucleocapsid protein (N) CDS gc
augagcgacaacggcccccagaaccagcgcaacgccccgcggaucaccuucgggggccccuccgacagcaccggguccaaccagaacggcgagcgcagcggggcccgguccaagcagcgccggccccagggccugcccaacaacacggcgagcugguucaccgcccucacccagcacggcaaggaggaccugaaguucccgcgcgggcagggcgugcccaucaacaccaacuccagccccgacgaccagaucggguacuaccggcgcgccacgcggcgcauccggggcggggacggcaagaugaaggaccugagcccccgcugguacuucuacuaccucggcaccgggccggaggccggccugcccuacggggccaacaaggacggcaucaucugggucgcgaccgagggcgcccugaacacccccaaggaccacaucgggacgcggaaccccgccaacaacgccgcgaucgugcuccagcugccgcagggcaccacccugcccaagggguucuacgccgagggcagccgcgggggcucccaggccagcucccggagcucccuccgcagccggaacuccagccgcaacuccacccccggcagcagccgggggacgucccccgcccgcauggccggcaacgggggcgacgcggcccuggcccugcuccugcuggaccggcucaaccagcuggagagcaagauguccgggaagggccagcagcagcagggccagaccgugaccaagaaguccgccgccgaggcguccaagaagccgcgccagaagcgcaccgccacgaaggccuacaacgucacccaggccuucgggcggcgcggccccgagcagacccaggggaacuucggcgaccaggagcugauccggcaggggaccgacuacaagcacuggccccagaucgcccaguucgcgcccagcgccuccgccuucuucggcaugagccgcaucggcauggaggugacgccguccgggaccuggcucaccuacaccggcgccaucaagcuggacgacaaggaccccaacuucaaggaccaggugauccugcucaacaagcacaucgacgccuacaagacguucccgcccaccgagcccaagaaggacaagaagaagaaggcggacgagacccaggcccugccccagcggcagaagaagcagcagaccgucacgcugcuccccgccgccgaccuggacgacuucagcaagcagcugcagcaguccaugagcuccgcggacagcacccaggccuga

SEQ ID NO: 17201 - RNA, 1260 nt, Artificial Sequence
  SARS-CoV-2__MT913112.1__nucleocapsid protein (N) CDS gc
augagcgacaacggcccccagaaccagcgcaacgccccgcggaucaccuucgggggccccuccgacagcaccggguccaaccagaacggcgagcgcagcggggcccgguccaagcagcgccggccccagggccugcccaacaacacggcgagcugguucaccgcccucacccagcacggcaaggaggaccugaaguucccgcgcgggcagggcgugcccaucaacaccaacuccagccccgacgaccagaucggguacuaccggcgcgccacgcggcgcauccggggcggggacggcaagaugaaggaccugagcccccgcugguacuucuacuaccucggcaccgggccggaggccggccugcccuacggggccaacaaggacggcaucaucugggucgcgaccgagggcgcccugaacacccccaaggaccacaucgggacgcggaaccccgccaacaacgccgcgaucgugcuccagcugccgcagggcaccacccugcccaagggguucuacgccgagggcucccgcgggggcucccaggccagcucccggagcuccagccgcucccggaacagcucccgcaacagcacccccggcagcucccgggggacgagccccgcccgcauggccggcaacgggggcgacgcggcccucgcccugcugcuccuggaccggcugaaccagcucgaguccaagaugagcgggaagggccagcagcagcagggccagaccgugaccaagaaguccgccgccgaggcgagcaagaagccgcgccagaagcgcaccgccacgaaggccuacaacgucacccaggccuucgggcggcgcggccccgagcagacccaggggaacuucggcgaccaggagcugauccggcaggggaccgacuacaagcacuggccccagaucgcccaguucgcgcccuccgccagcgccuucuucggcaugucccgcaucggcauggaggugaucccgagcgggacguggcugaccuacaccggcgccaucaagcucgacgacaaggaccccaacuucaaggaccaggugauccugcugaacaagcacaucgacgccuacaagaccuucccgcccacggagcccaagaaggacaagaagaagaaggcggacgagacccaggcccucccccagcggcagaagaagcagcagaccgucacccugcugcccgccgccgaccucgacgacuucuccaagcagcugcagcagagcauguccagcgcggacuccacgcaggccuga

SEQ ID NO: 17202 - RNA, 1260 nt, Artificial Sequence
  SARS-CoV-2__MT913116.1__nucleocapsid protein (N) CDS gc
augagcgacaacggcccccagaaccagcgcaacgccccgcggaucaccuucgggggccccuccgacagcaccggguccaaccagaacggcgagcgcagcggggcccgguccaagcagcgccggccccagggccugcccaacaacacggcgagcugguucaccgcccucacccagcacggcaaggaggaccugaaguucccgcgcgggcagggcgugcccaucaacaccaacuccagccccgacgaccagaucggguacuaccggcgcgccacgcggcgcauccggggcggggacggcaagaugaaggaccugagcccccgcugguacuucuacuaccucggcaccgggccggaggccggccugcccuacggggccaacaaggacggcaucaucugggucgcgaccgagggcgcccugaacacccccaaggaccacaucgggacgcggaaccccgccaacaacgccgcgaucgugcuccagcugccgcagggcaccacccugcccaagggguucuacgccgagggcucccgcgggggcucccaggccagcucccggagcuccagccgcucccggaacagcucccgcaacagcacccccggcagcucccgggggacgagccccgcccgcauggccggcaacgggggcgacgcggcccucgcccugcugcuccuggaccggcugaaccagcucgaguccaagaugagcgggaagggccagcagcagcagggccagaccgugaccaagaagccggccgccgaggcguccaagaagccccgccagaagcgcaccgccacgaaggccuacaacgucacccaggccuucgggcggcgcggccccgagcagacccaggggaacuucggcgaccaggagcugauccggcaggggaccgacuacaagcacuggccccagaucgcccaguucgcgccgagcgccuccgccuucuucggcaugagccgcaucggcauggaggugacgcccuccgggaccuggcugaccuacaccggcgccaucaagcucgacgacaaggaccccaacuucaaggaccaggugauccugcugaacaagcacaucgacgccuacaagacguucccgcccaccgagcccaagaaggacaagaagaagaaggcggacgagacccaggcccucccccagcggcagaagaagcagcagaccgucacgcugcugcccgccgccgaccucgacgacuucagcaagcagcugcagcaguccaugagcuccgcggacagcacccaggccuga

SEQ ID NO: 17203 - RNA, 1260 nt, Artificial Sequence
  SARS-CoV-2__MT913134.1__nucleocapsid protein (N) CDS gc
augagcgacaacggcccccagaaccagcgcaacgccccgcggaucaccuucgggggccccuccgacagcaccggguccaaccagaacggcgagcgcagcggggcccgguccaagcagcgccggccccagggccugcccaacaacacggcgagcugguucaccgcccucacccagcacggcaaggaggaccugaaguucccgcgcgggcagggcgugcccaucaacaccaacuccagccccgacgaccagaucggguacuaccggcgcgccacgcggcgcauccggggcggggacggcaagaugaaggaccugagcccccgcugguacuucuacuaccucggcaccgggccggaggccggccugcccuacggggccaacaaggacggcaucaucugggucgcgaccgagggcgcccugaacacccccaaggaccacaucgggacgcggaaccccgccaacaacgccgcgaucgugcuccagcugccgcagggcaccacccugcccaagggguucuacgccgagggcagccgcgggggcucccaggccagcucccggagcuccagccgcucccggaacagcucccgcaacagcaccagcggcuccagccgggggacgucccccgcccgcauggccggcaacgggggcgacgcggcccucgcccugcugcuccuggaccggcugaaccagcucgagagcaagauguccgggaagggccagcagcagcagggccagaccgugaccaagaaguccgccgccgaggcguccaagaagccccgccagaagcgcaccgccacgaaggccuacaacgucacccaggccuucgggcggcgcggcccggagcagacccaggggaacuucggcgaccaggagcugauccggcaggggaccgacuacaagcacuggccccagaucgcccaguucgcgcccagcgccuccgccuucuucggcaugagccgcaucggcauggaggugacgcccuccgggaccuggcugaccuacaccggcgccaucaagcucgacgacaaggacccgaacuucaaggaccaggugauccugcugaacaagcacaucgacgccuacaagacguucccgcccaccgagcccaagaaggacaagaagaagaaggcggacgagacccaggcccucccccagcggcagaagaagcagcagaccgucacgcugcugcccgccgccgaccucgacgacuucagcaagcagcugcagcaguccaugagcuccgcggacagcacccaggccuga

SEQ ID NO: 17204 - RNA, 1260 nt, Artificial Sequence
  SARS-CoV-2__MT913151.1__nucleocapsid protein (N) CDS gc
augagcgacaacggcccccagaaccagcgcaacgccccgcggaucaccuucgggggccccuccgacagcaccggguccaaccagaacggcgagcgcagcggggcccgguccaagcagcgccggccccagggccugcccaacaacacggcgagcugguucaccgcccucacccagcacggcaaggaggaccugaaguucccgcgcgggcagggcgugcccaucaacaccaacuccagccccgacgaccagaucggguacuaccggcgcgccacgcggcgcauccggggcggggacggcaagaugaaggaccugagcccccgcugguacuucuacuaccucggcaccgggccggaggccggccugcccuacggggccaacaaggacggcaucaucugggucgcgaccgagggcgcccugaacacccccaaggaccacaucgggacgcggaaccccgccaacaacgccgcgaucgugcuccagcugccgcagggcaccacccugcccaagggguucuacgccgagggcagccgcgggggcucccaggccagcucccggagcuccagccgcucccggaacaucagccgcaacuccacccccggcagcagccgggggacgucccccgcccgcauggccggcaacgggggcgacgcggcccucgcccugcugcuccuggaccggcugaaccagcucgagagcaagauguccgggaagggccagcagcagcagggccagaccgugaccaagaaguccgccgccgaggcguccaagaagccgcgccagaagcgcaccgccacgaaggccuacaacgucacccaggccuucgggcggcgcggccccgagcagacccaggggaacuucggcgaccaggagcugauccggcaggggaccgacuacaagcacuggccccagaucgcccaguucgcgcccagcgccuccgccuucuucggcaugagccgcaucggcauggaggugacgccguccgggaccuggcugaccuacaccggcgccaucaagcucgacgacaaggaccccaacuucaaggaccaggugauccugcugaacaagcacaucgacgccuacaagacguucccgcccaccgagcccaagaaggacaagaagaagaaggcggacgagacccaggcccucccccagcggcagaagaagcagcagaccgucacgcugcugcccgccgccgaccucgacgacuucagcaagcagcugcagcaguccaugagcuccgcggacagcacccaggccuga

SEQ ID NO: 17205 - RNA, 1260 nt, Artificial Sequence
  SARS-CoV-2__MT907515.1__nucleocapsid protein (N) CDS gc
augagcgacaacggcccccagaaccagcgcaacgccccgcggaucaccuucgggggccccuccgacagcaccggguccaaccagaacggcgagcgcagcggggcccgguccaagcagcgccggccccagggccugcccaacaacacggcgagcugguucaccgcccucacccagcacggcaaggaggaccugaaguucccgcgcgggcagggcgugcccaucaacaccaacuccagccccgacgaccagaucggguacuaccggcgcgccacgcggcgcauccggggcggggacggcaagaugaaggaccugagcccccgcugguacuucuacuaccucggcaccgggccggaggccggccugcccuacggggccaacaaggacggcaucaucugggucgcgaccgagggcgcccugaacacccccaaggaccacaucgggacgcggaaccccgccaacaacgccgcgaucgugcuccagcugccgcagggcaccacccugcccaagggguucuacgccgagggcagccgcgggggcucccaggccagcucccggagcuccagccgcucccggaacagcucccgcaaccucacccccggcagcagccgggggacgucccccgcccgcauggccggcaacgggggcgacgcggcccuggcccugcuccugcuggaccggcucaaccagcuggagagcaagauguccgggaagggccagcagcagcagggccagaccgugaccaagaaguccgccgccgaggcguccaagaagccgcgccagaagcgcaccgccacgaaggccuacaacgucacccaggccuucgggcggcgcggccccgagcagacccaggggaacuucggcgaccaggagcugauccggcaggggaccgacuacaagcacuggccccagaucgcccaguucgcgcccagcgccuccgccuucuucggcaugagccgcaucggcauggaggugacgccguccgggaccuggcucaccuacaccggcgccaucaagcuggacgacaaggaccccaacuucaaggaccaggugauccugcucaacaagcacaucgacgccuacaagacguucccgcccaccgagcccaagaaggacaagaagaagaaggcggacgagacccaggcccugccccagcggcagaagaagcagcagaccgucacgcugcuccccgccgccgaccuggacgacuucagcaagcagcugcagcaguccaugagcuccgcggacagcacccaggccuga

SEQ ID NO: 17206 - RNA, 1260 nt, Artificial Sequence
  SARS-CoV-2__MT907519.1__nucleocapsid protein (N) CDS gc
augagcgacaacggcccccagaaccagcgcaacgccccgcggaucaccuucgggggccccuccgacagcaccggguccaaccagaacggcgagcgcagcggggcccgguccaagcagcgccggccccagggccugcccaacaacacggcgagcugguucaccgcccucacccagcacggcaaggaggaccugaaguucccgcgcgggcagggcgugcccaucaacaccaacuccagccccgacgaccagaucggguacuaccggcgcgccacgcggcgcauccggggcggggacggcaagaugaaggaccugagcccccgcugguacuucuacuaccucggcaccgggccggaggccggccugcccuacggggccaacaaggacggcaucaucugggucgcgaccgagggcgcccugaacacccccaaggaccacaucgggacgcggaaccccgccaacaacgccgcgaucgugcuccagcugccgcagggcaccacccugcccaagggguucuacgccgagggcucccgcgggggcucccaggccagcucccggagcuccagccgcucccggaacagcucccgcaacagcacccccggcagcucccgggggacgagccccgcccgcauggccggcaacgggggcgacgcggcccucgcccugcugcuccuggaccggcugaaccagcucgaguccaagaugagcgggaagggccagcagcagcagggccagaccgugaccaagaaguccgccgccgaggcgagcaagaagccgcgccagaagcgcaccgccacgaaggccuacaacgucacccaggccuucgggcggcgcggccccgagcagacccaggggaacuucggcgaccaggagcugauccggcaggggaccgacuacaagcacuggccccagaucgcccaguucgcgcccuccgccagcuccuucuucggcaugagccgcaucggcauggaggugacgccguccgggaccuggcugaccuacaccggcgccaucaagcucgacgacaaggaccccaacuucaaggaccaggugauccugcugaacaagcacaucgacgccuacaagacguucccgcccaccgagcccaagaaggacaagaagaagaaggccgacgagacccaggcgcucccccagcggcagaagaagcagcagaccgucacgcugcugcccgccgccgaccucgacgacuucagcaagcagcugcagcaguccaugagcuccgccgacagcacccaggcguga

SEQ ID NO: 17207 - RNA, 1260 nt, Artificial Sequence
  SARS-CoV-2__MT911799.1__nucleocapsid protein (N) CDS gc
augagcgacaacggcccccagaaccagcgcaacgccccgcggaucaccuucgggggccccuccgacagcaccggguccaaccagaacggcgagcgcagcggggcccgguccaagcagcgccggccccagggccugcccaacaacacggcgagcugguucaccgcccucacccagcacggcaaggaggaccugaaguucccgcgcgggcagggcgugcccaucaacaccaacuccagccccgacgaccagaucggguacuaccggcgcgccacgcggcgcauccggggcggggacggcaagaugaaggaccugagcccccgcugguacuucuacuaccucggcaccgggccggaggccggccugcccuacggggccaacaaggacggcaucaucugggucgcgaccgagggcgcccugaacacccccaaggaccacaucgggacgcggaaccccgccaacaacgccgcgaucgugcuccagcugccgcagggcaccacccugcccaagggguucuacgccgagggcucccgcgggggcucccaggccagcucccggagcuccagccgcucccggaacagcucccgcaacagcacccccggcagcucccgggggacgagccccgcccgcauggccggcaacgggggcgacgcggcccucgcccugcugcuccuggaccggcugaaccagcucgaguccaagaugagcgggaagugccagcagcagcagggccagaccgugaccaagaaguccgccgccgaggcgagcaagaagccgcgccagaagcgcaccgccacgaaggccuacaacgucacccaggccuucggccggcgcgggcccgagcagacccagggcaacuucggggaccaggagcugauccggcagggcaccgacuacaagcacuggccccagaucgcccaguucgcgcccuccgccagcgccuucuucgggaugucccgcaucggcauggaggugacgccgagcggcaccuggcugaccuacaccggggccaucaagcucgacgacaaggaccccaacuucaaggaccaggugauccugcugaacaagcacaucgacgccuacaagacguucccgcccaccgagcccaagaaggacaagaagaagaaggcggacgagacccaggcccucccccagcggcagaagaagcagcagaccgucacgcugcugcccgccgccgaccucgacgacuucuccaagcagcugcagcagagcauguccagcgcggacuccacccaggccuga

SEQ ID NO: 17208 - RNA, 1260 nt, Artificial Sequence
  SARS-CoV-2__MT911819.1__nucleocapsid protein (N) CDS gc
augagcgacaacggcccccagaaccagcgcaacgccccgcggaucaccuucgggggccccuccgacagcaccggguccaaccaguacggcgagcgcagcggggcccgguccaagcagcgccggccccagggccugcccaacaacacggcgagcugguucaccgcccucacccagcacggcaaggaggaccugaaguucccgcgcgggcagggcgugcccaucaacaccaacuccagccccgacgaccagaucggguacuaccggcgcgccacgcggcgcauccggggcggggacggcaagaugaaggaccugagcccccgcugguacuucuacuaccucggcaccgggccggaggccggccugcccuacggggccaacaaggacggcaucaucugggucgcgaccgagggcgcccugaacacccccaaggaccacaucgggacgcggaaccccgccaacaacgccgcgaucgugcuccagcugccgcagggcaccacccugcccaagggguucuacgccgagggcagccgcgggggcucccaggccuacagccgguccagcucccgcagccggaacuccagccgcaacuccacccccggcagcagccgggggacgucccccgcccgcauggccggcaacgggggcgacgcggcccucgcccugcugcuccuggaccggcugaaccagcucgagagcaagauguccgggaagggccagcagcagcagggccagaccgugaccaagaaguccgccgccgaggcguccaagaagccgcgccagaagcgcaccgccacgaaggccuacaacgucacccaggccuucgggcggcgcggccccgagcagacccaggggaacuucggcgaccaggagcugauccggcaggggaccgacuacaagcacuggccccagaucgcccaguucgcgcccagcgccuccgccuucuucggcaugagccgcaucggcauggaggugacgccguccgggaccuggcugaccuacaccggcgccaucaagcucgacgacaaggaccccaacuucaaggaccaggugauccugcugaacaagcacaucgacgccuacaagacguucccgcccaccgagcccaagaaggacaagaagaagaaggcggacgagacccaggcccucccccagcggcagaagaagcagcagaccgucacgcugcugcccgccgccgaccucgacgacuucagcaagcagcugcagcaguccaugagcuccgcggacagcacccaggccuga

SEQ ID NO: 17209 - RNA, 1260 nt, Artificial Sequence
  SARS-CoV-2__MT911820.1__nucleocapsid protein (N) CDS gc
augagcgacaacggcccccagaaccagcgcaacgccccgcggaucaccuucgggggccccuccgacagcaccggguccaaccagaacggcgagcgcagcggggcccgguccaagcagcgccggccccagggccugcccaacaacacggcgagcugguucaccgcccucacccagcacggcaaggaggaccugaaguucccgcgcgggcagggcgugcccaucaacaccaacuccagccccgacgaccagaucggguacuaccggcgcgccacgcggcgcauccggggcggggacggcaagaugaaggaccugagcccccgcugguacuucuacuaccucggcaccgggccggaggccggccugcccuacggggccaacaaggacggcaucaucugggucgcgaccgagggcgcccugaacacccccaaggaccacaucgggacgcggaaccccgccaacaacgccgcgaucgugcuccagcugccgcagggcaccacccugcccaagggguucuacgccgagggcucccgcgggggcucccaggccagcucccggagcuccagccgcucccggaacagcucccgcaacagcacccccggcagcucccgggggacgagccccgcccgcauggccggcaacgggggcgacgcggcccucgcccugcugcuccuggaccggcugaaccagcucgaguccaagaugagcgggaagggccagcagcagcagggccagaccgugaccaagaaguccgccgccgaggcgagcaagaagccgcgccagaagcgcaccgccacgaaggccuacaacgucacccaggccuucgggcggcgcggccccgagcagacccaggggaacuucggcgaccaggagcugauccggcaggggaccgacuacaagcacuggccccagaucgcccaguucucccccagcgcguccgccuucuucggcaugagccgcaucggcauggaggugacgccguccgggaccuggcugaccuacaccggcgccaucaagcucgacgacaaggaccccaacuucaaggaccaggugauccugcugaacaagcacaucgacgccuacaagacguucccgcccaccgagcccaagaaggacaagaagaagaaggccgacgagacccaggcgcucccccagcggcagaagaagcagcagaccgucacgcugcugcccgccgccgaccucgacgacuucagcaagcagcugcagcaguccaugagcuccgccgacagcacccaggcguga

SEQ ID NO: 17210 - RNA, 1260 nt, Artificial Sequence
  SARS-CoV-2__MT911827.1__nucleocapsid protein (N) CDS gc
augagcgacaacggcccccagaaccagcgcaacgccccgcggaucaccuucgggggccccuccgacagcaccggguccaaccagaacggcgagcgcagcggggcccgguccaagcagcgccggccccagggccugcccaacaacacggcgagcugguucaccgcccucacccagcacggcaaggaggaccugaaguucccgcgcgggcagggcgugcccaucaacaccaacuccagccccgacgaccagaucggguacuaccggcgcgccacgcggcgcauccggggcggggacggcaagaugaaggaccugagcccccgcugguacuucuacuaccucggcaccgggccggaggccggccugcccuacggggccaacaaggacggcaucaucugggucgcgaccgagggcgcccugaacacccccaaggaccacaucgggacgcggaaccccgccaacaacgccgcgaucgugcuccagcugccgcagggcaccacccugcccaagggguucuacgccgagggcagccgcgggggcucccaggccuacagccgguccagcucccgcagccggaacuccagccgcaacuccacccccggcagcagccgggggacgucccccgcccgcauggccggcaacgggggcgacgcggcccucgcccugcugcuccuggaccggcugaaccagcucgagagcaagauguccgggaagggccagcagcagcagggccagaccgugaccaagaaguccgccgccgaggcguccaagaagccgcgccagaagcgcaccgccacgaaggccuacaacgucacccaggccuucgggcggcgcggccccgagcagacccaggggaacuucggcgaccaggagcugauccggcaggggaccgacuacaagcacuggccccagaucgcccaguucgcgcccagcgccuccgccuucuucggcaugagccgcaucggcauggaggugacgccguccgggaccuggcugaccuacaccggcgccaucaagcucgacgacaaggaccccaacuucaaggaccaggugauccugcugaacaagcacaucgacagcuacaagacguucccgcccaccgagcccaagaaggacaagaagaagaaggccgacgagacccaggcgcucccccagcggcagaagaagcagcagaccgucacgcugcugcccgccgccgaccucgacgacuucuccaagcagcugcagcagagcauguccagcgccgacuccacccaggcguga

SEQ ID NO: 17211 - RNA, 1260 nt, Artificial Sequence
  SARS-CoV-2__MT893671.1__nucleocapsid protein (N) CDS gc
augagcgacaacggcccccagaaccagcgcaacgccccgcggaucaccuucgggggccccuccgacagcaccggguccaaccagaacggcgagcgcagcggggcccgguccaagcagcgccggccccagggccugcccaacaacacggcgagcugguucaccgcccucacccagcacggcaaggaggaccugaaguucccgcgcgggcagggcgugcccaucaacaccaacuccagccccgacgaccagaucggguacuaccggcgcgccacgcggcgcauccggggcggggacggcaagaugaaggaccugagcccccgcugguacuucuacuaccucggcaccgggccggaggccggccugcccuacggggccaacaaggacggcaucaucugggucgcgaccgagggcgcccugaacacccccaaggaccacaucgggacgcggaaccccgccaacaacgccgcgaucgugcuccagcugccgcagggcaccacccugcccaagggguucuacgccgagggcucccgcgggggcucccaggccagcucccggagcuccagccgcucccggaacagcucccgcaacagcacccccggcagcucccgggggacgagccccgcccgcauggccggcaacgggggcgacgcggcccucgcccugcugcuccuggaccggcugaaccagcucgaguccaagaugagcgggaagggccagcagcagcagggccagaccgugaacaagaaguccgccgccgaggcgagcaagaagccgcgccagaagcgcaccgccaccaaggccuacaacgucacgcaggccuucgggcggcgcggccccgagcagacccaggggaacuucggcgaccaggagcugauccggcaggggaccgacuacaagcacuggccccagaucgcccaguucgcgcccuccgccagcgccuucuucggcaugucccgcaucggcauggaggugaccccgagcgggacguggcugaccuacaccggcgccaucaagcucgacgacaaggaccccaacuucaaggaccaggugauccugcugaacaagcacaucgacgccuacaagaccuucccgcccacggagcccaagaaggacaagaagaagaaggcggacgagacccaggcccucccccagcggcagaagaagcagcagaccgucacccugcugcccgccgccgaccucgacgacuucuccaagcagcugcagcagagcauguccagcgcggacuccacgcaggccuga

SEQ ID NO: 17212 - RNA, 1260 nt, Artificial Sequence
  SARS-CoV-2__MT893675.1__nucleocapsid protein (N) CDS gc
augagcgacaacggcccccagaaccagcgcaacgccccgcggaucaccuucgggggccccuccgacagcaccggguccaaccagaacggcgagcgcagcggggcccgguccaagcagcgccggccccagggccugcccaacaacacggcgagcugguucaccgcccucacccagcacggcaaggaggaccugaaguucccgcgcgggcagggcgugcccaucaacaccaacuccagccccgacgaccagaucggguacuaccggcgcgccacgcggcgcauccggggcggggacggcaagaugaaggaccugagcccccgcugguacuucuacuaccucggcaccgggccggaggccggccugcccuacggggccaacaaggacggcaucaucugggucgcgaccgagggcgcccugaacacccccaaggaccacaucgggacgcggaaccccgccaacaacgccgcgaucgugcuccagcugccgcagggcaccacccugcccaagggguucuacgccgagggcucccgcgggggcucccaggccagcucccggagcuccagccgcucccggaacagcucccgcaacagcacccccggcagcuccaagcggacgagccccgcccgcauggccgggaacggcggggacgcggcccucgcccugcugcuccuggaccggcugaaccagcucgaguccaagaugagcggcaaggggcagcagcagcagggccagaccgugaccaagaaguccgccgccgaggcgagcaagaagccgcgccagaagcgcaccgccacgaaggccuacaacgucacccaggccuucggccggcgcgggcccgagcagacccagggcaacuucggggaccaggagcugacccggcagggcacggacuacaagcacuggccccagaucgcccaguucgcgcccuccgccagcgccuucuucgggaugucccgcaucggcauggaggugaccccgagcggcaccuggcugaccuacacgggggccaucaagcucgacgacaaggaccccaacuucaaggaccaggugauccugcugaacaagcacaucgacgccuacaagaccuucccgcccaccgagcccaagaaggacaagaagaagaaggcggacgagacccaggcccucccccagcggcagaagaagcagcagacggucacccugcugcccgccgccgaccucgacgacuucuccaagcagcugcagcagagcauguccagcgcggacuccacccaggccuga

SEQ ID NO: 17213 - RNA, 1260 nt, Artificial Sequence
  SARS-CoV-2__MT893681.1__nucleocapsid protein (N) CDS gc
augagcgacaacggcccccagaaccagcgcaacgccccgcggaucaccuucgggggccccuccgacagcaccggguccaaccagaacggcgagcgcagcggggcccgguccaagcagcgccggccccagggccugcccaacaacacggcgagcugguucaccgcccucacccagcacggcaaggaggaccugaaguucccgcgcgggcagggcgugcccaucaacaccaacuccagccccgacgaccagaucggguacuaccggcgcgccacgcggcgcauccggggcggggacggcaagaugaaggaccugagcccccgcugguacuucuacuaccucggcaccgggccggaggccggccugcccuacggggccaacaaggacggcaucaucugggucgcgaccgagggcgcccugaacacccccaaggaccacaucgggacgcggaaccccgccaacaacgccgcgaucgugcuccagcugccgcagggcaccauccugcccaagggguucuacgccgagggcucccgcgggggcucccaggccagcucccggagcuccagccgcucccggaacagcucccgcaacagcacccccggcagcucccgggggaucagccccgcccgcauggccggcaacgggggcgacgcggcccucgcccugcugcuccuggaccggcugaaccagcucgaguccaagaugagcgggaagggccagcagcagcagggccagaccgugacgaagaaguccgccgccgaggcgagcaagaagccgcgccagaagcgcaccgccaccaaggccuacaacgucacccaggccuucgggcggcgcggccccgagcagacgcaggggaacuucggcgaccaggagcugauccggcaggggaccgacuacaagcacuggccccagaucgcccaguucgcgcccuccgccagcgccuucuucggcaugucccgcaucggcauggaggugaccccgagcgggaccuggcugacguacaccggcgccaucaagcucgacgacaaggaccccaacuucaaggaccaggugauccugcugaacaagcacaucgacgccuacaagaccuucccgcccaccgagcccaagaaggacaagaagaagaaggcggacgagacgcaggcccucccccagcggcagaagaagcagcagaccgucacccugcugcccgccgccgaccucgacgacuucuccaagcagcugcagcagagcauguccagcgcggacuccacccaggccuga

SEQ ID NO: 17214 - RNA, 1260 nt, Artificial Sequence
  SARS-CoV-2__MT893685.1__nucleocapsid protein (N) CDS gc
augagcgacaacggcccccagaaccagcgcaacgccccgcggaucaccuucgggggccccuccgacagcaccggguccaaccagaacggcgagcgcagcggggcccgguccaagcagcgccggccccgcggccugcccaacaacacggcgagcugguucaccgcccucacccagcacggcaaggaggaccugaaguucccgcgggggcagggcgugcccaucaacaccaacuccagccccgacgaccagaucggguacuaccgccgggccacgcgccggauccgcggcggggacggcaagaugaaggaccugagcccccggugguacuucuacuaccucggcaccgggccggaggccggccugcccuacggggccaacaaggacggcaucaucugggucgcgaccgagggcgcccugaacacccccaaggaccacaucgggacgcgcaaccccgccaacaacgccgcgaucgugcuccagcugccgcagggcaccacccugcccaagggguucuacgccgagggcagccgcgggggcucccaggccuacagccgguccagcucccggagccgcaacuccagccggaacuccacccccggcagcagccgcgggacgucccccgcccggauggccggcaacgggggcgacgcggcccucgcccugcugcuccuggaccgccugaaccagcucgagagcaagauguccgggaagggccagcagcagcagggccagaccgugaccaagaaguccgccgccgaggcguccaagaagccgcgccagaagcggaccgccacgaaggccuacaacgucacccaggccuucgggcgccggggccccgagcagacccaggggaacuucggcgaccaggagcugauccgccaggggaccgacuacaagcacuggccccagaucgcccaguucgcgcccagcgccuccgccuucuucggcaugagccggaucggcauggaggugacgccguccgggaccuggcugaccuacaccggcgccaucaagcucgacgacaaggaccccaacuucaaggaccaggugauccugcugaacaagcacaucgacgccuacaagacguucccgcccaccgagcccaagaaggacaagaagaagaaggcggacgagacccaggcccucccccagcgccagaagaagcagcagaccgucacgcugcugcccgccgccgaccucgacgacuucagcaagcagcugcagcaguccaugagcuccgcggacagcacccaggccuga

SEQ ID NO: 17215 - RNA, 1260 nt, Artificial Sequence
  SARS-CoV-2__MT890230.1__nucleocapsid protein (N) CDS gc
augagcgacaacggcccccagaaccagcgcaacgccccgcggaucaccuucgggggccccuccgacagcaccggguccaaccagaacggcgagcgcagcggggcccgguccaagcagcgccggccccagggccugcccaacaacacggcgagcugguucaccgcccucacccagcacggcaaggaggaccugaaguucccgcgcgggcagggcgugcccaucaacaccaacuccagccccgacgaccagaucggguacuaccggcgcgccacgcggcgcauccggggcggggacggcaagaugaaggaccugagcccccgcugguacuucuacuaccucggcaccgggccggaggccggccugcccuacggggccaacaaggacggcaucaucugggucgcgaccgagggcgcccugaacacccccaaggaccacaucgggacgcggaaccccgccaacaacgccgcgaucgugcuccagcugccgcagggcaccacccugcccaagggguucuacgccgagggcagccgcgggggcucccaggccagcucccggagcuccagccgcucccggaacagcucccgcaacagcacccccggcagcaaccgggggacgucccccgcccgcauggccggcaacgggggcgacgcggcccucgcccugcugcuccuggaccggcugaaccagcucgagagcaagauguccgggaagggccagcagcagcagggccagaccgugaccaagaaguccgccgccgaggcguccaagaagccgcgccagaagcgcaccgccacgaaggccuacaacgucacccaggccuucgggcggcgcggccccgagcagacccaggggaacuucggcgaccaggagcugauccggcaggggaccgacuacaagcacuggccccagaucgcccaguucgcgcccagcgccuccgccuucuucggcaugagccgcaucggcauggaggugacgccguccgggaccuggcugaccuacaccggcgccaucaagcucgacgacaaggaccccaacuucaaggaccaggugauccugcugaacaagcacaucgacgccuacaagacguucccgcccaccgagcccaagaaggacaagaagaagaaggcggacgagacccaggcccucccccagcggcagaagaagcagcagaccgucacgcugcugcccgccgccgaccucgacgacuucagcaagcagcugcagcaguccaugagcuccgcggacagcacccaggccuga

SEQ ID NO: 17216 - RNA, 1260 nt, Artificial Sequence
  SARS-CoV-2__MT890236.1__nucleocapsid protein (N) CDS gc
augagcgacaacggcccccagaaccagcgcaacgccccgcggaucaccuucgggggccccuccgacagcaccggguccaaccagaacggcgagcgcagcggggcccgguccaagcagcgccggccccagggccugcccaacaacacggcgagcugguucaccgcccucacccagcacggcaaggaggaccugaaguucccgcgcgggcagggcgugcccaucaacaccaacuccagccccgacgaccagaucggguacuaccggcgcgccacgcggcgcauccggggcggggacggcaagaugaaggaccugagcccccgcugguacuucuacuaccucggcaccgggccggaggccggccugcccuacggggccaacaaggacggcaucaucugggucgcgaccgagggcgcccugaacacccccaaggaccacaucgggacgcggaaccccgccaacaacgccgcgaucgugcuccagcugccgcagggcaccacccugcccaagggguucuacgccgagggcagccgcgggggcucccaggccagcucccggagcuccagccgcucccggaacagcucccgcaacagcacccccggcagcucccgggggaucagccccgcccgcauggccggcaacgggggcgacgcggcccucgcccugcugcuccuggaccggcugaaccagcucgagacgaagauguccgggaagggccagcagcagcagggccagaccgugaccaagaaguccgccgccgaggcguccaagaagccgcgccagaagcgcaccgccacgaaggccuacaacgucacccaggccuucgggcggcgcggccccgagcagacccaggggaacuucggcgaccaggagcugauccggcaggggaccgacuacaagcacuggccccagaucgcccaguucgcgcccagcgccuccgccuucuucggcaugagccgcaucggcauggaggugacgccguccgggaccuggcugaccuacaccggcgccaucaagcucgacgacaaggaccccaacuucaaggaccaggugauccugcugaacaagcacaucgacgccuacaagacguucccgcccaccgagcccaagaaggacaagaagaagaaggcggacgagacccaggcccucccccagcggcagaagaagcagcagaccgucacgcugcugcccgccgccgaccucgacgacuucagcaagcagcugcagcaguccaugagcuccgcggacagcacccaggccuga

SEQ ID NO: 17217 - RNA, 1260 nt, Artificial Sequence
  SARS-CoV-2__MT890238.1__nucleocapsid protein (N) CDS gc
augagcgacaacggcccccagaaccagcgcaacgccccgcggaucaccuucgggggccccuccgacagcaccggguccaaccagaacggcgagcgcagcggggcccgguccaagcagcgccggccccagggccugcccaacaacacggcgagcugguucaccgcccucacccagcacggcaaggaggaccugaaguucccgcgcgggcagggcgugcccaucaacaccaacuccagccccgacgaccagaucggguacuaccggcgcgccacgcggcgcauccggggcggggacggcaagaugaaggaccugagcccccgcugguacuucuacuaccucggcaccgggccggaggccggccugcccuacggggccaacaaggacggcaucaucugggucgcgaccgagggcgcccugaacacccccaaggaccacaucgggacgcggaaccccgccaacaacgccgcgaucgugcuccagcugccgcagggcaccacccugcccaagggguucuacgccgagggcucccgcgggggcucccaggccagcucccggagcuccagccgcucccggaacagcucccgcaacagcacccccggcagcaaccgggggacgucccccgcccgcauggccggcaacgggggcgacgcggcccucgcccugcugcuccuggaccggcugaaccagcucgagcgcaagaugagcgggaagggccagcagcagcagggccagaccgugaccaagaaguccgccgccgaggcgagcaagaagccgcgccagaagcggaccgccacgaaggccuacaacgucacccaggccuucgggcgccggggccccgagcagacccaggggaacuucggcgaccaggagcugauccgccaggggaccgacuacaagcacuggccccagaucgcccaguucgcgcccuccgccagcgccuucuucggcaugucccggaucggcauggaggugacgccgagcgggaccuggcugaccuacaccggcgccaucaagcucgacgacaaggaccccaacuucaaggaccaggugauccugcugaacaagcacaucgacgccuacaagacguucccgcccaccgagcccaagaaggacaagaagaagaaggcggacgagacccaggcccucccccagcgccagaagaagcagcagaccgucacgcugcugcccgccgccgaccucgacgacuucuccaagcagcugcagcagagcauguccagcgcggacuccacccaggccuga

SEQ ID NO: 17218 - RNA, 1260 nt, Artificial Sequence
  SARS-CoV-2__MT890293.1__nucleocapsid protein (N) CDS gc
augagcgacaacggcccccagaaccagcgcaacgccccgcggaucaccuucgggggccccuccgacagcaccggguccaaccagaacggcgagcgcagcggggcccgguccaagcagcgccggccccagggccugcccaacaacacggcgagcugguucaccgcccucacccagcacggcaaggaggaccugaaguucccgcgcgggcagggcgugcccaucaacaccaacuccagccccgacgaccagaucggguacuaccggcgcgccacgcggcgcauccggggcggggacggcaagaugaaggaccugagcccccgcugguacuucuacuaccucggcaccgggccggaggccggccugcccuacggggccaacaaggacggcaucaucugggucgcgaccgagggcgcccugaacacccccaaggacuacaucgggacgcggaaccccgccaacaacgccgcgaucgugcuccagcugccgcagggcaccacccugcccaagggguucuacgccgagggcucccgcgggggcucccaggccagcucccggagcuccagccgcucccggaacagcucccgcaacagcacccccggcagcucccgggggacgagccccgcccgcauggccggcaacgggggcgacgcggcccucgcccugcugcuccuggaccggcugaaccagcucgaguccaagaugagcgggaagggccagcagcagcagggccagaccgugaccaagaaguccgccgccgaggcgagcaagaagccgcgccagaagcgcaccgccacgaaggccuacaacgucacccaggccuucgggcggcgcggccccgagcagacccaggggaacuucggcgaccaggagcugauccggcaggggaccgacuacaagcacuggccccagaucgcccaguucgcgcccuccgccagcgccuucuucggcaugucccgcaucggcauggaggugacgccgagcgggaccuggcugaccuacaccggcgccaucaagcucgacgacaaggaccccaacuucaaggaccaggugauccugcugaacaagcacaucgacgccuacaagacguucccgcccaccgagcccaagaaggacaagaagaagaaggcggacgagacccaggcccucccccagcggcagaagaagcagcagaccgucacgcugcugcccgccgccgaccucgacgacuucuccaagcagcugcagcagagcauguccagcgcggacuccacccaggccuga

SEQ ID NO: 17219 - RNA, 1260 nt, Artificial Sequence
  SARS-CoV-2__MT890316.1__nucleocapsid protein (N) CDS gc
augagcgacaacggcccccagaaccagcgcaacgccccgcggaucaccuucgggggccccuccgacagcaccggguccaaccagaacggcgagcgcagcggggcccgguccaagcagcgccggccccagggccugcccaacaacacggcgagcugguucaccgcccucacccagcacggcaaggaggaccugaaguucccgcgcgggcagggcgugcccaucaacaccaacuccagccccgacgaccagaucggguacuaccggcgcgccacgcggcgcauccggggcggggacggcaagaugaaggaccugagcccccgcugguacuucuacuaccucggcaccgggccggaggccggccugcccuacggggccaacaaggacggcaucaucugggucgcgaccgagggcgcccugaacacccccaaggaccacaucgggacgcggaaccccgccaacaacgccgcgaucgugcuccagcugccgcagggcaccacccugcccaagggguucuacgccgagggcucccgcgggggcucccaggccagcucccggagcuccagccgcucccggaacagcucccgcaacagcacccccggcagcucccgggggacgagccccgcccgcauggccggcaacgggggcgacgcggcccucgcccugcugcuccuggaccggcugaaccagcucgaguccaagaugagcgggaagggccagcagcagcagggccagaccgugaccaagaaguccgccgccgaggcgagcaagaagccgcgccagaagcgcaccgccacgaaggccuacaacgucacccaggccuucgggcggcgcggccccgagcagacccaggggaacuucggcgaccaggagcugauccggcaggggaccgacuacaagcacuggccccagaucgcccaguucgcgcccuccgccagcgccuucuucggcaugucccgcaucggcauggaggugacgccgagcgggaccuggcugaccuacaccggcgccaucaagcucgacgacaaggaccccaacuucaaggaccaggugauccugcugaacaagcacaucgacgccuacaagacguucccgcccaccgagcccaagaaggacaagaagaagaaggcggacgagacccaggcccucccccagcggcagaacaagcagcagaccgucacgcugcugcccgccgccgaccucgacgacuucuccaagcagcugcagcagagcauguccagcgcggacuccacccaggccuga

SEQ ID NO: 17220 - RNA, 1260 nt, Artificial Sequence
  SARS-CoV-2__MT890320.1__nucleocapsid protein (N) CDS gc
augagcgacaacggcccccagaaccagcgcaacgccccgcggaucaccuucgggggccccuccgacagcaccggguccaaccagaacggcgagcgcagcggggcccgguccaagcagcgccggccccagggccugcccaacaacacggcgagcugguucaccgcccucacccagcacggcaaggaggaccugaaguucccgcgcgggcagggcgugcccaucaacaccaacuccagccccgacgaccagaucggguacuaccggcgcgccacgcggcgcauccggggcggggacggcaagaugaaggaccugagcccccgcugguacuucuacuaccucggcaccgggccggaggccggccugcccuacggggccaacaaggacggcaucaucugggucgcgaccgagggcgcccugaacacccccaaggaccacaucgggacgcggaaccccgccaacaacgccgcgaucgugcuccagcugccgcagggcaccacccugcccaagggguucuacgccgagggcagccgcgggggcucccaggccagcucccggagcuccagccgcauccggaacuccagccgcaacuccacccccggcagcagccgggggacgucccccgcccgcauggccggcaacgggggcgacgcggcccucgcccugcugcuccuggaccggcugaaccagcucgagagcaagauguccgggaagggccagcagcagcagggccagaccgugaccaagaaguccgccgccgaggcguccaagaagccgcgccagaagcgcaccgccacgaaggccuacaacgucacccaggccuucgggcggcgcggccccgagcagacccaggggaacuucggcgaccaggagcugauccggcaggggaccgacuacaagcacuggccccagaucgcccaguucgcgcccagcgccuccgccuucuucggcaugagccgcaucggcauggaggugacgccguccgggaccuggcugaccuacaccggcgccaucaagcucgacgacaaggaccccaacuucaaggaccaggugauccugcugaacaagcacaucgacgccuacaagacguucccgcccaccgagcccaagaaggacaagaagaagaaggcggacgagacccaggcccucccccagcggcagaagaagcagcagaccgucacgcugcugcccgccgccgaccucgacgacuucagcaagcagcugcagcaguccaugagcuccgcggacagcacccaggccuga

SEQ ID NO: 17221 - RNA, 1260 nt, Artificial Sequence
  SARS-CoV-2__MT890321.1__nucleocapsid protein (N) CDS gc
augagcgacaacggcccccagaaccagcgcaacgccccgcggaucaccuucgggggccccuccgacagcaccggguccaaccagaacggcgagcgcagcggggcccgguccaagcagcgccggccccagggccugcccaacaacacggcgagcugguucaccgcccucacccagcacggcaaggaggaccugaaguucccgcgcgggcagggcgugcccaucaacaccaacuccagccccgacgaccagaucggguacuaccggcgcgccacgcggcgcauccggggcggggacggcaagaugaaggaccugagcccccgcugguacuucuacuaccucggcaccgggccggaggccggccugcccuacggggccaacaaggacggcaucaucugggucgcgaccgagggcgcccugaacacccccaaggaccacaucgggacgcggaaccccgccaacaacgccgcgaucgugcuccagcugccgcagggcaccacccugcccaagggguucuacgccgagggcucccgcgggggcucccaggccagcucccggagcuccagccgcucccggaacagcucccgcaacagcacccccggcagcuccgggggcacgagccccgcccggauggccgggaacggcggggacgcggcccucgcccugcugcuccuggaccgccugaaccagcucgaguccaagaugagcggcaagggccagcagcagcaggggcagaccgugaccaagaaguccgccgccgaggcgagcaagaagccgcggcagaagcgcaccgccacgaaggccuacaacgucacccaggccuucggccgccgggggcccgagcagacccagggcaacuucggggaccaggagcugauccgccagggcaccgacuacaagcacuggccccagaucgcccaguucgcgcccuccgccagcgccuucuucggcaugucccggaucgggauggaggugacgccgagcggcaccuggcugaccuacaccggggccaucaagcucgacgacaaggaccccaacuucaaggaccaggugauccugcugaacaagcacaucgacgccuacaagacguucccgcccaccgagcccaagaaggacaagaagaagaaggcggacgagacccaggcccucccccagcgccagaagaagcagcagaccgucacgcugcugcccgccgccgaccucgacgacuucuccaagcagcugcagcagagcauguccagcgcggacuccacccaggccuga

SEQ ID NO: 17222 - RNA, 1260 nt, Artificial Sequence
  SARS-CoV-2__MT892973.1__nucleocapsid protein (N) CDS gc
augagcgacaacggcccccagaaccagcgcaacgccccgcggaucaccuucgggggccccuccgacagcaccggguccaaccagaacggcgagcgcagcggggcccgguccaagcagcgccggccccagggccugcccaacaacacggcgagcugguucaccgcccucacccagcacggcaaggaggaccugaaguucccgcgcgggcagggcgugcccaucaacaccaacuccagccccgacgaccagaucggguacuaccggcgcgccacgcggcgcauccggggcggggacggcaagaugaaggaccugagcccccgcugguacuucuacuaccucggcaccgggccggaggccggccugcccuacggggccaacaaggacggcaucaucugggucgcgaccgagggcgcccugaacacccccaaggaccacaucgggacgcggaaccccgccaacaacgccgcgaucgugcuccagcugccgcagggcaccacccugcccaagggguucuacgccgagggcagccgcgggggcucccaggccagcucccggagcuccagccgcucccggaacagcucccgcaacagcacccccggcagcucccgggggacgagccccgcccgcauggccggcaacgggggcgacgcggcccucgcccugcugcuccuggaccggcugaaccagcucgaguccaagauguucgggaagggccagcagcagcagggccagaccgugaccaagaaguccgccgccgaggcguccaagaagccgcgccagaagcgcaccgccacgaaggccuacaacgucacccaggccuucgggcggcgcggccccgagcagacccaggggaacuucggcgaccaggagcugauccggcaggggaccgacuacaagcacuggccccagaucgcccaguucgcgcccagcgccuccgccuucuucggcaugagccgcaucggcauggaggugacgccguccgggaccuggcugaccuacaccggcgccaucaagcucgacgacaaggaccccaacuucaaggaccaggugauccugcugaacaagcacaucgacgccuacaagacguucccgcccaccgagcccaagaaggacaagaagaagaaggcggacgagacccaggcccucccccagcggcagaagaagcagcagaccgucacgcugcugcccgccgccgaccucgacgacuucagcaagcagcugcagcaguccaugagcuccgcggacagcacccaggccuga

SEQ ID NO: 17223 - RNA, 1260 nt, Artificial Sequence
  SARS-CoV-2__MT892974.1__nucleocapsid protein (N) CDS gc
augagcgacaacggcccccagaaccagcgcaacgccccgcggaucaccuucgggggccccuccgacagcaccggguccaaccagaacggcgagcgcagcggggcccgguccaagcagcgccggccccagggccugcccaacaacacggcgagcugguucaccgcccucacccagcacggcaaggaggaccugaaguucccgcgcgggcagggcgugcccaucaacaccaacuccagccccgacgaccagaucggguacuaccggcgcgccacgcggcgcauccggggcggggacggcaagaugaaggaccugagcccccgcugguacuucuacuaccucggcaccgggccggaggccggccugcccuacggggccaacaaggacggcaucaucugggucgcgaccgagggcgcccugaacacccccaaggaccacaucgggacgcggaaccccgccaacaacgccgcgaucgugcuccagcugccgcagggcaccacccugcccaagggguucuacgccgagggcagccgcgggggcucccaggccagcucccggagcuccagccgcucccggaacagccuccgcaacuccacccccggcagcagccgggggacgucccccgcccgcauggccggcaacgggggcgacgcggcccuggcccugcuccugcuggaccggcucaaccagcuggagagcaagauguccgggaagggccagcagcagcagggccagaccgugaccaagaaguccgccgccgaggcguccaagaagccgcgccagaagcgcaccgccacgaaggccuacaacgucacccaggccuucgggcggcgcggccccgagcagacccaggggaacuucggcgaccaggagcugauccggcaggggaccgacuacaagcacuggccccagaucgcccaguucgcgcccagcgccuccgccuucuucggcaugagccgcaucggcauggaggugacgccguccgggaccuggcucaccuacaccggcgccaucaagcuggacgacaaggaccccaacuucaaggaccaggugauccugcucaacaagcacaucgacgccuacaagacguucccgcccaccgagcccaagaaggacaagaagaagaaggcggacgagacccaggcccugccccagcggcagaagaagcagcagaccgucacgcugcuccccgccgccgaccuggacgacuucagcaagcagcugcagcaguccaugagcuccgcggacagcacccaggccuga

SEQ ID NO: 17224 - RNA, 1260 nt, Artificial Sequence
  SARS-CoV-2__MT892993.1__nucleocapsid protein (N) CDS gc
augagcgacaacggcccccagaaccagcgcaacgccccgcggaucaccuucgggggccccuccgacagcaccggguccaaccagaacggcgagcgcagcggggcccgguccaagcagcgccggccccagggccugcccaacaacacggcgagcugguucaccgcccucacccagcacggcaaggaggaccugaaguucccgcgcgggcagggcgugcccaucaacaccaacuccagccccgacgaccagaucggguacuaccggcgcgccacgcggcgcauccggggcggggacggcaagaugaaggaccugagcccccgcugguacuucuacuaccucggcaccgggccggaggccggccugcccuacggggccaacaaggacggcaucaucugggucgcgaccgagggcgcccugaacacccccaaggaccacaucgggacgcggaaccccgccaacaacgccgcgaucgugcuccagcugccgcagggcaccacccugcccaagggguucuacgccgagggcagccgcgggggcauccaggccuccagccgguccagcucccgcagccggaacuccagccgcaacuccacccccggcagcagccgggggacgucccccgcccgcauggccggcaacgggggcgacgcggcccucgcccugcugcuccuggaccggcugaaccagcucgagagcaagauguccgggaagggccagcagcagcagggccagaccgugaccaagaaguccgccgccgaggcguccaagaagccgcgccagaagcgcaccgccacgaaggccuacaacgucacccaggccuucgggcggcgcggccccgagcagacccaggggaacuucggcgaccaggagcugauccggcaggggaccgacuacaagcacuggccccagaucgcccaguucgcgcccagcgccuccgccuucuucggcaugagccgcaucggcauggaggugacgccguccgggaccuggcugaccuacaccggcgccaucaagcucgacgacaaggaccccaacuucaaggaccaggugauccugcugaacaagcacaucgacgccuacaagacguucccgcccaccgagcccaagaaggacaagaagaagaaggcggacgagacccaggcccucccccagcggcagaagaagcagcagaccgucacgcugcugcccgccgccgaccucgacgacuucagcaagcagcugcagcaguccaugagcuccgcggacagcacccaggccuga

SEQ ID NO: 17225 - RNA, 1260 nt, Artificial Sequence
  SARS-CoV-2__MT893011.1__nucleocapsid protein (N) CDS gc
augagcgacaacggcccccagaaccagcgcaacgccccgcggaucaccuucgggggccccuccgacagcaccggguccaaccagaacggcgagcgcagcggggcccgguccaagcagcgccggccccagggccugcccaacaacacggcgagcugguucaccgcccucacccagcacggcaaggaggaccugaaguucccgcgcgggcagggcgugcccaucaacaccaacuccagccccgacgaccagaucggguacuaccggcgcgccacgcggcgcauccggggcggggacggcaagaugaaggaccugagcccccgcugguacuucuacuaccucggcaccgggccggaggccggccugcccuacggggccaacaaggacggcaucaucugggucgcgaccgagggcgcccugaacacccccaaggaccacaucgggacgcggaaccccgccaacaacgccgcgaucgugcuccagcugccgcagggcaccacccugcccaagggguucuacgccgagggcagccgcgggggcucccaggccagcucccggagcuccagccgcucccggaacaccagccgcaacuccacgcccggcagcagccgggggaccucccccgcccgcauggccggcaacgggggcgacgcggcccucgcccugcugcuccuggaccggcugaaccagcucgagagcaagauguccgggaagggccagcagcagcagggccagaccgugaccaagaaguccgccgccgaggcguccaagaagccgcgccagaagcgcacggccaccaaggccuacaacgucacccaggccuucgggcggcgcggccccgagcagacccaggggaacuucggcgaccaggagcugauccggcaggggacggacuacaagcacuggccccagaucgcccaguucgcgcccagcgccuccgccuucuucggcaugagccgcaucggcauggaggugaccccguccgggaccuggcugaccuacacgggcgccaucaagcucgacgacaaggaccccaacuucaaggaccaggugauccugcugaacaagcacaucgacgccuacaagaccuucccgcccaccgagcccaagaaggacaagaagaagaaggcggacgagacccaggcccucccccagcggcagaagaagcagcagacggucacccugcugcccgccgccgaccucgacgacuucagcaagcagcugcagcaguccaugagcuccgcggacagcacccaggccuga

SEQ ID NO: 17226 - RNA, 1260 nt, Artificial Sequence
  SARS-CoV-2__MT893013.1__nucleocapsid protein (N) CDS gc
augagcgacaacggcccccagaaccagcgcaacgccccgcggaucaccuucgggggccccuccgacagcaccggguccaaccagaacggcgagcgcagcggggcccgguccaagcagcgccggccccagggccugcccaacaacacggcgagcugguucaccgcccucacccagcacggcaaggaggaccugaaguucccgcgcgggcagggcgugcccaucaacaccaacuccagccccgacgaccagaucggguacuaccggcgcacgacccggcgcauccggggcggggacggcaagaugaaggaccugagcccccgcugguacuucuacuaccucggcaccgggccggaggccggccugcccuacggggccaacaaggacggcaucaucugggucgccaccgagggcgcgcugaacacgcccaaggaccacaucgggacccggaaccccgccaacaacgccgccaucgugcuccagcugccgcagggcaccacccugcccaagggguucuacgcggagggcucccgcgggggcucccaggccagcucccggagcuccagccgcucccggaacagcucccgcaacagcacgcccggcagcucccgggggaccagccccgcccgcauggccggcaacgggggcgacgccgcgcucgcccugcugcuccuggaccggcugaaccagcucgaguccaagaugagcgggaagggccagcagcagcagggccagaccgugaccaagaaguccgccgccgaggccagcaagaagccgcgccagaagcgcacggcgaccaaggccuacaacgucacccaggccuucgggcggcgcggccccgagcagacccaggggaacuucggcgaccaggagcugauccggcaggggacggacuacaagcacuggccccagaucgcccaguucgcccccuccgcgagcgccuucuucggcaugucccgcaucggcauggaggugaccccgagcgggaccuggcugaccuacacgggcgccaucaagcucgacgacaaggaccccaacuucaaggaccaggugauccugcugaacaagcacaucgacgccuacaagaccuucccgcccaccgagcccaagaaggacaagaagaagaaggccgacgagacccaggcgcucccccagcggcagaagaagcagcagacggucacccugcugcccgccgccgaccucgacgacuucuccaagcagcugcagcagagcauguccagcgccgacuccacccaggcguga

SEQ ID NO: 17227 - RNA, 1260 nt, Artificial Sequence
  SARS-CoV-2__MT883501.1__nucleocapsid protein (N) CDS gc
augagcgacaacggcccccagaaccagcgcaacgccccgcggaucaccuucgggggccccuccgacagcaccggguccaaccagaacggcgagcgcagcggggcccgguccaagcagcgccggccccagggccugcccaacaacacggcgagcugguucaccgcccucacccagcacggcaaggaggaccugaaguucccgcgcgggcagggcgugcccaucaacaccaacuccagccccgacgaccagaucggguacuaccggcgcgccacgcggcgcauccggggcggggacggcaagaugaaggaccugagcccccgcugguacuucuacuaccucggcaccgggccggaggccggccugcccuacggggccaacaaggacggcaucaucugggucgcgaccgagggcgcccugaacacccccaaggaccacaucgggacgcggaaccccgccaacaacgccgcgaucgugcuccagcugccgcagggcaccacccugcccaagggguucuacgccgagggcucccgcgggggcucccaggccagcucccggagcuccagccgcucccggaacagcucccgcaacagcacccccggcagcucccgggggacgagccccgcccgcauggccggcuacgggggcgacgcggcccucgcccugcugcuccuggaccggcugaaccagcucgaguccaagaugagcgggaagggccagcagcagcagggccagaccgugaccaagaaguccgccgccgaggcgagcaagaagccgcgccagaagcgcaccgccacgaaggccuacaacgucacccaggccuucgggcggcgcggccccgagcagacccaggggaacuucggcgaccaggagcugauccggcaggggaccgacuacaagcacuggccccagaucgcccaguucgcgcccuccgccagcgccuucuucggcaugucccgcaucggcauggaggugacgccgagcgggaccuggcugaccuacaccggcgccaucaagcucgacgacaaggaccccaacuucaaggaccaggugauccugcugaacaagcacaucgacgccuacaagacguucccgcccaccgagcccaagaaggacaagaagaagaaggcggacgagacccaggcccucccccagcggcagaagaagcagcagaccgucacgcugcugcccgccgccgaccucgacgacuucuccaagcagcugcagcagagcauguccagcgcggacuccacccaggccuga

SEQ ID NO: 17228 - RNA, 1260 nt, Artificial Sequence
  SARS-CoV-2__MT883502.1__nucleocapsid protein (N) CDS gc
augagcgacaacggcccccagaaccagcgcaacgccccgcggaucaccuucgggggccccuccgacagcaccggguccaaccagaacggcgagcgcagcggggcccgguccaagcagcgccggccccagggccugcccaacaacacggcgagcugguucaccgcccucacccagcacggcaaggaggaccugaaguucccgcgcgggcagggcgugcccaucaacaccaacuccagccccgacgaccagaucggguacuaccggcgcgccacgcggcgcauccggggcggggacggcaagaugaaggaccugagcccccgcugguacuucuacuaccucggcaccgggccggaggccggccugcccuacggggccaacaaggacggcaucaucugggucgcgaccgagggcgcccugaacacccccaaggaccacaucgggacgcggaaccccgccaacaacgccgcgaucgugcuccagcugccgcagggcaccacccugcccaagggguucuacgccgagggcucccgcgggggcucccaggccagcucccggagcuccagccgcucccggaacagcucccgcaacagcacccccggcagcuccaagcggacgagccccgcccgcauggccgggaacggcggggacgcggcccucgcccugcugcuccuggaccggcugaaccagcucgaguccaagaugagcggcaaggggcagcagcagcagggccagaccgugaccaagaaguccgccgccgaggcgagcaagaagccgcgccagaagcgcaccgccacgaaggccuacaacgucacccaggccuucggccggcgcgggcccgagcagacccagggcaacuucggggaccaggagcugauccggcagggcaccgacuacaagcacuggccccagaucgcccaguucgcgcccuccgccagcgccuucuucgggaugucccgcaucggcauggaggugacgccgagcggcaccuggcugaccuacaccggggccaucaagcucgacgacaaggaccccaacuucaaggaccaggugauccugcugaacaagcacaucgacgccuacaagacguucccgcccaccgagcccaagaaggacaagaagaagaaggcggacgagacccaggcccucccccagcggcagaagaagcagcagaccgucacgcugcugcccgccgccgaccucgacgacuucuccaagcagcugcagcagagcauguccaucgcggacagcacccaggccuga

SEQ ID NO: 17229 - RNA, 1260 nt, Artificial Sequence
  SARS-CoV-2__MT883503.1__nucleocapsid protein (N) CDS gc
augagcgacaacggcccccagaaccagcgcaacgccccgcggaucaccuucgggggccccuccgacagcaccggguccaaccagaacggcgagcgcagcggggcccgguccaagcagcgccggccccagggccugcccaacaacacggcgagcugguucaccgcccucacccagcacggcaaggaggaccugaaguucccgcgcgggcagggcgugcccaucaacaccaacuccagccccgacgaccagaucggguacuaccggcgcgccacgcggcgcauccggggcggggacggcaagaugaaggaccugagcccccgcugguacuucuacuaccucggcaccgggccggaggccggccugcccuacggggccaacaaggacggcaucaucugggucgugaccgagggcgcgcugaacacccccaaggaccacaucgggacgcggaaccccgccaacaacgccgccaucgugcuccagcugccgcagggcaccacccugcccaagggguucuacgcggagggcucccgcgggggcucccaggccagcucccggagcuccagccgcucccggaacagcucccgcaacagcacccccggcagcuccaagcggacgagccccgcccgcauggccgggaacggcggggacgccgcgcucgcccugcugcuccuggaccggcugaaccagcucgaguccaagaugagcggcaaggggcagcagcagcagggccagaccgucaccaagaaguccgccgccgaggccagcaagaagccgcgccagaagcgcaccgcgacgaaggccuacaacgugacccaggccuucggccggcgcgggcccgagcagacccagggcaacuucggggaccaggagcugauccggcagggcaccgacuacaagcacuggccccagaucgcccaguucgcccccuccgcgagcgccuucuucgggaugucccgcaucggcauggaggugacgccgagcggcaccuggcugaccuacaccggggccaucaagcucgacgacaaggaccccaacuucaaggaccaggucauccugcugaacaagcacaucgacgccuacaagacguucccgcccaccgagcccaagaaggacaagaagaagaaggccgacgagacccaggcgcucccccagcggcagaagaagcagcagaccgugacgcugcugcccgccgccgaccucgacgacuucuccaagcagcugcagcagagcauguccagcgccgacuccacccaggcguga

SEQ ID NO: 17230 - RNA, 1260 nt, Artificial Sequence
  SARS-CoV-2__MT886312.1__nucleocapsid protein (N) CDS gc
augagcgacaacggcccccagaaccagcgcaacgccccgcggaucaccuucgggggccccuccgacagcaccggguccaaccagaacggcgagcgcagcggggcccgguccaagcagcgccggccccagggccugcccaacaacacggcgagcugguucaccgcccucacccagcacggcaaggaggaccugaaguucccgcgcgggcagggcgugcccaucaacaccaacuccagccccgacgaccagaucggguacuaccggcgcgccacgcggcgcauccggggcggggacggcaagaugaaggaccugagcccccgcugguacuucuacuaccucggcaccgggccggaggccggccugcccuacggggccaacaaggacggcaucaucugggucgcgaccgagggcgcccugaacacccccaaggaccacaucgggacgcggaaccccgccaacaacgccgcgaucgugcuccagcugccgcagggcaccacccugcccaagggguucuacgccgagggcucccgcgggggcucccaggccagcucccggagcuccagccgcucccggaacagcucccgcaacagcacccccggcagcucccgggggacgagccccgcccgcauggccggcaacgggggcgacgcggcccucgcccugcugcuccuggaccggcugaaccagcucgaguccaagaugagcgggaagggccagcagcagcagggccagaccgugaccaagaaguccgccgccgaggcgagcaagaagccgcgccagaagcgcaccgccacgaaggccuacaacgucacccaggccuucgggcggcgcggccccgagcagacccaggggaacuucggcgaccaggagcugauccggcaggggaccgacuacaagcacuggccccagaucgcccaguucgcgcccuccgccagcgccuucuucggcaugucccgcaucggcauggaggugacgccgcuggggaccuggcucaccuacaccggcgccaucaagcuggacgacaaggaccccaacuucaaggaccaggugauccugcucaacaagcacaucgacgccuacaagacguucccgcccaccgagcccaagaaggacaagaagaagaaggcggacgagacccaggcccugccccagcggcagaagaagcagcagaccgucacgcugcuccccgccgccgaccuggacgacuucagcaagcagcugcagcaguccaugagcuccgcggacagcacccaggccuga

SEQ ID NO: 17231 - RNA, 1260 nt, Artificial Sequence
  SARS-CoV-2__MT886346.1__nucleocapsid protein (N) CDS gc
augagcgacaacggcccccagaaccagcgcaacgccccgcggaucaccuucgggggccccuccgacagcaccggguccaaccagaacggcgagcgcagcggggcccgguccaagcagcgccggccccagggccugcccaacaacacggcgagcugguucaccgcccucacccagcacggcaaggaggaccugaaguucccgcgcgggcagggcgugcccaucaacaccaacuccagccccgacgaccagaucggguacuaccggcgcgccacgcggcgcauccggggcggggacggcaagaugaaggaccugagcccccgcugguacuucuacuaccucggcaccgggccggaggccggccugcccuacggggccaacaaggacggcaucaucugggucgcgaccgagggcgccuucaacacccccaaggaccacaucgggacgcggaaccccgccaacaacgccgcgaucgugcugcagcucccgcagggcaccacccugcccaagggguucuacgccgagggcucccgcgggggcucccaggccagcucccggagcuccagccgcucccggaacagcucccgcaacagcacccccggcagcuccaagcggacgagccccgcccgcauggccgggaacggcggggacgcggcccuggcccuccugcugcucgaccggcugaaccagcuggaguccaagaugagcggcaaggggcagcagcagcagggccagaccgugaccaagaaguccgccgccgaggcgagcaagaagccgcgccagaagcgcaccgccacgaaggccuacaacgucacccaggccuucggccggcgcgggcccgagcagacccagggcaacuucggggaccaggagcucauccggcagggcaccgacuacaagcacuggccccagaucgcccaguucgcgcccuccgccagcgccuucuucgggaugucccgcaucggcauggaggugacgccgagcggcaccuggcugaccuacaccggggccaucaagcuggacgacaaggaccccaacuucaaggaccaggugauccuccugaacaagcacaucgacgccuacaagacguucccgcccaccgagcccaagaaggacaagaagaagaaggcggacgagacccaggcccugccccagcggcagaagaagcagcagaccgucacgcuccugcccgccgccgaccuggacgacuucuccaagcagcuccagcagagcauguccagcgcggacuccacccaggccuga

SEQ ID NO: 17232 - RNA, 1260 nt, Artificial Sequence
  SARS-CoV-2__MT886413.1__nucleocapsid protein (N) CDS gc
augagcgacaacggcccccagaaccagcgcaacgccccgcggaucaccuucgggggccccuccgacagcaccggguccaaccagaacggcgagcgcagcggggcccgguccaagcagcgccggccccagggccugcccaacaacacggcgagcugguucaccgcccucacccagcacggcaaggaggaccugaaguucacccgcgggcagggcgugccgaucaacacgaacuccagccccgacgaccagaucggguacuaccggcgcgccacccggcgcauccggggcggggacggcaagaugaaggaccugagcccccgcugguacuucuacuaccucggcaccgggcccgaggccggccugccguacggggccaacaaggacggcaucaucugggucgcgaccgagggcgcccugaacacgcccaaggaccacaucgggacccggaaccccgccaacaacgccgcgaucgugcuccagcugccccagggcaccacccugccgaagggguucuacgccgagggcucccgcgggggcucccaggccagcucccggagcuccagccgcucccggaacagcucccgcaacagcacgcccggcagcucccgggggaccagccccgcccgcauggccggcaacgggggcgacgcggcccucgcccugcugcuccuggaccggcugaaccagcucgaguccaagaugagcgggaagggccagcagcagcagggccagaccgugaccaagaaguccgccgccgaggcgagcaagaagccccgccagaagcgcacggccaccaaggccuacaacgucacccaggccuucgggcggcgcggcccggagcagacccaggggaacuucggcgaccaggagcugauccggcaggggacggacuacaagcacuggccccagaucgcccaguucgcgcccuccgccagcgccuucuucggcaugucccgcaucggcauggaggugacccccagcgggaccuggcugaccuacacgggcgccaucaagcucgacgacaaggacccgaacuucaaggaccaggugauccugcugaacaagcacaucgacgccuacaagaccuucccgcccaccgagcccaagaaggacaagaagaagaaggcggacgagacccaggcccucccccagcggcagaagaagcagcagacggucacccugcugcccgccgccgaccucgacgacuucuccaagcagcugcagcagagcauguccagcgcggacuccacccaggccuga

SEQ ID NO: 17233 - RNA, 1260 nt, Artificial Sequence
  SARS-CoV-2__MT880886.1__nucleocapsid protein (N) CDS gc
augagcgacaacggcccccagaaccagcgcaacgccccgcggaucaccuucgggggccccuccgacagcaccggguccaaccagaacggcgagcgcagcggggcccgguccaagcagcgccggccccagggccugcccaacaacacggcgagcugguucaccgcccucacccagcacggcaaggaggaccugaaguucccgcgcgggcagggcgugcccaucaacaccaacuccagccccgacgaccagaucggguacuaccggcgcgccacgcggcgcauccggggcggggacggcaagaugaaggaccugagcccccgcugguacuucuacuaccucggcaccgggccggaggccggccugcccuacggggccaacaaggacggcaucaucugggucgcgaccgagggcgcccugaacacccccaaggaccacaucgggacgcggaaccccgccaacaacgccgcgaucgugcuccagcugccgcagggcaccacccugcccaagggguucuacgccgagggcagccgcgggggcucccagagcuccagccgguccagcucccgcagccggaacuccagccgcaacagcacccccggcuccagcaagcggacgucccccgcccgcauggccgggaacggcggggacgccgcgcucgcccugcugcuccuggaccggcugaaccagcucgagagcaagauguccggcaaggggcagcagcagcagggccagaccgugaccaagaaguccgccgccgaggccuccaagaagccgcgccagaagcgcaccgcgacgaaggccuacaacgucacccaggccuucggccggcgcgggcccgagcagacccagggcaacuucggggaccaggagcugauccggcagggcaccgacuacaagcacuggccccagaucgcccaguucgcccccagcgcguccgccuucuucgggaugagccgcaucggcauggaggugacgccguccggcaccuggcugaccuacaccggggccaucaagcucgacgacaaggaccccaacuucaaggaccaggugauccugcugaacaagcacaucgacgccuacaagacguucccgcccaccgagcccaagaaggacaagaagaagaaggccgacgagacccaggcgcucccccagcggcagaagaagcagcagaccgucacgcugcugcccgccgccgaccucgacgacuucagcaagcagcugcagcaguccaugagcuccgccgacagcacccaggcguga

SEQ ID NO: 17234 - RNA, 1260 nt, Artificial Sequence
  SARS-CoV-2__MT882317.1__nucleocapsid protein (N) CDS gc
augagcgacaacggcccccagaaccagcgcaacgccccgcggaucaccuucgggggccccuccgacagcaccggguccaaccagaaccgcgagcggagcggcgcccgcuccaagcagcggcgcccccaggggcugcccaacaacacggcgagcugguucaccgcccucacccagcacggcaaggaggaccugaaguucccgcggggccagggggugcccaucaacaccaacuccagccccgacgaccagaucggcuacuaccgccgggccacgcgccggauccgcgggggcgacgggaagaugaaggaccugagcccccggugguacuucuacuaccucggcaccggcccggaggccgggcugcccuacggcgccaacaaggacgggaucaucugggucgcgaccgagggcgcccugaacacccccaaggaccacaucggcacgcgcaaccccgccaacaacgccgcgaucgugcuccagcugccgcaggggaccacccugcccaagggcuucuacgccgaggggucccggggcgggucccaggccagcucccgcagcuccagccggucccgcaacagcucccggaacagcacccccggcagcuccaagcgcacgagccccgcccggauggccggcaacgggggcgacgcggcccucgcccugcugcuccuggaccgccugaaccagcucgaguccaagaugagcgggaagggccagcagcagcaggggcagaccgugaccaagaaguccgccgccgaggcgagcaagaagccgcgccagaagcggaccgccacgaaggccuacaacgucacccaggccuucggccgccggggccccgagcagacccaggggaacuucggcgaccaggagcugauccgccaggggaccgacuacaagcacuggccccagaucgcccaguucgcgcccuccgccagcgccuucuucggcaugucccggaucgggauggaggugacgccgagcggcaccuggcugaccuacaccggcgccaucaagcucgacgacaaggaccccaacuucaaggaccaggugauccugcugaacaagcacaucgacgccuacaagacguucccgcccaccgagcccaagaaggacaagaagaagaaggcggacgagacccaggcccucccccagcgccagaagaagcagcagaccgucacgcugcugcccgccgccgaccucgacgacuucuccaagcagcugcagcagagcauguccagcgcggacuccacccaggccuga

SEQ ID NO: 17235 - RNA, 1260 nt, Artificial Sequence
  SARS-CoV-2__MT873051.1__nucleocapsid protein (N) CDS gc
augagcgacaacggcccccagaaccagcgcaacgccccgcggaucaccuucgggggccccuccgacagcaccggguccaaccagaacggcgagcgcagcggggcccgguccaagcagcgccggccccagggccugcccaacaacacggcgagcugguucaccgcccucacccagcacggcaaggaggaccugaaguucccgcgcgggcagggcgugcccaucaacaccaacuccagccccgacgaccagaucggguacuaccggcgcgccacgcggcgcauccggggcggggacggcaagaugaaggaccugagcccccgcugguacuucuacuaccucggcaccgggccggaggccggccugcccuacggggccaacaaggacggcaucaucugggucgcgaccgagggcgcccugaacacccccaaggaccacaucgggacgcggaaccccgccaacaacgccgcgaucgugcuccagcugccgcagggcaccacccugcccaagggguucuacgccgagggcucccgcgggggcucccaggccagcucccggagcuccagccgcucccggaacagcucccgcaacagcacccccggcagcucccgggggacgagccccgccaucauggccggcaacgggggcgacgcggcccucgcccugcugcuccuggaccgccugaaccagcucgaguccaagaugagcgggaagggccagcagcagcagggccagaccgugaccaagaaguccgccgccgaggcgagcaagaagccgcggcagaagcgcaccgccacgaaggccuacaacgucacccaggccuucgggcgccggggccccgagcagacccaggggaacuucggcgaccaggagcugauccgccaggggaccgacuacaagcacuggccccagaucgcccaguucgcgcccuccgccagcgccuucuucggcaugucccggaucggcauggaggugacgccgagcgggaccuggcugaccuacaccggcgccaucaagcucgacgacaaggaccccaacuucaaggaccaggugauccugcugaacaagcacaucgacgccuacaagacguucccgcccaccgagcccaagaaggacaagaagaagaaggcggacgagacccaggcccucccccagcgccagaagaagcagcagaccgucacgcugcugcccgccgccgaccucgacgacuucuccaagcagcugcagcagagcauguccagcgcggacuccacccaggccuga

SEQ ID NO: 17236 - RNA, 1260 nt, Artificial Sequence
  SARS-CoV-2__MT873056.1__nucleocapsid protein (N) CDS gc
augagcgacaacggcccccagaaccagcgcaacgccccgcggaucaccuucgggggccccuccgacagcaccggguccaaccagaacggcgagcgcagcggggcccgguccaagcagcgccggccccagggccugcccaacaacacggcgagcugguucaccgcccucacccagcacggcaaggaggaccugaaguucccgcgcgggcagggcgugcccaucaacaccaacuccagccccgacgaccagaucggguacuaccggcgcgccacgcggcgcauccggggcggggacggcaagaugaaggaccugagcccccgcugguacuucuacuaccucggcaccgggccggaggccggccugcccuacggggccaacaaggacggcaucaucugggucgcgaccgagggcgcccugaacacccccaaggaccacaucgggacgcggaaccccgccaacaacgccgcgaucgugcuccagcugccgcagggcaccacccugcccaagggguucuacgccgagggcucccgcgggggcucccaggccagcucccggagcuccagccgcucccggaacagcucccgcaacagcacccccggcagcucccgggggacgagccccgcccgcauggccggcaacgggggcgacgcggcccucgcccugcugcuccuggaccggcugaaccagcucgaguccaagaugagcgggaagggccagcagcagcagggccagaccgugaccaagaaguccgccgccgaggcgagcaagaagccgcgccagaagcgcaccgccacgaaggccuacaacgucacccaggccuucgggcggcgcggccccgagcagacccaggggaacuucggcgaccaggagcugauccggcaggggaccgacuacaaguacuggccccagaucgcccaguucgcgcccuccgccagcgccuucuucggcaugucccgcaucggcauggaggugacgccgagcgggaccuggcugaccuacaccggcgccaucaagcucgacgacaaggaccccaacuucaaggaccaggugauccugcugaacaagcacaucgacgccuacaagacguucccgcccaccgagcccaagaaggacaagaagaagaaggcggacgagacccaggcccucccccagcggcagaagaagcagcagaccgucacgcugcugcccgccgccgaccucgacgacuucuccaagcagcugcagcagagcauguccagcgcggacuccacccaggccuga

SEQ ID NO: 17237 - RNA, 1260 nt, Artificial Sequence
  SARS-CoV-2__MT873062.1__nucleocapsid protein (N) CDS gc
augagcgacaacggcccccagaaccagcgcaacgccccgcggaucaccuucgggggccccuccgacagcaccggguccaaccagaacggcgagcgcagcggggcccgguccaagcagcgccggccccagggccugcccaacaacacggcgagcugguucaccgcccucacccagcacggcaaggaggaccugaaguucccgcgcgggcagggcgugcccaucaacaccaacuccagccccgacgaccagaucggguacuaccggcgcgccacgcggcgcauccggggcggggacggcaagaugaaggaccugagcccccgcugguacuucuacuaccucggcaccgggccggaggccggccugcccuacggggccaacaaggacggcaucaucugggucgcgaccgagggcgcccugaacacccccaaggaccacaucgggacgcggaaccccgccaacaacgccgcgaucgugcuccagcugccgcagggcaccacccugcccaagggguucuacgccgagggcucccgcgggggcucccaggccagcucccggagcuccagccgcucccggaacagcucccgcaacagcacccccggcagcucccgggggacgagccccgcccgcauggccggcaacgggggcgacgcggcccucgcccugcugcuccuggaccggcugaaccagcucgaguccaagaugagcgggaagggccagcagcagcagggccagaccgugaccaagaaguccgccgccgaggcgagcaagaagccgcgccagaagcgcaccgccacgaaggccuacaacgucacccaggccuucgggcggcgcggccccgagcagacccaggggaacuucggcgaccaggagcugauccggcaggggaccgacuacaagcacuggccccagaucgcccaguucgcgcccuccgccagcgccuucuucggcaugucccgcaucggcauggaggugacgccgagcgggaccuggcugaccuacaccggcgccaucaagcucgacgacaaggaccccaacuucaaggaccaggugauccugcugaacaagcacaucgacgccuacaagacguucccgcccaccgagcccaagaaggacaagaagaagaaggcggacgagacccaggcccucccccagcggcagaagaagcagcagaccgucacgcugcugcccgccgccgaccucuacgacuucuccaagcagcugcagcagagcauguccagcgcggacuccacccaggccuga

SEQ ID NO: 17238 - RNA, 1260 nt, Artificial Sequence
  SARS-CoV-2__MT873087.1__nucleocapsid protein (N) CDS gc
augagcgacaacggcccccagaaccaccgcaacgccccgcggaucaccuucgggggccccuccgacagcaccggguccaaccagaacggcgagcgcagcggggcccgguccaagcagcgccggccccagggccugcccaacaacacggcgagcugguucaccgcccucacccagcacggcaaggaggaccugaaguucccgcgcgggcagggcgugcccaucaacaccaacuccagccccgacgaccagaucggguacuaccggcgcgccacgcggcgcauccggggcggggacggcaagaugaaggaccugagcccccgcugguacuucuacuaccucggcaccgggccggaggccggccugcccuacggggccaacaaggacggcaucaucugggucgcgaccgagggcgcccugaacacccccaaggaccacaucgggacgcggaaccccgccaacaacgccgcgaucgugcuccagcugccgcagggcaccacccugcccaagggguucuacgccgagggcucccgcgggggcucccaggccagcucccggagcuccagccgcucccggaacagcucccgcaacagcacccccggcagcucccgggggacgagccccgcccgcauggccggcaacgggggcgacgcggcccucgcccugcugcuccuggaccggcugaaccagcucgaguccaagaugagcgggaagggccagcagcagcagggccagaccgugaccaagaaguccgccgccgaggcgagcaagaagccgcgccagaagcgcaccgccacgaaggccuacaacgucacccaggccuucgggcggcgcggccccgagcagacccaggggaacuucggcgaccaggagcugauccggcaggggaccgacuacaagcacuggccccagaucgcccaguucgcgcccuccgccagcgccuucuucggcaugucccgcaucggcauggaggugacgccgagcgggaccuggcugaccuacaccggcgccaucaagcucgacgacaaggaccccaacuucaaggaccaggugauccugcugaacaagcacaucgacgccuacaagacguucccgcccaccgagcccaagaaggacaagaagaagaaggcggacgagacccaggcccucccccagcggcagaagaagcagcagaccgucacgcugcugcccgccgccgaccucgacgacuucuccaagcagcugcagcagagcauguccagcgcggacuccacccaggccuga

SEQ ID NO: 17239 - RNA, 1260 nt, Artificial Sequence
  SARS-CoV-2__MT873108.1__nucleocapsid protein (N) CDS gc
augagcgacaacggcccccagaaccagcgcaacgccccgcggaucaccuucgggggccccuccgacagcaccggguccaaccagaacggcgagcgcagcggggcccgguccaagcagcgccggccccagggccugcccaacaacacggcgagcugguucaccgcccucacccagcacggcaaggaggaccugaaguucccgcgcgggcagggcgugcccaucaacaccaacuccagccccgacgaccagaucggguacuaccggcgcgccacgcggcgcauccggggcggggacggcaagaugaaggaccugagcccccgcugguacuucuacuaccucggcaccgggccggaggccggccugcccuacggggccaacaaggacggcaucaucugggucgcgaccgagggcgcccugaacacccccaaggaccacaucgggacgcggaaccccgccaacaacgccgcgaucgugcuccagcugccgcagggcaccacccugcccaagggguucuacgccgagggcagccgcgggggcucccaggccagcucccggagcuccagccgcucccggaacagcucccgcaacagcacccccggcagcucccgggggacguuccccgcccgcauggccggcaacgggggcgacgcggcccucgcccugcugcuccuggaccggcugaaccagcucgagagcaagauguccgggaagggccagcagcagcagggccagaccgugaccaagaaguccgccgccgaggcguccaagaagccgcgccagaagcgcaccgccacgaaggccuacaacgucacccaggccuucgggcggcgcggccccgagcagacccaggggaacuucggcgaccaggagcugauccggcaggggaccgacuacaagcacuggccccagaucgcccaguucgcgcccagcgccuccgccuucuucggcaugagccgcaucggcauggaggugacgccguccgggaccuggcugaccuacaccggcgccaucaagcucgacgacaaggaccccaacuucaaggaccaggugauccugcugaacaagcacaucgacgccuacaagacguucccgcccaccgagcccaagaaggacaagaagaagaaggcggacgagacccaggcccucccccagcggcagaagaagcagcagaccgucacgcugcugcccgccgccgaccucgacgacuucagcaagcagcugcagcaguccaugagcuccgcggacagcacccaggccuga

SEQ ID NO: 17240 - RNA, 1260 nt, Artificial Sequence
  SARS-CoV-2__MT873173.1__nucleocapsid protein (N) CDS gc
augagcgacaacggcccccagaaccagcgcaacgccccgcggaucaccuucgggggccccuccgacagcaccggguccaaccagaacggcgagcgcagcggggcccgguccaagcagcgccggccccagggccugcccaacaacacggcgagcugguucaccgcccucacccagcacggcaaggaggaccugaaguucccgcgcgggcagggcgugcccaucaacaccaacuccagccccgacgaccagaucggguacuaccggcgcgccacgcggcgcauccggggcggggacggcaagaugaaggaccugagcccccgcugguacuucuacuaccucggcaccgggccggaggccggccugcccuacggggccaacaaggacggcaucaucugggucgcgaccgagggcgcccugaacacccccaaggaccacaucgggacgcggaaccccgccaacaacgccgcgaucgugcuccagcugccgcagggcaccacccugcccaagggguucuacgccgagggcucccgcgggggcucccaggccagcucccggagcuccagccgcucccggaacagcucccgcaacagcacccccggcagcuccaaggggacgagccccggccggauggccgggaacggcggggacgccgcgcucgcccugcugcuccuggaccgccugaaccagcucgaguccaagaugagcggcaagggccagcagcagcaggggcagaccgugaccaagaaguccgccgccgaggccagcaagaagccgcggcagaagcgcaccgcgacgaaggccuacaacgucacccaggccuucggccgccgggggcccgagcagacccagggcaacuucggggaccaggagcugauccgccagggcaccgacuacaagcacuggccccagaucgcccaguucgcccccuccgcgagcgccuucuucggcaugucccggaucgggauggaggugacgccgagcggcaccuggcugaccuacaccggggccaucaagcucgacgacaaggaccccaacuucaaggaccaggugauccugcugaacaagcacaucgacgccuacaagacguucccgcccaccgagcccaagaaggacaagaagaagaaggccgacgagacccaggcgcucccccagcgccagaagaagcagcagaccgucacgcugcugcccgccgccgaccucgacgacuucuccaagcagcugcagcagagcauguccagcgccgacuccacccaggcguga

SEQ ID NO: 17241 - RNA, 1260 nt, Artificial Sequence
  SARS-CoV-2__MT873184.1__nucleocapsid protein (N) CDS gc
augagcgacaacggcccccagaaccagcgcaacgccccgcggaucaccuucgggggccccuccgacagcaccggguccaaccagaacggcgagcgcagcggggcccgguccaagcagcgccggccccagggccugcccaacaacacggcgagcugguucaccgcccucacccagcacggcaaggaggaccugaaguucccgcgcgggcagggcgugcccaucaacaccaacuccagccccgacgaccagaucggguacuaccggcgcgccacgcggcgcauccggggcggggacggcaagaugaaggaccugagcccccgcugguacuucuacuaccucggcaccgggccggaggccggccugcccuacggggccaacaaggacggcaucaucugggucgcgaccgagggcgcccugaacacccccaaggaccacaucgggacgcggaaccccgccaacaacgccgcgaucgugcuccagcugccgcagggcaccacccugcccaagggguucuacgccgagggcucccgcgggugcucccaggccagcucccggagcuccagccgcucccggaacagcucccgcaacagcacccccggcagcucccggggcacgagccccgcccgcauggccgggaacggcggggacgcggcccucgcccugcugcuccuggaccggcugaaccagcucgaguccaagaugagcggcaaggggcagcagcagcagggccagaccgugaccaagaaguccgccgccgaggcgagcaagaagccgcgccagaagcgcaccgccacgaaggccuacaacgucacccaggccuucggccggcgcgggcccgagcagacccagggcaacuucggggaccaggagcugauccggcagggcaccgacuacaagcacuggccccagaucgcccaguucgcgcccuccgccagcgccuucuucgggaugucccgcaucggcauggaggugacgccgagcggcaccuggcugaccuacaccggggccaucaagcucgacgacaaggaccccaacuucaaggaccaggugauccugcugaacaagcacaucgacgccuacaagacguucccgcccaccgagcccaagaaggacaagaagaagaaggcggacgagacccaggcccucccccagcggcagaagaagcagcagaccgucacgcugcugcccgccgccgaccucgacgacuucuccaagcagcugcagcagagcauguccagcgcggacuccacccaggccuga

SEQ ID NO: 17242 - RNA, 1260 nt, Artificial Sequence
  SARS-CoV-2__MT873208.1__nucleocapsid protein (N) CDS gc
augagcgacaacggcccccagaaccagcgcaacgccccgcggaucaccuucgggggccccuccgacagcaccggguccaaccagaacggcgagcgcgggggcgcccggagcaagcagcgccggccccagggccugcccaacaacacggcguccugguucaccgcccucacccagcacgggaaggaggaccugaaguucccgcgcggccagggggugcccaucaacaccaacagcucccccgacgaccagaucggcuacuaccggcgcgccacgcggcgcauccgcgggggcgacggcaagaugaaggaccugagcccccggugguacuucuacuaccucgggaccggcccggaggccgggcugcccuacggcgccaacaaggacggcaucaucugggucgcgaccgagggggcccugaacacccccaaggaccacaucggcacgcggaaccccgccaacaacgccgcgaucgugcuccagcugccgcaggggaccacccugcccaagggcuucuacgccgaggggucccgcggcggcagccaggccuccagccgguccagcucccgcagccggaacuccagccgcaacuccacccccgggagcagccggggcacgucccccgcccgcauggccgggaacggcggggacgcggcccucgcccugcugcuccuggaccggcugaaccagcucgagagcaagauguccggcaagggccagcagcagcaggggcagaccgugaccaagaaguccgccgccgaggcgagcaagaagccgcgccagaagcgcaccgccacgaaggccuacaacgucacccaggccuucggccggcgcgggcccgagcagacccagggcaacuucggggaccaggagcugauccggcagggcaccgacuacaagcacuggccccagaucgcccaguucgcgcccagcgccuccgccuucuucggcaugagccgcaucgggauggaggugacgccguccggcaccuggcugaccuacaccggggccaucaagcucgacgacaaggaccccaacuucaaggaccaggugauccugcugaacaagcacaucgacgccuacaagacguucccgcccaccgagcccaagaaggacaagaagaagaaggcggacgagacccaggcccucccccagcggcagaagaagcagcagaccgucacgcugcugcccgccgccgaccucgacgacuucagcaagcagcugcagcaguccaugagcuccgcggacagcacccaggccuga

SEQ ID NO: 17243 - RNA, 1260 nt, Artificial Sequence
  SARS-CoV-2__MT873268.1__nucleocapsid protein (N) CDS gc
augagcgacaacggcccccagaaccagcgcaacgccccgcggaucaccuucgggggccccuccgacagcaccggguccaaccagaacggcgagcgcagcggggcccgguccaagcagcgccggccccagggccugcccaacaacacggcgagcugguucaccgcccucacccagcacggcaaggaggaccugaaguucccgcgcgggcagggcgugcccaucaacaccaacuccagccccgacgaccagaucggguacuaccggcgcgccacgcggcgcauccggggcggggacggcaagaugaaggaccugagcccccgcugguacuucuacuaccucggcaccgggccggaggccggccugcccuacggggccaacaaggacggcaucaucugggucgcgaccgagggcgcccugaacacccccaaggaccacaucgggacgcggaaccccgccaacaacgccgcgaucgugcuccagcugccgcagggcaccacccugcccaagggguucuacgccgagggcucccgcgggggcucccaggccagcucccggagcuccagccgcucccggaacagcucccgcaacagcacccccggcagcucccgggggacgagccccgcccgcauggccggcaacgggggcgacgcggcccucgcccugcugcuccuggaccggcugaaccagcucgaguccaagaugagcgggaagggccagcagcagcagggccagaccgugaccaagaaguccgccgccgaggcgagcaagaagccgcgccagaagcgcaccgccacgaaggccuacaacgucacccaggccuucgggcggcgcggccccgagcagacccaggggaacuucggcgaccaggagcugauccggcaggggaccgacuacaagcacuggccccagaucgcccaguucgcgcccuccgccagcgccuucuucggcaugucccgcaucggcauggaggugacgcugagcgggaccuggcucaccuacaccggcgccaucaagcuggacgacaaggacccgaacuucaaggaccaggugauccugcucaacaagcacaucgacgccuacaagacguucccgcccaccgagcccaagaaggacaagaagaagaaggcggacgagacccaggcccugccccagcggcagaagaagcagcagaccgucacgcugcuccccgccgccgaccuggacgacuucuccaagcagcugcagcagagcauguccagcgcggacuccacccaggccuga

SEQ ID NO: 17244 - RNA, 1260 nt, Artificial Sequence
  SARS-CoV-2__MT873270.1__nucleocapsid protein (N) CDS gc
augagcgacaacggcccccagaaccagcgcaacgccccgcggaucaccuucgggggccccuccgacagcaccggguccaaccagaacggcgagcgcaucggggcccggagcaagcagcgccggccccagggccugcccaacaacacggcguccugguucaccgcccucacccagcacggcaaggaggaccugaaguucccgcgcgggcagggcgugcccaucaacaccaacagcucccccgacgaccagaucggguacuaccggcgcgccacgcggcgcauccggggcggggacggcaagaugaaggaccugagcccccgcugguacuucuacuaccucggcaccgggccggaggccggccugcccuacggggccaacaaggacggcaucaucugggucgcgaccgagggcgcccugaacacccccaaggaccacaucgggacgcggaaccccgccaacaacgccgcgaucgugcuccagcugccgcagggcaccacccugcccaagggguucuacgccgagggcucccgcgggggcagccaggccuccagccgguccagcucccgcagccggaacuccagccgcaacuccacccccggcagcagccgggggacgucccccgcccgcauggccggcaacgggggcgacgcggcccucgcccugcugcuccuggaccggcugaaccagcucgagagcaagauguccgggaagggccagcagcagcagggccagaccgugaccaagaaguccgccgccgaggcgagcaagaagccgcgccagaagcgcaccgccacgaaggccuacaacgucacccaggccuucgggcggcgcggccccgagcagacccaggggaacuucggcgaccaggagcugauccggcaggggaccgacuacaagcacuggccccagaucgcccaguucgcgcccagcgccuccgccuucuucggcaugagccgcaucggcauggaggugacgccguccgggaccuggcugaccuacaccggcgccaucaagcucgacgacaaggaccccaacuucaaggaccaggugauccugcugaacaagcacaucgacgccuacaagacguucccgcccaccgagcccaagaaggacaagaagaagaaggcggacgagacccaggcccucccccagcggcagaagaagcagcagaccgucacgcugcugcccgccgccgaccucgacgacuucagcaagcagcugcagcaguccaugagcuccgcggacagcacccaggccuga

SEQ ID NO: 17245 - RNA, 1260 nt, Artificial Sequence
  SARS-CoV-2__MT873290.1__nucleocapsid protein (N) CDS gc
augagcgacaacggcccccagaaccagcgcaacgccccgcggaucaccuucgggggccccuccgacagcaccggguccaaccagaacggcgagcgcagcggggcccgguccaagcagcgccggccccagggccugcccaacaacacggcgagcugguucaccgcccucacccagcacggcaaggaggaccugaaguucccgcgcgggcagggcgugcccaucaacaccaacuccagccccgacgaccagaucggguacuaccggcgcgccacgcggcgcauccggggcggggacggcaagaugaaggaccugagcccccgcugguacuucuacuaccucggcaccgggccggaggccggccugcccuacggggccaacaaggacggcaucaucugggucgcgaccgagggcgcccugaacacccccaaggaccacaucgggacgcggaaccccgccaacaacgccgcgaucgugcuccagcugagccagggcaccacccugccgaagggguucuacgccgagggcucccgcgggggcagccaggccuccagccgguccagcucccgcagccggaacuccagccgcaacagcacccccggcuccagccgggggacgucccccgcccgcauggccggcaacgggggcgacgcggcccucgcccugcugcuccuggaccggcugaaccagcucgagagcaagauguccgggaagggccagcagcagcagggccagaccgugaccaagaaguccgccgccgaggcguccaagaagccccgccagaagcgcaccgccacgaaggccuacaacgucacccaggccuucgggcggcgcggcccggagcagacccaggggaacuucggcgaccaggagcugauccggcaggggaccgacuacaagcacuggccccagaucgcccaguucgcgcccagcgccuccgccuucuucggcaugagccgcaucggcauggaggugacgcccuccgggaccuggcugaccuacaccggcgccaucaagcucgacgacaaggacccgaacuucaaggaccaggugauccugcugaacaagcacaucgacgccuacaagacguucccgcccaccgagcccaagaaggacaagaagaagaaggcggacgagacccaggcccucccccagcggcagaagaagcagcagaccgucacgcugcugcccgccgccgaccucgacgacuucagcaagcagcugcagcaguccaugagcuccgcggacagcacccaggccuga

SEQ ID NO: 17246 - RNA, 1260 nt, Artificial Sequence
  SARS-CoV-2__MT873300.1__nucleocapsid protein (N) CDS gc
augagcgacaacggcccccagaaccagcgcaacgccccgcggaucaccuucgggggccccuccgacagcaccggguccaaccagaacggcgagcgcagcgggucccggagcaagcagcgccggccccagggccugcccaacaacacggccuccugguucaccgcgcucacccagcacggcaaggaggaccugaaguucccgcgcgggcagggcgugcccaucaacaccaacagcucccccgacgaccagaucggguacuaccggcgcgccacgcggcgcauccggggcggggacggcaagaugaaggaccugagcccccgcugguacuucuacuaccucggcaccgggccggaggccggccugcccuacggggccaacaaggacggcaucaucugggucgccaccgagggcgcgcugaacacccccaaggaccacaucgggacgcggaaccccgccaacaacgccgccaucgugcuccagcugccgcagggcaccacccugcccaagggguucuacgcggagggcucccgcgggggcagccaggccuccagccgguccagcucccgcagccggaacuccagccgcaacagcacccccggcuccagccgggggacgucccccgcccgcauggccggcaacgggggcgacgccgcgcucgcccugcugcuccuggaccggcugaaccagcucgagagcaagauguccgggaagggccagcagcagcagggccagaccgugaccaagaaguccgccgccgaggccagcaagaagccgcgccagaagcgcaccgcgacgaaggccuacaacgucacccaggccuucgggcggcgcggccccgagcagacccaggggaacuucggcgaccaggagcugauccggcaggggaccgacuacaagcacuggccccagaucgcccaguucgcccccagcgcguccgccuucuucggcaugagccgcaucggcauggaggugacgccguccgggaccuggcugaccuacaccggcgccaucaagcucgacgacaaggaccccaacuucaaggaccaggugauccugcugaacaagcacaucgacgccuacaagacguucccgcccaccgagcccaagaaggacaagaagaagaaggccgacgagacccaggcgcucccccagcggcagaagaagcagcagaccgucacgcugcugcccgccgccgaccucgacgacuucagcaagcagcugcagcaguccaugagcuccgccgacagcacccaggcguga

SEQ ID NO: 17247 - RNA, 1260 nt, Artificial Sequence
  SARS-CoV-2__MT873324.1__nucleocapsid protein (N) CDS gc
augagcgacaacggcccccagaaccagcgcaacgccccgcggaucaccuucgggggccccuccgacagcaccggguccaaccagaacggcgagcgcagcggggcccgguccaagcagcgccggccccagggccugcccaacaacacggcgagcugguucaccgcccucacccagcacggcaaggaggaccugaaguucccgcgcgggcagggcgugcccaucaacaccaacuccagccccgacgaccagaucggguacuaccggcgcgccacgcggcgcauccggggcggggacggcaagaugaaggaccugagcccccgcugguacuucuacuaccucggcaccgggccggaggccggccugcccuacggggccaacaaggacggcaucaucugggucgcgaccgagggcgcccugaacacccccaaggaccacaucgggacgcggaaccccgccaacaacgccgcgaucgugcuccagcugccgcagggcaccacccugcccaagggguucuacgccgagggcucccgcgggggcucccaggccagcucccggagcuccagccgcucccggaacagcucccgcaacagcacccccggcagcucccgggggacgagccccgcccgcauggccggcaacgggggcgacgcggcccucgcccugcugcuccuggaccggcugaaccagcucgaguccaagaugagcgggaagggccagcagcagcagggccagaccgugaccaagaaguccgccgccgaggcgagcaagaagccgcgccagaagcgcaccgccacgaaggccuacaacgucacccaggccuucgggcggcgcggccccgagcagacccaggggaacuucggcgaccaggagcugauccggcaggggaccgacuacaagcacuggccccagaucgcccaguucgcgcccuccgccagcgccuucuucggcaugucccgcaucggcauggaggugacgccgagcgggaccuggcugaccuacaccggcuccaucaagcucgacgacaaggaccccaacuucaaggaccaggugauccugcugaacaagcacaucgacgccuacaagacguucccgcccaccgagcccaagaaggacaagaagaagaaggccgacgagacccaggcgcucccccagcggcagaagaagcagcagaccgucacgcugcugcccgccgccgaccucgacgacuucagcaagcagcugcagcaguccaugagcuccgccgacagcacccaggcguga

SEQ ID NO: 17248 - RNA, 1260 nt, Artificial Sequence
  SARS-CoV-2__MT873376.1__nucleocapsid protein (N) CDS gc
augagcgacaacggcccccagaaccagcgcaacgccccgcggaucaccuucgggggccccuccgacagcaccggguccaaccagaacggcgagcgcagcggggcccgguccaagcagcgccggccccagggccugcccaacaacacggcgagcugguucaccgcccucacccagcacggcaaggaggaccugaaguucccgcgcgggcagggcgugcccaucaacaccaacuccagccccgacgaccagaucggguacuaccggcgcgccacgcggcgcauccggggcggggacggcaagaugaaggaccugagcccccgcugguacuucuacuaccucggcaccgggccggaggccggccugcccuacggggccaacaaggacggcaucaucugggucgcgaccgagggcgcccugaacacccccaaggaccacaucgggacgcggaaccccgccaacaacgccgcgaucgugcuccagcugccgcagggcaccacccugcccaagggguucuacgccgagggcucccgcgggggcucccaggccagcucccggagcuccagccgcucccggaacagcucccgcaacagcacccccggcagcucccgggggacgagccccgcccgcauggccggcaacgggggcgacgcggcccucgcccugcugcuccuggaccggcugaaccagcucgaguccaagaugagcgggaagggccagcagcagcagggccagaccgugaccaagaaguccgccgccgaggcgagcaagaagccgcgccagaagcgcaccgccacgaaggccuacaacgucacccaggccuucgggcggcgcggccccgagcagacccaggggaacuucggcgaccaggagcugauccggcaggggaccgacuacaagcacuggccccagaucgcccaguucgcgcccuccgccagcgccuucuucggcaugucccgcaucggcauggaggugacgccgagcgggaccuggcugaccuacaccggcgccaucaagcucgacgacaaggaccccaacuucaaggaccaggugauccugcugaacaagcacaucgacgccuacaagacguucccgcccaccgagcccaagaaggacaagaagaagaaggcguacgagacccaggcccucccccagcggcagaagaagcagcagaccgucacgcugcugcccgccgccgaccucgacgacuucuccaagcagcugcagcagagcauguccagcgcggacuccacccaggccuga

SEQ ID NO: 17249 - RNA, 1260 nt, Artificial Sequence
  SARS-CoV-2__MT873378.1__nucleocapsid protein (N) CDS gc
augagcgacaacggcccccagaaccagcgcaacgccccgcggaucaccuucgggggccccuccgacagcaccggguccaaccagaacggcgagcgcagcggggcccgguccaagcagcgccggccccagggccugcccaacaacacggcgagcugguucaccgcccucacccagcacggcaaggaguaccugaaguucccgcgcgggcagggcgugcccaucaacaccaacuccagccccgacgaccagaucggguacuaccggcgcgccacgcggcgcauccggggcggggacggcaagaugaaggaccugagcccccgcugguacuucuacuaccucggcaccgggccggaggccggccugcccuacggggccaacaaggacggcaucaucugggucgcgaccgagggcgcccugaacacccccaaggaccacaucgggacgcggaaccccgccaacaacgccgcgaucgugcuccagcugccgcagggcaccacccugcccaagggguucuacgccgagggcucccgcgggggcucccaggccagcucccggagcuccagccgcucccggaacagcucccgcaacagcacccccggcagcucccgggggacgagccccgcccgcauggccggcaacgggggcgacgcggcccucgcccugcugcuccuggaccggcugaaccagcucgaguccaagaugagcgggaagggccagcagcagcagggccagaccgugaccaagaaguccgccgccgaggcgagcaagaagccgcgccagaagcgcaccgccacgaaggccuacaacgucacccaggccuucgggcggcgcggccccgagcagacccaggggaacuucggcgaccaggagcugauccggcaggggaccgacuacaagcacuggccccagaucgcccaguucgcgcccuccgccagcgccuucuucggcaugucccgcaucggcauggaggugacgccgagcgggaccuggcugaccuacaccggcgccaucaagcucgacgacaaggaccccaacuucaaggaccaggugauccugcugaacaagcacaucgacgccuacaagacguucccgcccaccgagcccaagaaggacaagaagaagaaggcggacgagacccaggcccucccccagcggcagaagaagcagcagaccgucacgcugcugcccgccgccgaccucgacgacuucuccaagcagcugcagcagagcauguccagcgcggacuccacccaggccuga

SEQ ID NO: 17250 - RNA, 1260 nt, Artificial Sequence
  SARS-CoV-2__MT873381.1__nucleocapsid protein (N) CDS gc
augagcgacaacggcccccagaaccagcgcaacgccccgcggaucaccuucgggggccccuccgacagcaccggguccaaccagaacggcgagcgcagcggggcccgguccaagcagcgccggccccagggccugcccaacaacacggcgagcugguucaccgcccucacccagcacggcaaggaggaccugaaguucccgcgcgggcagggcgugcccaucaacaccaacuccagccccgacgaccagaucggguacuaccggcgcgccacgcggcgcauccggggcggggacggcaagaugaaggaccugagcccccgcugguacuucuacuaccucggcaccgggccggaggccggccugcccuacggggccaacaaggacggcaucaucugggucgcgaccgagggcgcccugaacacccccaaggaccacaucgggacgcggaaccccgccaacaacgccgcgaucgugcuccagcugccgcagggcaccacccugcccaagggguucuacgccgagggcucccgcgggggcucccaggccagcucccggagcuccagccgcucccggaacagcucccgcaacagcacccccggcagcucccgggggacgagccccgcccgcauggccggcaacgggggcgacgcggcccucgcccugcugcuccuggaccggcugaaccagcucgaguccaagaugagcgggaagggccagcagcagcagggccagaccgugaccaagaaguccgccgccgaggcgagcaagaagccgcgccagaagcgcaccgccacgaaggccuacaacgucacccaggccuucgggcggcgcggccccgagcagacccaggggaacuucggcgaccaggagcugauccggcaggggaccgacuacaagcacuggccccagaucgcccaguucgcgcccuccgccagcgccuucuucggcaugucccgcaucggcauggaggugacgccgagcgggaccuggcugaccuacaccggcgccaucaagcucgacgacaaggaccccaacuucaaggaccaggugauccugcugaacaagcacaucgacgccuacaagacguucccgcccaccgagcccaagaaggacaagaagaagaaggcggacgagacccaggcccucccccagcggcagaagaagcagcagaccgucauccugcugcccgccgccgaccucgacgacuucuccaagcagcugcagcagagcauguccagcgcggacuccacgcaggccuga

SEQ ID NO: 17251 - RNA, 1260 nt, Artificial Sequence
  SARS-CoV-2__MT873396.1__nucleocapsid protein (N) CDS gc
augagcgacaacggcccccagaaccagcgcaacgccccgcggaucaccuucgggggccccuccgacagcaccggguccaaccagaacggcgagcgcagcggggcccgguccaagcagcgccggccccagggccugcccaacaacacggcgagcugguucaccgcccucacccagcacggcaaggaggaccugaaguucccgcgcgggcagggcgugcccaucaacaccaacuccagccccgacgaccagaucggguacuaccggcgcgccacgcggcgcauccggggcggggacggcaagaugaaggaccugagcccccgcugguacuucuacuaccucggcaccgggccggaggccggccugcccuacggggccaacaaggacggcaucaucugggucgcgaccgagggcgcccugaacacccccaaggaccacaucgggacgcggaaccccgccaacaacgccgcgaucgugcuccagcugccgcagggcaccacccugcccaagggguucuacgccgagggcucccgcgggggcucccaggccagcucccggagcuccagccgcucccggaacagcucccgcaacagcacccccggcagcucccgggggacgagccccgcccgcauggugggcaacgggggcgacgccgcgcucgcccugcugcuccuggaccggcugaaccagcucgaguccaagaugagcgggaagggccagcagcagcagggccagaccgucaccaagaaguccgccgccgaggccagcaagaagccgcgccagaagcgcaccgcgacgaaggccuacaacgugacccaggccuucgggcggcgcggccccgagcagacccaggggaacuucggcgaccaggagcugauccggcaggggaccgacuacaagcacuggccccagaucgcccaguucgcccccuccgcgagcgccuucuucggcaugucccgcaucggcauggaggugacgccgagcgggaccuggcugaccuacaccggcgccaucaagcucgacgacaaggaccccaacuucaaggaccaggucauccugcugaacaagcacaucgacgccuacaagacguucccgcccaccgagcccaagaaggacaagaagaagaaggccgacgagacccaggcgcucccccagcggcagaagaagcagcagaccgugacgcugcugcccgccgccgaccucgacgacuucuccaagcagcugcagcagagcauguccagcgccgacuccacccaggcguga

SEQ ID NO: 17252 - RNA, 1260 nt, Artificial Sequence
  SARS-CoV-2__MT873497.1__nucleocapsid protein (N) CDS gc
augagcgacaacggcccccagaaccagcgcaacgccccgcggaucaccuucgggggccccuccgacagcaccggguccaaccagaacggcgagcgcagcggggcccgguccaagcagcgccggccccagggccugcccaacaacacggcgagcugguucaccgcccucacccagcacggcaaggaggaccugaaguucccgcgcgggcagggcgugcccaucaacaccaacuccagccccgacgaccagaucggguacuaccggcgcgccacgcggcgcauccggggcggggacggcaagaugaaggaccugagcccccgcugguacuucuacuaccucggcaccgggccggaggccggccugcccuacggggccaacaaggacggcaucaucugggucgcgaccgagggcgcccugaacacccccaaggaccacaucgggacgcggaaccccgccaacaacgccgcgaucgugcuccagcugccgcagggcaccacccugcccaagggguucuacgccgagggcagccgcgggggcucccaggccagcucccggagcuccagccgcucccggaacagcucccgcaacagcacccccggcagcucccgggggacgagccccucccgcauggccggcaacgggggcgacgccgcgcucgcccugcugcuccuggaccggcugaaccagcucgagagcaagauguccgggaagggccagcagcagcagggccagaccgugaccaagaaguccgccgccgaggccuccaagaagccgcgccagaagcgcaccgcgacgaaggccuacaacgucacccaggccuucgggcggcgcggccccgagcagacccaggggaacuucggcgaccaggagcugauccggcaggggaccgacuacaagcacuggccccagaucgcccaguucgcccccagcgcguccgccuucuucggcaugagccgcaucggcauggaggugacgccguccgggaccuggcugaccuacaccggcgccaucaagcucgacgacaaggaccccaacuucaaggaccaggugauccugcugaacaagcacaucgacgccuacaagacguucccgcccaccgagcccaagaaggacaagaagaagaaggccgacgagacccaggcgcucccccagcggcagaagaagcagcagaccgucacgcugcugcccgccgccgaccucgacgacuucagcaagcagcugcagcaguccaugagcuccgccgacagcacccaggcguga

SEQ ID NO: 17253 - RNA, 1260 nt, Artificial Sequence
  SARS-CoV-2__MT876556.1__nucleocapsid protein (N) CDS gc
augagcgacaacggcccccagaaccagcgcgacgccccgcggaucaccuucgggggccccuccgacagcaccggguccaaccagaacggcgagcgcagcggggcccgguccaagcagcgccggccccagggccugcccaacaacacggcgagcugguucaccgcccucacccagcacggcaaggaggaccugaaguucccgcgcgggcagggcgugcccaucaacaccaacuccagccccgacgaccagaucggguacuaccggcgcgccacgcggcgcauccggggcggggacggcaagaugaaggaccugagcccccgcugguacuucuacuaccucggcaccgggccggaggccggccugcccuacggggccaacaaggacggcaucaucugggucgcgaccgagggcgcccugaacacccccaaggaccacaucgggacgcggaaccccgccaacaacgccgcgaucgugcuccagcugccgcagggcaccacccugcccaagggguucuacgccgagggcucccgcgggggcucccaggccagcucccggagcuccagccgcucccggaacagcucccgcaacagcacccccggcagcuccaagcggacgagccccgcccgcauggccgggaacggcggggacgcggcccucgcccugcugcuccuggaccggcugaaccagcucgaguccaagaugagcggcaaggggcagcagcagcagggccagaccgugaccaagaaguccgccgccgaggcgagcaagaagccgcgccagaagcgcaccgccacgaaggccuacaacgucacccaggccuucggccggcgcgggcccgagcagacccagggcaacuucggggaccaggagcugauccggcagggcaccgacuacaagcacuggccccagaucgcccaguucgcgcccuccgccagcgccuucuucgggaugucccgcaucggcauggaggugacgccgagcggcaccuggcugaccuacaccggggccaucaagcucgacgacaaggaccccaacuucaaggaccaggugauccugcugaacaagcacaucgacgccuacaagacguucccgcccaccgagcccaagaaggacaagaagaagaaggcggacgagacccaggcccucccccagcggcagaagaagcagcagaccgucacgcugcugcccgccgccgaccucgacgacuucuccaagcagcugcagcagagcauguccagcgcggacuccacccaggccuga

SEQ ID NO: 17254 - RNA, 1260 nt, Artificial Sequence
  SARS-CoV-2__MT877324.1__nucleocapsid protein (N) CDS gc
augagcgacaacggcccccagaaccagcgcaacgccccgcggaucaccuucgggggccccuccgacagcaccggguccaaccagaacggcgagcgcagcggggcccgguccaagcagcgccggccccagggccugcccaacaacacggcgagcugguucaccgcccucacccagcacggcaaggaggaccugaaguucccgcgcgggcagggcgugcccaucaacaccaacuccagccccgacgaccagaucggguacuaccggcgcgccacgcggcgcauccggggcggggacggcaagaugaaggaccugagcccccgcugguacuucuacuaccucggcaccgggccggaggccggccugcccuacggggccaacaaggacggcaucaucugggucgcgaccgagggcgcccugaacacccccaaggaccacaucgggacgcggaaccccgccaacaacgccgcgaucgugcuccagcugccgcagggcaccacccugcccaagggguucuacgccgagggcagccgcgggggcucccaggccagcucccggagcucccuccgcagccggaacuccagccgcaacuccacccccggcagcagccgggggacgucccccgcccgcauggccggcaacgggggcgacgcggcccuggcccugcuccugcuggaccggcucaaccagcuggagagcaagauguccgggaagggccagcagcagcagugccagaccgugaccaagaaguccgccgccgaggcguccaagaagccgcgccagaagcgcaccgccacgaaggccuacaacgucacccaggccuucggccggcgcgggcccgagcagacccagggcaacuucggggaccaggagcugauccggcagggcaccgacuacaagcacuggccccagaucgcccaguucgcgcccagcgccuccgccuucuucgggaugagccgcaucggcauggaggugacgccguccggcaccuggcucaccuacaccggggccaucaagcuggacgacaaggaccccaacuucaaggaccaggugauccugcucaacaagcacaucgacgccuacaagacguucccgcccaccgagcccaagaaggacaagaagaagaaggcggacgagacccaggcccugccccagcggcagaagaagcagcagaccgucacgcugcuccccgccgccgaccuggacgacuucagcaagcagcugcagcaguccaugagcuccgcggacagcacccaggccuga

SEQ ID NO: 17255 - RNA, 1260 nt, Artificial Sequence
  SARS-CoV-2__MT872501.1__nucleocapsid protein (N) CDS gc
augagcgacaacggcccccagaaccagcgcaacgccccgcggaucaccuucgggggccccuccgacagcaccggguccaaccagaacggcgagcgcagcggggcccgguccaagcagcgccggccccagggccugcccaacaacacggcgagcugguucaccgcccucacccagcacggcaaggaggaccugaaguucccgcgcgggcagggcgugcccaucaacaccaacuccagccccgacgaccagaucggguacuaccggcgcgccacgcggcgcauccggggcggggacggcaagaugaaggaccugagcccccgcugguacuucuacuaccucggcaccgggccggaggccggccugcccuacggggccaacaaggacggcaucaucugggucgcgaccgagggcgcccugaacacccccaaggaccacaucgggacgcggaaccccgccaacaacgccgcgaucgugcuccagcugccgcagggcaccacccugcccaagggguucuacgccgagggcagccgcgggggcucccaggccagcucccggagcuccagccgcucccggaacagcucccgcaacagcacccccggcagcaaccgggggaucucccccgcccgcauggccggcaacgggggcgacgcggcccucgcccugcugcuccuggaccggcugaaccagcucgagagcaagauguccgggaagggccagcagcagcagggccagacggugaccaagaaguccgccgccgaggcguccaagaagccgcgccagaagcgcaccgccaccaaggccuacaacgucacgcaggccuucgggcggcgcggccccgagcagacccaggggaacuucggcgaccaggagcugauccggcaggggaccgacuacaagcacuggccccagaucgcccaguucgcgcccagcgccuccgccuucuucggcaugagccgcaucggcauggaggugaccccguccgggacguggcugaccuacaccggcgccaucaagcucgacgacaaggaccccaacuucaaggaccaggugauccugcugaacaagcacaucgacgccuacaagaccuucccgcccacggagcccaagaaggacaagaagaagaaggcggacgagacccaggcccucccccagcggcagaagaagcagcagaccgucacccugcugcccgccgccgaccucgacgacuucagcaagcagcugcagcaguccaugagcuccgcggacagcacgcaggccuga

SEQ ID NO: 17256 - RNA, 1260 nt, Artificial Sequence
  SARS-CoV-2__MT856459.1__nucleocapsid protein (N) CDS gc
augagcgacaacggcccccagaaccagcgcaacgccucccggaucaccuucgggggcccgagcgacuccaccgggagcaaccagaacggcgagcgcuccggggcccggagcaagcagcgccggccccagggccugcccaacaacacggcguccugguucaccgcccucacccagcacggcaaggaggaccugaaguucccccgcgggcagggcgugccgaucaacaccaacagcucccccgacgaccagaucggguacuaccggcgcgccacgcggcgcauccggggcggggacggcaagaugaaggaccugagcccccgcugguacuucuacuaccucggcaccgggcccgaggccggccugccguacggggccaacaaggacggcaucaucugggucgcgaccgagggcgcccugaacacccccaaggaccacaucgggacgcggaaccccgccaacaacgccgcgaucgugcuccagcugccccagggcaccacccugccgaagggguucuacgccgagggcucccgcgggggcagccaggccuccagccgguccagcucccgcagccggaacuccagccgcaacagcacccccggcuccagcaagcggacgucccccgcccgcauggccgggaacggcggggacgcggcccucgcccugcugcuccuggaccggcugaaccagcucgagagcaagauguccggcaaggggcagcagcagcagggccagaccgugaccaagaaguccgccgccgaggcgagcaagaagccccgccagaagcgcaccgccacgaaggccuacaacgucacccaggccuucggccggcgcgggccggagcagacccagggcaacuucggggaccaggagcugauccggcagggcaccgacuacaagcacuggccccagaucgcccaguucgcgcccagcgccuccgccuucuucgggaugagccgcaucggcauggaggugacgcccuccggcaccuggcugaccuacaccggggccaucaagcucgacgacaaggacccgaacuucaaggaccaggugauccugcugaacaagcacaucgacgccuacaagacguucccgcccaccgagcccaagaaggacaagaagaagaaggcggacgagacccaggcccucccccagcggcagaagaagcagcagaccgucacgcugcugcccgccgccgaccucgacgacuucagcaagcagcugcagcaguccaugagcuccgcggacagcacccaggccuga

SEQ ID NO: 17257 - RNA, 1260 nt, Artificial Sequence
  SARS-CoV-2__MT846004.1__nucleocapsid protein (N) CDS gc
augagcgacaacggcccccagaaccagcgcaacgccccgcggaucaccuucgggggccccuccgacagcaccggguccaaccagaacggcgagcgcagcggggcccgguccaagcagcgccggccccagggccugcccaacaacacggcgagcugguucaccgcccucacccagcacggcaaggaggaccugaaguucccgcgcgggcagggcgugcccaucaacaccaacuccagccccgacgaccagaucggguacuaccggcgcgccacgcggcgcauccggggcggggacggcaagaugaaggaccugagcccccgcugguacuucuacuaccucggcaccgggccggaggccggccugcccuacggggccaacaaggacggcaucaucugggucgcgaccgagggcgcccugaacacccccaaggaccacaucgggacgcggaaccccgccaacaacgccgcgaucgugcuccagcugccgcagggcaccacccugcccaagggguucuacgccgagggcucccgcgggggcucccaggccagcucccggagcuccagccgcucccggaacagcucccgcaacagcacccccggcagcuccaagcggacgagccccgcccgcauggccgggaacggcggggacgcggcccucgcccugcugcuccuggaccggcugaaccagcucgaguccaagaugagcggcaaggggcagcagcagcagggccagaccgugaccaagaaguccgccgccgaggcgagcaagaagccgcgccagaagcgcaccgccacgaaggccuacaacgucacccaggccuucggccggcgcgggcccgagcagauccagggcaacuucggggaccaggagcugauccggcagggcaccgacuacaagcacuggccccagaucgcccaguucgcgcccuccgccagcgccuucuucgggaugucccgcaucggcauggaggugaccccgagcggcacguggcugaccuacaccggggccaucaagcucgacgacaaggaccccaacuucaaggaccaggugauccugcugaacaagcacaucgacgccuacaagaccuucccgcccacggagcccaagaaggacaagaagaagaaggcggacgagacccaggcccucccccagcggcagaagaagcagcagaccgucacccugcugcccgccgccgaccucgacgacuucuccaagcagcugcagcagagcauguccagcgcggacuccacgcaggccuga

SEQ ID NO: 17258 - RNA, 1260 nt, Artificial Sequence
  SARS-CoV-2__MT846007.1__nucleocapsid protein (N) CDS gc
augagcgacaacggcccccagaaccagcgcaacgccccgcggaucaccuucgggggccccuccgacagcaccggguccaaccagaacggcgagcgcagcggggcccgguccaagcagcgccggccccagggccugcccaacaacacggcgagcugguucaccgcccucacccagcacggcaaggaggaccugaaguucccgcgcgggcagggcgugcccaucaacaccaacuccagccccgacgaccagaucggguacuaccggcgcgccacgcggcgcauccggggcggggacggcaagaugaaggaccugagcccccgcugguacuucuacuaccucggcaccgggccggaggccggccugcccuacggggccaacaaggacggcaucaucugggucgcgaccgagggcgcccugaacacccccaaggaccacaucgggacgcggaaccccgccaacaacgccgcgaucgugcuccagcugccgcagggcaccacccugcccaagggguucuacgccgagggcucccgcgggggcucccaggccagcucccggagcuccagccgcucccggaacagcucccgcaacagcacccccggcagcuccaagcggacgagccccgcccgcauggccgggaacggcggggacgcggcccucgcccugcugcuccuggaccggcugaaccagcucgaguccaagaugagcggcaaggggcagcagcagcagggccagaccgugaccaagaaguccgccgccgaggcgagcaagaagccgcgccagaagcgcaccgccacgaaggccuacaacgucacccaggccuucggccggcgcgggcccgagcagacccagggcaacuucggggaccaggagcugauccggcagggcaccgacuacaagcacuggccccagaucgcccaguucgcgcccuccgccagcgccuucuucgggaugucccgcaucggcauggaggugacgccgagcggcaccuggcugaccuacaccggggccaucaagcucgacgacaaggaccccaacuucaaggaccaggugauccugcugaacaagcacaucgacgccuacaagacguucccgcccaccgagcccaagaaggacaagaagaagaaggcguacgagacccaggcccucccccagcggcagaagaagcagcagaccgucacgcugcugcccgccgccgaccucgacgacuucuccaagcagcugcagcagagcauguccagcgcggacuccacccaggccuga

SEQ ID NO: 17259 - RNA, 1260 nt, Artificial Sequence
  SARS-CoV-2__MT846010.1__nucleocapsid protein (N) CDS gc
augagcgacaacggcccccagaaccagcgcaacgccccgcggaucaccuucgggggccccuccgacagcaccggguccaaccagaacggcgagcgcagcggggcccgguccaagcagcgccggccccagggccugcccaacaacacggcgagcugguucaccgcccucacccagcacggcaaggaggaccugaaguucccgcgcgggcagggcgugcccaucaacaccaacuccagcccccacgaccagaucggguacuaccggcgcgccacgcggcgcauccggggcggggacggcaagaugaaggaccugagcccccgcugguacuucuacuaccucggcaccgggccggaggccggccugcccuacggggccaacaaggacggcaucaucugggucgcgaccgagggcgcccugaacacccccaaggaccacaucgggacgcggaaccccgccaacaacgccgcgaucgugcuccagcugccgcagggcaccacccugcccaagggguucuacgccgagggcucccgcgggggcucccaggccagcucccggagcuccagccgcucccggaacagcucccgcaacagcacccccggcagcuccaagcggacgagccccgcccgcauggccgggaacggcggggacgcggcccucgcccugcugcuccuggaccggcugaaccagcucgaguccaagaugagcggcaaggggcagcagcagcagggccagaccgugaccaagaaguccgccgccgaggcgagcaagaagccgcgccagaagcgcaccgccacgaaggccuacaacgucacccaggccuucggccggcgcgggcccgagcagacccagggcaacuucggggaccaggagcugauccggcagggcaccgacuacaagcacuggccccagaucgcccaguucgcgcccuccgccagcgccuucuucgggaugucccgcaucggcauggaggugacgccgagcggcaccuggcugaccuacaccggggccaucaagcucgacgacaaggaccccaacuucaaggaccaggugauccugcugaacaagcacaucgacgccuacaagacguucccgcccaccgagcccaagaaggacaagaagaagaaggcggacgagacccaggcccucccccagcggcagaagaagcagcagaccgucacgcugcugcccgccgccgaccucgacgacuucuccaagcagcugcagcagagcauguccagcgcggacuccacccaggccuga

SEQ ID NO: 17260 - RNA, 1260 nt, Artificial Sequence
  SARS-CoV-2__MT846480.1__nucleocapsid protein (N) CDS gc
augagcgacaacggcccccagaaccagcgcaacgccccgcggaucaccuucgggggccccuccgacagcaccggguccaaccagaacggcgagcgcagcggggcccgguccaagcagcgccggccccagggccugcccaacaacacggcgagcugguucaccgcccucacccagcacggcaaggaggaccugaaguucccgcgcgggcagggcgugcccaucaacaccaacuccagccccgacgaccagaucggguacuaccggcgcgccacgcggcgcauccggggcggggacggcaagaugaaggaccugagcccccgcugguacuucuacuaccucggcaccgggccggaggccggccugcccuacggggccaacaaggacggcaucaucugggucgcgaccgagggcgcccugaacacccccaaggaccacaucgggacgcggaaccccgccaacaacgccgcgaucgugcuccagcugccgcagggcaccacccugcccaagggguucuacgccgagggcucccgcgggggcucccaggccagcucccggagcuccagccgcucccggaacagcucccgcaacagcacccccggcagcuccgggggcacgagccccgcccggauggccgggaacggcggggacgcggcccucgcccugcugcuccuggaccgccugaaccagcucgaguccaagaugagcggcaagggccagcagcagcaggggcagaccgugaccaagaaguccgccgccgaggcgagcaagaagccgcggcagaagcgcaccgccacgaaggccuacaacgucacccaggccuucggccgccgggggcccgagcagacccagggcaacuucggggaccaggagcugauccgccagggcaccgacuacaagcacuggccccagaucgcccaguucgcgcccuccgccagcgccuucuucggcaugucccggaucgggauggaggugacgccgagcggcaccuggcugaccuacaccggggccaucaagcucgacgacaaggaccccaacuucaaggaccaggugauccugcugaacaagcacaucgacgccuacaagacguucucccccaccgagcccaagaaggacaagaagaagaaggcggacgagacccaggcccucccgcagcgccagaagaagcagcagaccgucacgcugcugcccgccgccgaccucgacgacuucagcaagcagcugcagcaguccaugagcuccgcggacagcacccaggccuga

SEQ ID NO: 17261 - RNA, 1260 nt, Artificial Sequence
  SARS-CoV-2__MT846494.1__nucleocapsid protein (N) CDS gc
augagcgacaacggcccccagaaccagcgcaacgccccgcggaucaccuucgggggccccuccgacagcaccggguccaaccagaacggcgagcgcagcggggcccgguccaagcagcgccggccccagggccugcccaacaacacggcgagcugguucaccgcccucacccagcacggcaaggaggaccugaaguucccgcgcgggcagggcgugcccaucaacaccaacuccagccccgacgaccagaucggguacuaccggcgcgccacgcggcgcauccggggcggggacggcaagaugaaggaccugagcccccgcugguacuucuacuaccucggcaccgggccggaggccggccugcccuacggggccaacaaggacggcaucaucugggucgcgaccgagggcgcccugaacacccccaaggaccacaucgggacgcggaaccccgccaacaacgccgcgaucgugcuccagcugccgcagggcaccacccugcccaagggguucuacgccgagggcagccgcgggggcucccaggccagcucccggagcuccagccgcucccggaacagcucccgcaacagcacccccggcagcuccagcgggacgucccccgcccggauggccggcaacgggggcgacgcggcccucgcccugcugcuccuggaccgccugaaccagcucgagagcaagauguccgggaagggccagcagcagcagggccagaccgugaccaagaaguccgccgccgaggcguccaagaagccgcggcagaagcgcaccgccacgaaggccuacaacgucacccaggccuucgggcgccggggccccgagcagacccaggggaacuucggcgaccaggagcugauccgccaggggaccgacuacaagcacuggccccagaucgcccaguucgcgcccagcgccuccgccuucuucggcaugagccggaucggcauggaggugacgccguccgggaccuggcugaccuacaccggcgccaucaagcucgacgacaaggaccccaacuucaaggaccaggugauccugcugaacaagcacaucgacgccuacaagacguucccgcccaccgagcccaagaaggacaagaagaagaaggcggacgagacccaggcccucccccagcgccagaagaagcagcagaccgucacgcugcugcccgccgccgaccucgacgacuucagcaagcagcugcagcaguccaugagcuccgcggacagcacccaggccuga

SEQ ID NO: 17262 - RNA, 1260 nt, Artificial Sequence
  SARS-CoV-2__MT846526.1__nucleocapsid protein (N) CDS gc
augagcgacaacggcccccagaaccagcgcaacgccccgcggaucaccuucgggggccccuccgacagcaccggguccaaccagaacggcgagcgcagcggggcccgguccaagcagcgccggccccagggccugcccaacaacacggcgagcugguucaccgcccucacccagcacggcaaggaggaccugaaguucccgcgcgggcagggcgugcccaucaacaccaacuccagccccgacgaccagaucggguacuaccggcgcgccacgcggcgcauccggggcggggacggcaagaugaaggaccugagcccccgcugguacuucuacuaccucggcaccgggccggaggccggccugcccuacggggccaacaaggacggcaucaucugggucgcgaccgagggcgcccugaacacccccaaggaccacaucgggacgcggaaccccgccaacaacgccgcgaucgugcuccagcugccgcagggcaccacccugcccaagggguucuacgccgagggcucccgcgggggcucccaggccagcucccggagcuccagccgcucccggaacagcucccgcaacagcacccccggcagcucccgggggacgagccccgcccgcauggccggcaacgggggcgacgcggcccucgcccugcugcuccuggaccggcugaaccagcucgaguccaagaugagcgggaagggccagcagcagcagggccagaccgugaccaagaaguccgccgccgaggcgagcaagaagccgcgccagaagcgcaccgccacgaaggccuacaacgucacccaggccuucgggcggcgcggccccgagcagacccaggggaacuucggcgaccaggagcugauccggcaggggaccgacuacaagcacuggccccagaucgcccaguucgcgcccuccgccagcgccuucuucggcaugucccgcaucggcauggaggugacgccgagcgggaccuggcugaccuacaccggcgccaucaagcucgacgacaaggaccccaacuucaaggaccaggugauccugcugaacaagcacaucgacgccuacaagacguucccgcccaccgagcccaagaaggacaagaagaagaaggcggacgagauccaggcccucccccagcggcagaagaagcagcagaccgucacccugcugcccgccgccgaccucgacgacuucuccaagcagcugcagcagagcauguccagcgcggacuccacgcaggccuga

SEQ ID NO: 17263 - RNA, 1260 nt, Artificial Sequence
  SARS-CoV-2__MT846598.1__nucleocapsid protein (N) CDS gc
augagcgacaacggcccccagaaccagcgcaacgccccgcggaucaccuucgggggccccuccgacagcaccggguccaaccagaacggcgagcgcagcggggcccgguccaagcagcgccggccccagggccugcccaacaacacggcgagcugguucaccgcccucacccagcacggcaaggaggaccugaaguucccgcgcgggcagggcgugcccaucaacaccaacuccagccccgacgaccagaucggguacuaccggcgcgccacgcggcgcauccggggcggggacggcaagaugaaggaccugagcccccgcugguacuucuacuaccucggcaccgggccggaggccggccugcccuacggggccaacaaggacggcaucaucugggucgcgaccgagggcgcccugaacacccccaaggaccacaucgggacgcggaaccccgccaacaacgccgcgaucgugcuccagcugccgcagggcaccacccugcccaagggguucuacgccgagggcucccgcgggggcucccaggccagcucccggagcuccagccgcucccggaacagcucccgcaacagcacccccggcagcucccgggggacgagccccgcccgcauggccggcaacgggggcgacgcggcccucgcccugcugcuccuggaccggcugaaccagcucgaguccaagaugagcgggaagggccagcagcagcagggccagaccgugaccaagaaguccgccgccgaggcgagcaagaagccgcgccagaagcgcaccgccacgaaggccuacaacgucacccaggccuucgggcggcgcggccccgagcagacccaggggaacuucggcgaccaggagcugauccggcaggggaccgacuacaagcacuggccccagaucgcccaguucgcgcccuccgccagcgccuucuucggcaugucccgcaucggcauggaggugacgccgagcgggaccuggcugaccuacaccggcgccaucaagcucgacgacaaggaccccaacuucaaggaccaggugauccugcugaacaagcacaucgacgccuacaagacguucccgcccaccgagcccaagaaggacaagaagaagaaggcggacgccacccaggcccucccccagcggcagaagaagcagcagaccgucacgcugcugcccgccgcggaccucgacgacuucuccaagcagcugcagcagagcauguccagcgccgacuccacccaggccuga

SEQ ID NO: 17264 - RNA, 1260 nt, Artificial Sequence
  SARS-CoV-2__MT846653.1__nucleocapsid protein (N) CDS gc
augagcgacaacggcccccagaaccagcgcaacgccccgcggaucaccuucgggggccccuccgacagcaccggguccaaccagaacggcgagcgcagcggggcccgguccaagcagcgccggccccagggccugcccaacaacacggcgagcugguucaccgcccucacccagcacggcaaggaggaccugaaguucccgcgcgggcagggcgugcccaucaacaccaacuccagccccgacgaccagaucggguacuaccggcgcgccacgcggcgcauccggggcggggacggcaagaugaaggaccugagcccccgcugguacuucuacuaccucggcaccgggccggaggccggccugcccuacggggccaacaaggacggcaucaucugggucgcgaccgagggcgcccugaacacccccaaggaccacaucgggacgcggaaccccgccaacaacgccgcgaucgugcuccagcugccgcagggcaccacccugcccaagggguucuacgccgagggcucccgcgggggcucccaggccagcucccggagcuccagccgcucccggaacagcucccgcaacagcacccccggcagcucccgggggacgagccccgcccgcauggccggcaacgggggcgacgcggcccucgcccugcugcuccuggaccggcugaaccagcucgaguccaagaugagcgggaagggccagcagcagcagggccagaccgugaccaagaaguccgccgccgaggcgagcaagaagccgcgccagaagcgcaccgccacgaaggccuacaacgucacccaggccuucgggcggcgcggccccgagcagacccaggggaacuucggcgaccaggagcugauccggcaggggaccgacuacaagcacuggccccagaucgcccaguucgcgcccuccgccagcgccuucuucggcaugucccgcaucggcauggaggugacgccgagcgggaccuggcugaccuacaccggcgccaucaagcucgacgacaaggaccccaacuucaaggaccaggugauccugcugaacaagcacaucgacgccuacaagacguucccgcccaccgaguccaagaaggacaagaagaagaaggcggacgagacccaggcccucccccagcggcagaagaagcagcagaccgucacgcugcugcccgccgccgaccucgacgacuucagcaagcagcugcagcaguccaugagcuccgcggacagcacccaggccuga

SEQ ID NO: 17265 - RNA, 1260 nt, Artificial Sequence
  SARS-CoV-2__MT846665.1__nucleocapsid protein (N) CDS gc
augagcgacaacggcccccagaaccagcgcaacgccccgcggaucaccuucgggggccccuccgacagcaccggguccaaccagaacggcgagcgcagcggggcccgguccaagcagcgccggccccagggccugcccaacaacacggcgagcugguucaccgcccucacccagcacggcaaggaggaccugaaguucccgcgcgggcagggcgugcccaucaacaccaacuccagccccgacgaccagaucggguacuaccggcgcgccacgcggcgcauccggggcggggacggcaagaugaaggaccugagcccccgcugguacuucuacuaccucggcaccgggccggaggccggccugcacuacggggccaacaaggacggcaucaucugggucgcgaccgagggcgcccugaacacccccaaggaccacaucgggacgcggaaccccgccaacaacgccgcgaucgugcuccagcugccccagggcaccacccugccgaagggguucuacgccgagggcucccgcgggggcucccaggccagcucccggagcuccagccgcucccggaacagcucccgcaacagcacccccggcagcuccaagcggacgagccccgcccgcauggccgggaacggcggggacgcggcccucgcccugcugcuccuggaccggcugaaccagcucgaguccaagaugagcggcaaggggcagcagcagcagggccagaccgugaccaagaaguccgccgccgaggcgagcaagaagccccgccagaagcgcaccgccacgaaggccuacaacgucacccaggccuucggccggcgcgggccggagcagacccagggcaacuucggggaccaggagcugauccggcagggcaccgacuacaagcacuggccccagaucgcccaguucgcgcccuccgccagcgccuucuucgggaugucccgcaucggcauggaggugacgcccagcggcaccuggcugaccuacaccggggccaucaagcucgacgacaaggacccgaacuucaaggaccaggugauccugcugaacaagcacaucgacgccuacaagacguucccgcccaccgagcccaagaaggacaagaagaagaaggcggacgagacccaggcccucccccagcggcagaagaagcagcagaccgucacgcugcugcccgccgccgaccucgacgacuucuccaagcagcugcagcagagcauguccagcgcggacuccacccaggccuga

SEQ ID NO: 17266 - RNA, 1260 nt, Artificial Sequence
  SARS-CoV-2__MT846681.1__nucleocapsid protein (N) CDS gc
augagcgacaacggcccccagaaccagcgcaacgccccgcggaucaccuucgggggccccuccgacagcaccggguccaaccagaacggcgagcgcagcggggcccgguccaagcagcgccggccccagggccugcccaacaacacggcgagcugguucaccgcccucacccagcacggcaaggaggaccugaaguucccgcgcgggcagggcgugcccaucaacaccaacuccagccccgacgaccagaucggguacuaccggcgcgccacgcggcgcauccggggcggggacggcaagaugaaggaccugagcccccgcugguacuucuacuaccucggcaccgggccggaggccggccugcccuacggggccaacaaggacggcaucaucugggucgcgaccgagggcgcccugaacacccccaaggaccacaucgggacgcggaaccccgccaacaacgccgcgaucgugcuccagcugccgcagggcaccacccugcccaagggguucuacgccgagggcagccgcgggggcucccaggccagcucccggagcuccagccgcucccggaacagcucccgcaacagcacccccggcagcucccgggggacgagcuccgcccgcauggccggcaacgggggcgacgcggcccucgcccugcugcuccuggaccggcugaaccagcucgagagcaagauguccgggaagggccagcagcagcagggccagaccgugaccaagaaguccgccgccgaggcguccaagaagccccgccagaagcgcaccgccacgaaggccuacaacgucacccaggccuucgggcggcgcggcccggagcagacccaggggaacuucggcgaccaggagcugauccggcaggggaccgacuacaagcacuggccccagaucgcccaguucgcgcccagcgccuccgccuucuucggcaugagccgcaucggcauggaggugacgcccuccgggaccuggcugaccuacaccggcgccaucaagcucgacgacaaggacccgaacuucaaggaccaggugauccugcugaacaagcacaucgacgccuacaagacguucccgcccaccgagcccaagaaggacaagaagaagaaggcggacgagacccaggcccucccccagcggcagaagaagcagcagaccgucacgcugcugcccgccgccgaccucgacgacuucagcaagcagcugcagcaguccaugagcuccgcggacagcacccaggccuga

SEQ ID NO: 17267 - RNA, 1260 nt, Artificial Sequence
  SARS-CoV-2__MT847216.1__nucleocapsid protein (N) CDS gc
augagcgacaacggcccccagaaccagcgcaacgcccugcggaucaccuucgggggcccguccgacagcaccggguccaaccagaacggcgagcgcagcggggcccgguccaagcagcgccggccccagggccuccccaacaacacggcgagcugguucaccgcccugacccagcacggcaaggaggaccugaaguucccccgcgggcagggcgugccgaucaacaccaacuccagccccgacgaccagaucggguacuaccggcgcgccacgcggcgcauccggggcggggacggcaagaugaaggaccucagcccccgcugguacuucuacuaccugggcaccgggcccgaggccggccugccguacggggccaacaaggacggcaucaucugggucgcgaccgagggcgcccucaacacccccaaggaccacaucgggacgcggaaccccgccaacaacgccgcgaucgugcugcagcugccccagggcaccacccucccgaagggguucuacgccgagggcucccgcgggggcucccaggccagcucccggagcuccagccgcucccggaacagcucccgcaacagcacccccggcagcuccaagcggacgagccccgcccgcauggccgggaacggcggggacgcggcccuggcccugcuccugcuggaccggcucaaccagcuggaguccaagaugagcggcaaggggcagcagcagcagggccagaccgugaccaagaaguccgccgccgaggcgagcaagaagccccgccagaagcgcaccgccacgaaggccuacaacgucacccaggccuucggccggcgcgggccggagcagacccagggcaacuucggggaccaggagcugauccggcagggcaccgacuacaagcacuggccccagaucgcccaguucgcgcccuccgccagcgccuucuucgggaugucccgcaucggcauggaggugacgcccagcggcaccuggcucaccuacaccggggccaucaagcuggacgacaaggacccgaacuucaaggaccaggugauccugcucaacaagcacaucgacgccuacaagacguucccgcccaccgagcccaagaaggacaagaagaagaaggcggacgagacccaggcccugccccagcggcagaagaagcagcagaccgucacgcugcuccccgccgccgaccuggacgacuucuccaagcagcugcagcagagcauguccagcgcggacuccacccaggccuga

SEQ ID NO: 17268 - RNA, 1260 nt, Artificial Sequence
  SARS-CoV-2__MT847220.1__nucleocapsid protein (N) CDS gc
augagcgacaacggcccccagaaccagcgcaacgccccgcggaucaccuucgggggccccuccgacagcaccggguccaaccagaacggcgagcgcagcggggcccgguccaagcagcgccggccccagggccugcccaacaacacggcgagcugguucaccgcccucacccagcacggcaaggaggaccugaaguucccgcgcgggcagggcgugcccaucaacaccaacuccagccccgacgaccagaucggguacuaccggcgcgccacgcggcgcauccggggcggggacggcaagaugaaggaccugagcccccgcugguacuucuacuaccucggcaccgggccggaggccggccugcccuacggggccaacaaggacggcaucaucugggucgcgaccgagggcgcccugaacacccccaaggaccacaucgggacgcggaaccccgccaacaacgccgcgaucgugcuccagcugccgcagggcaccacccugcccaagggguucuacgccgagggcagccgcgggggcucccaggccagcucccggagcuccagccgcucccggaacagcucccgcaacagcacccccggcagcuccaagcggacgagccccgcccgcauguccgggaacggcggggacgccgcgcucgcccugcugcuccuggaccggcugaaccagcucgagagcaagauguccggcaaggggcagcagcagcagggccagaccgugaccaagaaguccgccgccgaggccuccaagaagccgcgccagaagcgcaccgcgacgaaggccuacaacgucacccaggccuucggccggcgcgggcccgagcagacccagggcaacuucggggaccaggagcugauccggcagggcaccgacuacaagcacuggccccagaucgcccaguucgcccccagcgcguccgccuucuucgggaugagccgcaucggcauggaggugacgccguccggcaccuggcugaccuacaccggggccaucaagcucgacgacaaggaccccaacuucaaggaccaggugauccugcugaacaagcacaucgacgccuacaagacguucccgcccaccgagcccaagaaggacaagaagaagaaggccgacgagacccaggcgcucccccagcggcagaagaagcagcagaccgucacgcugcugcccgccgccgaccucgacgacuucagcaagcagcugcagcaguccaugagcuccgccgacagcacccaggcguga

SEQ ID NO: 17269 - RNA, 1260 nt, Artificial Sequence
  SARS-CoV-2__MT847221.1__nucleocapsid protein (N) CDS gc
augagcgacaacggcccccagaaccagcgcaacgccccgcggaucaccuucgggggccccuccgacagcaccggguccaaccagaacggcgagcgcagcggggcccgguccaagcagcgccggccccagggccugcccaacaacacggcgagcugguucaccgcccucacccagcacggcaaggaggaccugaaguucccgcgcgggcagggcgugcccaucaacaccaacuccagccccgacgaccagaucggguacuaccggcgcgccacgcggcgcauccggggcggggacggcaagaugaaggaccugagcccccgcugguacuucuacuaccucggcaccgggccggaggccggccugcccuacggggccaacaaggacggcaucaucugggucgcgaccgagggcgcccugaacacccccaaggaccacaucgggacgcggaaccccgccaacaacgccgcgaucgugcuccagcugccgcagggcaccacccugcccaagggguucuacgccgagggcucccgcgggggcucccaggccagcucccggagcuccagccgcucccggaacagcucccgcaacagcacccccggcagcuccaagcggacgagccccgcccgcauggccgggaacggcggggacgcggcccucgcccugcugcuccuggaccggcugaaccagcucgaguccaagaugagcggcaaggggcagcagcagcagggccagaccgugaccaagaaguccgccgccgaggcgagcaagaagccgcgccagaagcgcaccgccacgaaggccuacaacgucacccaggccuucggccggcgcgggcccgagcagacccagggcaacuucggggaccaggagcugauccggcagggcaccgacuacaagcacuggccccagaucgcccaguucgcgcccuccgccagcgccuucuucgggaugucccgcaucggcauggaggugacgccgagcggcaccuggcugaccuacaccggggccaucaagcucgacgacaaggaccccaacuucaaggaccaggugauccugcugaacaagcacaucgacgccuacaagacguucccgcccaccgagcccaagaaggacaagaagaagaaggcggacgccacccaggcccucccccagcggcagaagaagcagcagaccgucacgcugcugcccgccgcggaccucgacgacuucuccaagcagcugcagcagagcauguccagcgccgacuccacccaggccuga

SEQ ID NO: 17270 - RNA, 1260 nt, Artificial Sequence
  SARS-CoV-2__MT847223.1__nucleocapsid protein (N) CDS gc
augagcgacaacggcccccagaaccaccgcaacgccccgcggaucaccuucgggggccccuccgacagcaccggguccaaccagaacggcgagcgcagcggggcccgguccaagcagcgccggccccagggccugcccaacaacacggcgagcugguucaccgcccucacccagcacggcaaggaggaccugaaguucccgcgcgggcagggcgugcccaucaacaccaacuccagccccgacgaccagaucggguacuaccggcgcgccacgcggcgcauccggggcggggacggcaagaugaaggaccugagcccccgcugguacuucuacuaccucggcaccgggccggaggccggccugcccuacggggccaacaaggacggcaucaucugggucgcgaccgagggcgcccugaacacccccaaggaccacaucgggacgcggaaccccgccaacaacgccgcgaucgugcuccagcugccgcagggcaccacccugcccaagggguucuacgccgagggcucccgcgggggcucccaggccagcucccggagcuccagccgcucccggaacagcucccgcaacagcacccccggcagcuccaagcggacgagccccgcccgcauggccgggaacggcggggacgcggcccucgcccugcugcuccuggaccggcugaaccagcucgaguccaagaugagcggcaaggggcagcagcagcagggccagaccgugaccaagaaguccgccgccgaggcgagcaagaagccgcgccagaagcgcaccgccacgaaggccuacaacgucacccaggccuucggccggcgcgggcccgagcagacccagggcaacuucggggaccaggagcugauccggcagggcaccgacuacaagcacuggccccagaucgcccaguucgcgcccuccgccagcgccuucuucgggaugucccgcaucggcauggaggugacgccgagcggcaccuggcugaccuacaccggggccaucaagcucgacgacaaggaccccaacuucaaggaccaggugauccugcugaacaagcacaucgacgccuacaagacguucccgcccaccgagcccaagaaggacaagaagaagaaggcggacgagacccaggcccucccccagcggcagaagaagcagcagaccgucacgcugcugcccgccgccgaccucgacgacuucuccaagcagcugcagcagagcauguccagcgcggacuccacccaggccuga

SEQ ID NO: 17271 - RNA, 1260 nt, Artificial Sequence
  SARS-CoV-2__MT847226.1__nucleocapsid protein (N) CDS gc
augagcgacaacggcccccagaaccagcgcaacgccccgcggaucaccuucgggggccccuccgacagcaccggguccaaccagaacggcgagcgcagcggggcccgguccaagcagcgccggccccagggccugcccaacaacacggcgagcugguucaccgcccucacccagcacggcaaggaggaccugaaguucccgcgcgggcagggcgugcccaucaacaccaacuccagccccgacgaccagaucggguacuaccggcgcgccacgcggcgcauccggggcggggacggcaagaugaaggaccugagcccccgcugguacuucuacuaccucggcaccgggccggaggccggccugcccuacggggccaacaaggacggcaucaucugggucgcgaccgagggcgccuucaacacccccaaggaccacaucgggacgcggaaccccgccaacaacgccgcgaucgugcugcagcucccgcagggcaccacccugcccaagggguucuacgccgagggcucccgcgggggcucccaggccagcucccggagcuccagccgcucccggaacagcucccgcaacagcacccccggcagcuccaagcggacgagccccgcccgcauggccgggaacggcggggacgcggcccuggcccuccugcugcucgaccggcugaaccagcuggaguccaagaugagcggcaaggggcagcagcagcagggccagaccgugaccaagaaguccgccgccgaggcgagcaagaagccgcgccagaagcgcaccgccacgaaggccuacaacgucacccaggccuucggccggcgcgggcccgagcagacccagggcaacuucggggaccaggagcucauccggcagggcaccgacuacaagcacuggccccagaucgcccaguucgcgcccuccgccagcgccuucuucgggaugucccgcaucggcauggaggugacgccgagcggcaccuggcugaccuacaccggggccaucaagcuggacgacaaggaccccaacuucaaggaccaggugauccuccugaacaagcacaucgacgccuacaagacguucccgcccaccgagcccaagaaggacaagaagaagaaggcguacgagacccaggcccugccccagcggcagaagaagcagcagaccgucacgcuccugcccgccgccgaccuggacgacuucuccaagcagcuccagcagagcauguccagcgcggacuccacccaggccuga

SEQ ID NO: 17272 - RNA, 1260 nt, Artificial Sequence
  SARS-CoV-2__MT843286.1__nucleocapsid protein (N) CDS gc
augagcgacaacggcccccagaaccagcgcaacgccccgcggaucaccuucgggggccccuccgacagcaccggguccaaccagaacggcgagcgcagcggggcccgguccaagcagcgccggccccagggccugcccaacaacacggcgagcugguucaccgcccucacccagcacggcaaggaggaccugaaguucccgcgcgggcagggcgugcccaucaacaccaacuccagccccgacgaccagaucggguacuaccggcgcgccacgcggcgcauccggggcggggacggcaagaugaaggaccugagcccccgcugguacuucuacuaccucggcaccgggccggaggccggccugcccuacggggccaacaaggacggcaucaucugggucgcgaccgagggcgcccugaacacccccaaggaccacaucgggacgcggaaccccgccaacaacgccgcgaucgugcuccagcugccgcagggcaccacccugcccaagggguucuacgccgagggcucccgcgggggcucccaggccagcucccggagcuccagccgcucccggaacagcucccgcaacagcacccccggcagcucccgggggacgagccccgcccgcauggccggcaacgggggcgacgcggcccucgcccugcugcuccuggaccggcugaaccagcucgaguccaagaucagcgggaagggccagcagcagcagggccagaccgugaccaagaaguccgccgccgaggcgagcaagaagccgcgccagaagcgcaccgccacgaaggccuacaacgucacccaggccuucgggcggcgcggccccgagcagacccaggggaacuucggcgaccaggagcugauccggcaggggaccgacuacaagcacuggccccagaucgcccaguucgcgcccuccgccagcgccuucuucggcaugucccgcaucggcauggaggugacgccgagcgggaccuggcugaccuacaccggcgccaucaagcucgacgacaaggaccccaacuucaaggaccaggugauccugcugaacaagcacaucgacgccuacaagacguucccgcccaccgagcccaagaaggacaagaagaagaaggcggacgagacccaggcccucccccagcggcagaagaagcagcagaccgucacgcugcugcccgccgccgaccucgacgacuucuccaagcagcugcagcagagcauguccagcgcggacuccacccaggccuga

SEQ ID NO: 17273 - RNA, 1260 nt, Artificial Sequence
  SARS-CoV-2__MT843316.1__nucleocapsid protein (N) CDS gc
augagcgacaacggcccccagaaccagcgcaacgccccgcggaucaccuucgggggccccuccgacagcaccggguccaaccagaacggcgagcgcagcggggcccgguccaagcagcgccggccccagggccugcccaacaacacggcgagcugguucaccgcccucacccagcacggcaaggaggaccugaaguucccgcgcgggcagggcgugcccaucaacaccaacuccagccccgacgaccagaucggguacuaccggcgcgccacgcggcgcauccggggcggggacggcaagaugaaggaccugagcccccgcugguacuucuacuaccucggcaccgggccggaggccggccugcccuacggggccaacaaggacggcaucaucugggucgcgaccgagggcgcccugaacacccccaaggaccacaucgggacgcggaaccccgccaacaacgccgcgguggugcuccagcugccgcagggcaccacccugcccaagggguucuacgccgagggcagccgcgggggcucccaggccuacagccgguccagcucccgcagccggaacuccagccgcaacuccacccccggcagcagccgggggacgucccccgcccgcauggccggcaacgggggcgacgcggcccucgcccugcugcuccuggaccggcugaaccagcucgagagcaagauguccgggaagggccagcagcagcagggccagaccgucaccaagaaguccgccgccgaggcguccaagaagccgcgccagaagcgcaccgccacgaaggccuacaacgugacccaggccuucgggcggcgcggccccgagcagacccaggggaacuucggcgaccaggagcugauccggcaggggaccgacuacaagcacuggccccagaucgcccaguucgcgcccagcgccuccgccuucuucggcaugagccgcaucggcauggaggugacgccguccgggaccuggcugaccuacaccggcgccaucaagcucgacgacaaggaccccaacuucaaggaccaggucauccugcugaacaagcacaucgacgccuacaagacguucccgcccaccgagcccaagaaggacaagaagaagaaggcggacgagacccaggcccucccccagcggcagaagaagcagcagaccgugacgcugcugcccgccgccgaccucgacgacuucagcaagcagcugcagcaguccaugagcuccgcggacagcacccaggccuga

SEQ ID NO: 17274 - RNA, 1260 nt, Artificial Sequence
  SARS-CoV-2__MT844022.1__nucleocapsid protein (N) CDS gc
augagcgacaacggcccccagaaccagcgcaacgccccgcggaucaccuucgggggccccuccgacagcaccggguccaaccagaacggcgagcgcagcggggcccgguccaagcagcgccggccccagggccugcccaacaacacggcgagcugguucaccgcccucacccagcacggcaaggaggaccugaaguucccgcgcgggcagggcgugcccaucaacaccaacuccagccccgacgaccagaucggguacuaccggcgcgccacgcggcgcauccggggcggggacggcaagaugaaggaccugagcccccgcugguacuucuacuaccucggcaccgggccggaggccggccugcccuacggggccaacaaggacggcaucaucugggucgcgaccgagggcgcccugaacacccccaaggaccacaucgggacgcggaaccccgccaacaacgccgcgaucgugcuccagcugccgcagggcaccacccugcccaagggguucuacgccgagggcucccgcgggggcucccaggccagcucccggagcuccagccgcucccggaacagcucccgcaacagcacccccggcagcucccgggggacgagccccgcccgcauggccggcaacgggggcgacgcggcccucgcccugcugcuccuggaccggcugaaccagcucgaguccaagaugagcgggaagggccagcagcagcagggccagaccgugaccaagaaguccgccgccgaggcgagcaagaagccgcgccagaagcgcaccgccacgaaggccuacaacgucacccaggccuucgggcggcgcggccccgagcagacccaggggaacuucggcgaccaggagcugauccggcaggggaccgacuacaagcacuggccccagaucgcccaguucgcgcccuccgccagcgccuucuucggcaugucccgcgugggcauggaggugacgccgagcgggaccuggcugaccuacaccggcgccaucaagcucgacgacaaggaccccaacuucaaggaccaggucauccugcugaacaagcacaucgacgccuacaagacguucccgcccaccgagcccaagaaggacaagaagaagaaggcggacgagacccaggcccucccccagcggcagaagaagcagcagaccgugacgcugcugcccgccgccgaccucgacgacuucuccaagcagcugcagcagagcauguccagcgcggacuccacccaggccuga

SEQ ID NO: 17275 - RNA, 1260 nt, Artificial Sequence
  SARS-CoV-2__MT844044.1__nucleocapsid protein (N) CDS gc
augagcgacaacggcccccagaaccagcgcaacgccccgcggaucaccuucgggggccccuccgacagcaccggguccaaccagaacggcgagcgcagcggggcccgguccaagcagcgccggccccagggccugcccaacaacacggcgagcugguucaccgcccucacccagcacggcaaggaggaccugaaguucccgcgcgggcagggcgugcccaucaacaccaacuccagccccgacgaccagaucggguacuaccggcgcgccacgcggcgcauccggggcggggacggcaagaugaaggaccugagcccccgcugguacuucuacuaccucggcaccgggccggaggccggccugcccuacggggccaacaaggacggcaucaucugggucgcgaccgagggcgcccugaacacccccaaggaccacaucgggagccggaaccccgccaacaacgccgcgaucgugcuccagcugccgcagggcacgacccugcccaagggguucuacgccgagggcucccgcgggggcagccaggccuccagccgguccagcucccgcagccggaacuccagccgcaacagcacccccggcuccagccgggggaccucccccgcccgcauggccggcaacgggggcgacgcggcccucgcccugcugcuccuggaccggcugaaccagcucgagagcaagauguccgggaagggccagcagcagcagggccagacggugaccaagaaguccgccgccgaggcguccaagaagccgcgccagaagcgcaccgccaccaaggccuacaacgucacgcaggccuucgggcggcgcggccccgagcagacccaggggaacuucggcgaccaggagcugauccggcaggggaccgacuacaagcacuggccccagaucgcccaguucgcgcccagcgccuccgccuucuucggcaugagccgcaucggcauggaggugaccccguccgggacguggcugaccuacaccggcgccaucaagcucgacgacaaggaccccaacuucaaggaccaggugauccugcugaacaagcacaucgacgccuacaagaccuucccgcccacggagcccaagaaggacaagaagaagaaggcggacgagacccaggcccucccccagcggcagaagaagcagcagaccgucacccugcugcccgccgccgaccucgacgacuucagcaagcagcugcagcaguccaugagcuccgcggacagcacgcaggccuga

SEQ ID NO: 17276 - RNA, 1260 nt, Artificial Sequence
  SARS-CoV-2__MT831123.1__nucleocapsid protein (N) CDS gc
augagcgacaacggcccccagaaccagcgcaacgccccgcggaucaccuucggggagcccuccgacagcaccggcuccaaccagaacggggagcgcagcggcgcccgguccaagcagcgccggccccaggggcugcccaacaacacggcgagcugguucaccgcccucacccagcacggcaaggaggaccugaaguucccgcgcggccagggggugcccaucaacaccaacuccagccccgacgaccagaucggcuacuaccggcgcgccacgcggcgcauccgcgggggcgacgggaagaugaaggaccugagcccccggugguacuucuacuaccucggcaccggcccggaggccgggcugcccuacggcgccaacaaggacgggaucaucugggucgcgaccgagggcgcccugaacacccccaaggaccacaucggcacgcggaaccccgccaacaacgccgcgaucgugcuccagcugccgcaggggaccacccugcccaagggcuucuacgccgaggggucccgcggcgggucccaggccagcucccggagcuccagccgcucccggaacagcucccgcaacagcacccccggcagcuccaagcggacgagccccgcccgcauggccggcaacgggggcgacgcggcccucgcccugcugcuccuggaccggcugaaccagcucgaguccaagaugagcgggaagggccagcagcagcaggggcagaccgugaccaagaaguccgccgccgaggcgagcaagaagccgcgccagaagcgcaccgccacgaaggccuacaacgucacccaggccuucggccggcgcggccccgagcagacccaggggaacuucggcgaccaggagcugauccggcaggggaccgacuacaagcacuggccccagaucgcccaguucgcgcccuccgccagcgccuucuucggcaugucccgcaucgggauggaggugacgccgagcggcaccuggcugaccuacaccggcgccaucaagcucgacgacaaggaccccaacuucaaggaccaggugauccugcugaacaagcacaucgacgccuacaagacguucccgcccaccgagcccaagaaggacaagaagaagaaggcggacgagacccaggcccucccccagcggcagaagaagcagcagaccgucacgcugcugcccgccgccgaccucgacgacuucuccaagcagcugcagcagagcauguccagcgcggacuccacccaggccuga

SEQ ID NO: 17277 - RNA, 1260 nt, Artificial Sequence
  SARS-CoV-2__MT831131.1__nucleocapsid protein (N) CDS gc
augagcgacaacggcccccagaaccagcgcaacgccccgcggaucaccuucgggggccccuccgacagcaccggguccaaccagaacggcgagcgcagcggggcccgguccaagcagcgccggccccagggccugcccaacaacacggcgagcugguucaccgcccucacccagcacggcaaggaggaccugaaguucccgcgcgggcagggcgugcccaucaacaccaacuccagccccgacgaccagaucggguacuaccggcgcgccacgcggcgcauccggggcggggacggcaagaugaaggaccugagcccccgcugguacuucuacuaccucggcaccgggccggaggccggccugcccuacggggccaacaaggacggcaucaucugggucgcgaccgagggcgcccugaacacccccaaggaccacaucgggacgcggaaccccgccaacaacgccgcgaucgugcuccagcugccgcagggcaccacccugcccaagggguucuacgccgagggcucccgcgggggcucccaggccagcucccggagcuccagccgcucccggaacagcucccgcaacagcacccccggcagcuccaagcggacgagccccgcccgcauggccgggaacggcggggacgcggcccucgcccugcugcuccuggaccggcugaaccagcucgaguccaagaugagcggcaaggggcagcagcagcagggccagaccgugaccaagaaguccgccgccgaggcgagcaagaagccgcgccagaagcgcaccgccacgaaggccuacaacgucacccaggccuucggccggcgcgggcccgagcagacccagggcaacuucggggaccaggagcugauccggcagggcaccgacuacaagcacuggccccagaucgcccaguucgcgcccuccgccagcgccuucuucgggaugucccgcaucggcauggaggugacgcugagcggcaccuggcucaccuacaccggggccaucaagcuggacgacaaggacccgaacuucaaggaccaggugauccugcucaacaagcacaucgacgccuacaagacguucccgcccaccgagcccaagaaggacaagaagaagaaggcggacgagacccaggcccugccccagcggcagaagaagcagcagaccgucacgcugcuccccgccgccgaccuggacgacuucuccaagcagcugcagcagagcauguccagcgcggacuccacccaggccuga

SEQ ID NO: 17278 - RNA, 1260 nt, Artificial Sequence
  SARS-CoV-2__MT831148.1__nucleocapsid protein (N) CDS gc
augagcgacaacggcccccagaaccagcgcaacgccccgcggaucaccuucgggggccccuccgacagcaccggguccaaccagaacggcgagcgcagcggggcccgguccaagcagcgccggccccagggccugcccaacaacacggcgagcugguucaccgcccucacccagcacggcaaggaggaccugaaguucccgcgcgggcagggcgugcccaucaacaucaacuccagccccgacgaccagaucggguacuaccggcgcgccacccggcgcauccggggcggggacggcaagaugaaggaccugagcccccgcugguacuucuacuaccucggcacggggccggaggccggccugcccuacggggccaacaaggacggcaucaucugggucgcgaccgagggcgcccugaacacccccaaggaccacaucgggacccggaaccccgccaacaacgccgcgaucgugcuccagcugccgcagggcacgacccugcccaagggguucuacgccgagggcucccgcgggggcucccaggccagcucccggagcuccagccgcucccggaacagcucccgcaacagcacccccggcagcuccaagcggaccagccccgcccgcauggccgggaacggcggggacgcggcccucgcccugcugcuccuggaccggcugaaccagcucgaguccaagaugagcggcaaggggcagcagcagcagggccagacggugaccaagaaguccgccgccgaggcgagcaagaagccgcgccagaagcgcaccgccaccaaggccuacaacgucacgcaggccuucggccggcgcgggcccgagcagacccagggcaacuucggggaccaggagcugauccggcagggcaccgacuacaagcacuggccccagaucgcccaguucgcgcccuccgccagcgccuucuucgggaugucccgcaucggcauggaggugaccccgagcggcacguggcugaccuacaccggggccaucaagcucgacgacaaggaccccaacuucaaggaccaggugauccugcugaacaagcacaucgacgccuacaagaccuucccgcccacggagcccaagaaggacaagaagaagaaggcggacgagacccaggcccucccccagcggcagaagaagcagcagaccgucacccugcugcccgccgccgaccucgacgacuucuccaagcagcugcagcagagcauguccagcgcggacuccacgcaggccuga

SEQ ID NO: 17279 - RNA, 1260 nt, Artificial Sequence
  SARS-CoV-2__MT831153.1__nucleocapsid protein (N) CDS gc
augagcgacaacggcccccagaaccagcgcaacgccccgcggaucaccuucgggggccccuccgacagcaccggguccaaccagaacggcgagcgcagcggggcccgguccaagcagcgccggccccagggccugcccaacaacacggcgagcugguucaccgcccucacccagcacggcaaggaggaccugaaguucccgcgcgggcagggcgugcccaucaacaccaacuccagccccgacgaccagaucggguacuaccggcgcgccacgcggcgcauccggggcggggacggcaagaugaaggaccugagcccccgcugguacuucuacuaccucggcaccgggccggaggccggccugcccuacggggccaacaaggacggcaucaucugggucgcgaccgagggcgcccugaacacccccaaggaccacaucgggacgcggaaccucgccaacaacgccgcgaucgugcugcagcugccccagggcaccacccucccgaagggguucuacgccgagggcucccgcgggggcucccaggccagcucccggagcuccagccgcucccggaacagcucccgcaacagcacccccggcagcuccaagcggacgagccccgcccgcauggccgggaacggcggggacgcggcccuggcccugcuccugcuggaccggcucaaccagcuggaguccaagaugagcggcaaggggcagcagcagcagggccagaccgugaccaagaaguccgccgccgaggcgagcaagaagccccgccagaagcgcaccgccacgaaggccuacaacgucacccaggccuucggccggcgcgggccggagcagacccagggcaacuucggggaccaggagcugauccggcagggcaccgacuacaagcacuggccccagaucgcccaguucgcgcccuccgccagcgccuucuucgggaugucccgcaucggcauggaggugacgcccagcggcaccuggcucaccuacaccggggccaucaagcuggacgacaaggacccgaacuucaaggaccaggugauccugcucaacaagcacaucgacgccuacaagacguucccgcccaccgagcccaagaaggacaagaagaagaaggcggacgagacccaggcccugccccagcggcagaagaagcagcagaccgucacgcugcuccccgccgccgaccuggacgacuucuccaagcagcugcagcagagcauguccagcgcggacuccacccaggccuga

SEQ ID NO: 17280 - RNA, 1260 nt, Artificial Sequence
  SARS-CoV-2__MT831158.1__nucleocapsid protein (N) CDS gc
augagcgacaacggcccccagaaccagcgcaacgccccgcggaucaccuucgggggccccuccgacagcaccggguccaaccagaacggcgagcgcagcggggcccgguccaagcagcgccggccccagggccugcccaacaacacggcgagcugguucaccgcccucacccagcacggcaaggaggaccugaaguucccgcgcgggcagggcgugcccaucaacaccaacuccagccccgacgaccagaucggguacuaccggcgcgccacgcggcgcauccggggcggggacggcaagaugaaggaccugagcccccgcugguacuucuacuaccucggcaccgggccggaggccggccugcccuacggggccaacaaggacggcaucaucugggucgcgaccgagggcgcccugaacacccccaaggaccacaucgggacgcggaaccccgccaacaacgccgcgaucgugcuccagcugccgcagggcaccacccugcccaagggguucuacgccgagggcucccgcgggggcucccaggccagcucccggagcuccagccgcucccggaacagcucccgcaacagcacccccggcagcuccaagcggacgagccccgcccgcauggccgggaacggcggggacgcggcccucgcccugcugcuccuggaccggcugaaccagcucgaguccaagaugagcggcaaggggcagcagcagcagggccagaccgugaccaagaaguccgccgccgaggcgagcaagaagccgcgccagaagcgcaccgccacgaaggccuacaacgucacccaggccuucggccggcgcgggcccgagcagacccagggcaacuucggggaccaggagcugauccggcagggcaccgacuacaagcacuggccccagaucgcccaguucgcgcccuccgccagcgccuucuucgggaugucccgcaucggcauggaggugacgccgagcggcaccuggcugaccuacaccggggccaucaagcucgacgacaaggaccccaacuucaaggaccaggugauccugcugaacaagcacaucgacgccuacaagacguucccgcccaccgagcccaagaaggacaagaagaagaaggcggacgagacccaggcccucccccagcggcacaagaagcagcagaccgucacgcugcugcccgccgccgaccucgacgacuucuccaagcagcugcagcagagcauguccagcgcggacuccacccaggccuga

SEQ ID NO: 17281 - RNA, 1260 nt, Artificial Sequence
  SARS-CoV-2__MT831179.1__nucleocapsid protein (N) CDS gc
augagcgacaacggcccccagaaccagcgcaacgccccgcggaucaccuucgggggccccuccgacagcaccggguccaaccagaacggcgagcgcagcggggcccgguccaagcagcgccggccccagggccugcccaacaacacggcgagcugguucaccgcccucacccagcacggcaaggaggaccugaaguucccgcgcgggcagggcgugcccaucaacaccaacuccagccccgacgaccagaucggguacuaccggcgcgccacgcggcgcauccggggcggggacggcaagaugaaggaccugagcccccgcugguacuucuacuaccucggcaccgggccggaggccggccugcccuacggggccaacaaggacggcaucaucugggucgcgaccgagggcgcccugaacacccccaaggaccacaucgggacgcggaaccccgccaacaacgccgcgaucgugcuccagcugccgcagggcaccacccugcccaagggguucuacgccgagggcucccgcgggggcucccaggccagcucccggagcuccagccgcucccggaacagcucccgcaacagcacccccggcagcuccaagcggacgagccccgcccgcauggccgggaacggcggggacgcggcccucgcccugcugcuccuggaccggcugaaccagcucgaguccaagaugagcggcaaggggcagcagcagcagggccagaccgugaccaagaaguccgccgccgaggcgagcaagaagccgcgccagaagcgcaccgccacgaaggccuacaacgucacccaggccuucggccggcgcgggcccgagcagacccagggcaacuucggggaccaggagcugauccggcagggcaccgacuacaagcacuggccccagaucgcccaguucgcgcccuccgccagcgccuucuucgggaugucccgcaucggcauggaggugacgccgagcggcaccuggcugaccuacaccggggccaucaagcucgacgacaaggaccccaacuucaaggaccaggugauccugcugaacaagcacaucgacgccuacaagacguucccgcccaccgagcccaagaaggacaagaagaagaaggcggacgagacccaggccagcccccagcggcagaagaagcagcagaccgucacgcuccugcccgccgccgaccuggacgacuucuccaagcagcuccagcaguccaugagcuccgcggacagcacccaggccuga

SEQ ID NO: 17282 - RNA, 1260 nt, Artificial Sequence
  SARS-CoV-2__MT831196.1__nucleocapsid protein (N) CDS gc
augagcgacaacggcccccagaaccagcgcaacgccccgcggaucaccuucgggggccccuccgacagcaccggguccaaccagaacggcgagcgcagcggggcccgguccaagcagcgccggccccagggccugcccaacaacacggcgagcugguucaccgcccucacccagcacggcaaggaggaccugaaguucccgcgcgggcagggcgugcccaucaacaccaacuccagccccgacgaccagaucggguacuaccggcgcgccacgcggcgcauccggggcggggacggcaagaugaaggaccugagcccccgcugguacuucuacuaccucggcaccgggccggaggccggccugcccuacggggccaacaaggacggcaucaucugggucgcgaccgagggcgcccugaacacccccaaggaccacaucgggacgcggaaccccgccaacaacgccgcgaucgugcuccagcugccgcagggcaccacccugcccaagggguucuacgccgagggcucccgcgggggcucccaggccagcucccggagcuccagccgcucccggaacagcucccgcaacagcacccccggcagcuccaagcggacgagccccgcccgcauggccgggaacggcggggacgcggcccucgcccugcugcuccuggaccggcugaaccagcucgaguccaagaugagcggcaaggggcagcagcagcagggccagaccgugaccaagaaguccgccgccgaggcgagcaagaagccgcgccagaagcgcaccgccacgaaggccuacaacgucacccaggccuucggccggcgcgggcccgagcagacccagggcaacuucggggaccaggagcugauccggcagggcaccgacuacaagcacuggccccagaucgcccaguucgcgcccuccgccagcgccuucuucgggaugucccgcaucggcauggaggugacgccgagcggcaccuggcugaccuacaccggggccaucaagcucgacgacaaggaccccaacuucaaggaccaggugauccugcugaacaagcacaucgacgccuacaagacguucccgcccaccgagcccaagaaggacaagaacaagaaggcggacgagacccaggcccucccccagcggcagaagaagcagcagaccgucacgcugcugcccgccgccgaccucgacgacuucuccaagcagcugcagcagagcauguccagcgcggacuccacccaggccuga

SEQ ID NO: 17283 - RNA, 1260 nt, Artificial Sequence
  SARS-CoV-2__MT831223.1__nucleocapsid protein (N) CDS gc
augagcgacaacggcccccagaaccagcgcaacgccccgcggaucaccuucgggggccccuccgacagcaccggguccaaccagaacggcgagcgcagcggggcccgguccaagcagcgccggccccagggccugcccaacaacacggcgagcugguucaccgcccucacccagcacggcaaggaggaccugaaguucccgcgcgggcagggcgugcccaucaacaccaacuccagccccgacgaccagaucggguacuaccggcgcgccacgcggcgcauccggggcggguacggcaagaugaaggaccugagcccccgcugguacuucuacuaccucggcaccgggccggaggccggccugcccuacggggccaacaaggacggcaucaucugggucgcgaccgagggcgcccugaacacccccaaggaccacaucgggacgcggaaccccgccaacaacgccgcgaucgugcuccagcugccgcagggcaccacccugcccaagggguucuacgccgagggcucccgcgggggcucccaggccagcucccggagcuccagccgcucccggaacagcucccgcaacagcacccccggcagcuccaagcggacgagccccgcccgcauggccgggaacggcggggacgcggcccucgcccugcugcuccuggaccggcugaaccagcucgaguccaagaugagcggcaaggggcagcagcagcagggccagaccgugaccaagaaguccgccgccgaggcgagcaagaagccgcgccagaagcgcaccgccacgaaggccuacaacgucacccaggccuucggccggcgcgggcccgagcagacccagggcaacuucggggaccaggagcugauccggcagggcaccgacuacaagcacuggccccagaucgcccaguucgcgcccuccgccagcgccuucuucgggaugucccgcaucggcauggaggugacgccgagcggcaccuggcugaccuacaccggggccaucaagcucgacgacaaggaccccaacuucaaggaccaggugauccugcugaacaagcacaucgacgccuacaagacguucccgcccaccgagcccaagaaggacaagaagaagaaggcggacgagacccaggcccucccccagcggcagaagaagcagcagaccgucacgcugcugcccgccgccgaccucgacgacuucuccaagcagcugcagcagagcauguccagcgcggacuccacccaggccuga

SEQ ID NO: 17284 - RNA, 1260 nt, Artificial Sequence
  SARS-CoV-2__MT831224.1__nucleocapsid protein (N) CDS gc
augagcgacaacggcccccagaaccagcgcaacgccccgcggaucaccuucgggggccccuccgacagcaccggguccaaccagaacggcgagcgcagcggggcccgguccaagcagcgccggccccagggccugcccaacaacacggcgagcugguucaccgcccucacccagcacggcaaggaggaccugaaguucccgcgcgggcagggcgugcccaucaacaccaacuccagccccgacgaccagaucggguacuaccggcgcgccacgcggcgcauccggggcggggacggcaagaugaaggaccugagcccccgcugguacuucuacuaccucggcaccgggccggaggccggccugcccuacggggccaacaaggacggcaucaucugggucgcgaccgagggcgcccugaacacccccaaggaccacaucgggacgcggaaccucgccaacaacgccgcgaucgugcugcagcugccccagggcaccacccucccgaagggguucuacgccgagggcucccgcgggggcucccaggccagcucccggagcuccagccgcucccggaacagcucccgcaacagcacccccggcagcucccgggggacgagccccgcccgcauggccggcaacgggggcgacgcggcccuggcccugcuccugcuggaccggcucaaccagcuggaguccaagaugagcgggaagggccagcagcagcagggccagaccgugaccaagaaguccgccgccgaggcgagcaagaagccccgccagaagcgcaccgccacgaaggccuacaacgucacccaggccuucgggcggcgcggcccggagcagacccaggggaacuucggcgaccaggagcugauccggcaggggaccgacuacaagcacuggccccagaucgcccaguucgcgcccuccgccagcgccuucuucggcaugucccgcaucggcauggaggugacgcccagcgggaccuggcucaccuacaccggcgccaucaagcuggacgacaaggacccgaacuucaaggaccaggugauccugcucaacaagcacaucgacgccuacaagacguucccgcccaccgagcccaagaaggacaagaagaagaaggcggacgagacccaggcccugccccagcggcagaagaagcagcagaccgucacgcugcuccccgccgccgaccuggacgacuucuccaagcagcugcagcagagcauguccagcgcggacuccacccaggccuga

SEQ ID NO: 17285 - RNA, 1260 nt, Artificial Sequence
  SARS-CoV-2__MT831284.1__nucleocapsid protein (N) CDS gc
augagcgacaacggcccccagaaccagcgcaacgccccgcggaucaccuucgggggccccuccgacagcaccggguccaaccagaacggcgagcgcagcggggcccgguccaagcagcgccggccccagggccugcccaacaacacggcgagcugguucaccgcccucacccagcacggcaaggaggaccugaaguucccgcgcgggcagggcgugcccaucaacaccaacuccagccccgacgaccagaucggguacuaccggcgcgccacgcggcgcauccggggcggggacggcaagaugaaggaccugagcccccgcugguacuucuacuaccucggcaccgggccggaggccggccugcccuacggggccaacaaggacggcaucaucugggucgcgaccgagggcgcccugaacacccccaaggaccacaucgggacgcggaaccccgccaacaacgccgcgaucgugcuccagcugccgcagggcaccacccugcccaagggguucuacgccgagggcagccgcgggggcucccaggccagcucccggagcuccagccgcucccggaacagcucccgcaacagcacccccggcagcuccaagcggacgagccccgcccgcauggccgggaacggcggggacgcggcccucgcccugcugcuccuggaccggcugaaccagcucgaguccaagaugagcggcaagucccagcagcagcaggggcagaccgugaccaagaaguccgccgccgaggcguccaagaagccgcgccagaagcgcaccgccacgaaggccuacaacgucacccaggccuucggccggcgcggccccgagcagacccaggggaacuucggcgaccaggagcugauccggcaggggaccgacuacaagcacuggccccagaucgcccaguucgcgcccagcgccuccgccuucuucggcaugagccgcaucgggauggaggugacgccguccggcaccuggcugaccuacaccggcgccaucaagcucgacgacaaggaccccaacuucaaggaccaggugauccugcugaacaagcacaucgacgccuacaagacguucccgcccaccgagcccaagaaggacaagaagaagaaggcggacgagacccaggcccucccccagcggcagaagaagcagcagaccgucacgcugcugcccgccgccgaccucgacgacuucagcaagcagcugcagcaguccaugagcuccgcggacagcacccaggccuga

SEQ ID NO: 17286 - RNA, 1260 nt, Artificial Sequence
  SARS-CoV-2__MT831285.1__nucleocapsid protein (N) CDS gc
augagcgacaacggcccccagaaccagcgcaacgccccgcggaucaccuucgggggccccuccgacagcaccggguccaaccagaacggcgagcgcagcggggcccgguccaagcagcgccggccccagggccugcccaacaacacggcgagcugguucaccgcccucacccagcacggcaaggaggaccugaaguucccgcgcgggcagggcgugcccaucaacaccaacuccagccccgacgaccagaucggguacuaccggcgcgccacgcggcgcauccggggcggggacggcaagaugaaggaccugagcccccgcugguacuucuacuaccucggcaccgggccggaggccggccugcccuacggggccaacaaggacggcaucaucugggucgcgaccgagggcgcccugaacacccccaaggaccacaucgggacgcggaaccccgccaacaacgccgcgaucgugcuccagcugccgcagggcaccacccugcccaagggguucuacgccgagggcucccgcgggggcucccaggccagcucccggagcuccagccgcucccggaacagcucccgcaacagcacccccggcagcuccaagcggacgagccccgcccgcauggccgggaacggcggggacgcggcccucgcccugcugcuccuggaccggcugaaccaccucgaguccaagaugagcggcaaggggcagcagcagcagggccagaccgugaccaagaaguccgccgccgaggcgagcaagaagccgcgccagaagcgcaccgccacgaaggccuacaacgucacccaggccuucggccggcgcgggcccgagcagacccagggcaacuucggggaccaggagcugauccggcagggcaccgacuacaagcacuggccccagaucgcccaguucgcgcccuccgccagcgccuucuucgggaugucccgcaucggcauggaggugacgccgagcggcaccuggcugaccuacaccggggccaucaagcucgacgacaaggaccccaacuucaaggaccaggugauccugcugaacaagcacaucgacgccuacaagacguucccgcccaccgagcccaagaaggacaagaagaagaaggcggacgagacccaggcccucccccagcggcagaagaagcagcagaccgucacgcugcugcccgccgccgaccucgacgacuucuccaagcagcugcagcagagcauguccagcgcggacuccacccaggccuga

SEQ ID NO: 17287 - RNA, 1260 nt, Artificial Sequence
  SARS-CoV-2__MT831300.1__nucleocapsid protein (N) CDS gc
augagcgacaacggcccccagaaccagcgcaacgccccgcggaucaccuucgggggccccuccgacagcaccggguccaaccagaacggcgagcgcagcggggcccgguccaagcagcgccggccccagggccugcccaacaacacggcgagcugguucaccgcccucacccagcacggcaaggaggaccugaaguucccgcgcgggcagggcgugcccaucaacaccaacuccagccccgacgaccagaucggguacuaccggcgcgccacgcggcgcauccggggcggggacggcaagaugaaggaccugagcccccgcugguacuucuacuaccucggcaccgggccggaggccggccugcccuacggggccaacaaggacggcaucaucugggucgcgaccgagggcgcccugaacacccccaaguaccacaucgggacgcggaaccccgccaacaacgccgcgaucgugcuccagcugccgcagggcaccacccugcccaagggguucuacgccgagggcucccgcgggggcucccaggccagcucccggagcuccagccgcucccggaacagcucccgcaacagcacccccggcagcuccaagcggacgagccccgcccgcauggccgggaacggcggggacgcggcccucgcccugcugcuccuggaccggcugaaccagcucgaguccaagaugagcggcaaggggcagcagcagcagggccagaccgugaccaagaaguccgccgccgaggcgagcaagaagccgcgccagaagcgcaccgccacgaaggccuacaacgucacccaggccuucggccggcgcgggcccgagcagacccagggcaacuucggggaccaggagcugauccggcagggcaccgacuacaagcacuggccccagaucgcccaguucgcgcccuccgccagcgccuucuucgggaugucccgcaucggcauggaggugacgccgagcggcaccuggcugaccuacaccggggccaucaagcucgacgacaaggaccccaacuucaaggaccaggugauccugcugaacaagcacaucgacgccuacaagacguucccgcccaccgagcccaagaaggacaagaagaagaaggcggacgagacccaggcccucccccagcggcagaagaagcagcagaccgucacgcugcugcccgccgccgaccucgacgacuucuccaagcagcugcagcagagcauguccagcgcggacuccacccaggccuga

SEQ ID NO: 17288 - RNA, 1260 nt, Artificial Sequence
  SARS-CoV-2__MT831333.1__nucleocapsid protein (N) CDS gc
augagcgacaacggccccaagaaccagcgcaacgccccgcggaucaccuucgggggccccuccgacagcaccggguccaaccagaacggcgagcgcagcggggcccgguccaagcagcgccggccccagggccugcccaacaacacggcgagcugguucaccgcccucacccagcacggcaaggaggaccugaaguucccgcgcgggcagggcgugcccaucaacaccaacuccagccccgacgaccagaucggguacuaccggcgcgccacgcggcgcauccggggcggggacggcaagaugaaggaccugagcccccgcugguacuucuacuaccucggcaccgggccggaggccggccugcccuacggggccaacaaggacggcaucaucugggucgcgaccgagggcgcccugaacacccccaaggaccacaucgggacgcggaaccccgccaacaacgccgcgaucgugcuccagcugccgcagggcaccacccugcccaagggguucuacgccgagggcucccgcgggggcucccaggccagcucccggagcuccagccgcucccggaacagcucccgcaacagcacccccggcagcucccgggggacgagccccgcccgcauggccggcaacgggggcgacgcggcccucgcccugcugcuccuggaccggcugaaccagcucgaguccaagaugagcgggaagggccagcagcagcagggccagaccgugaccaagaaguccgccgccgaggcgagcaagaagccgcgccagaagcgcaccgccacgaaggccuacaacgucacccaggccuucgggcggcgcggccccgagcagacccaggggaacuucggcgaccaggagcugauccggcaggggaccgacuacaagcacuggccccagaucgcccaguucgcgcccuccgccagcgccuucuucggcaugucccgcaucggcauggaggugacgccgagcgggaccuggcugaccuacaccggcgccaucaagcucgacgacaaggaccccaacuucaaggaccaggugauccugcugaacaagcacaucgacgccuacaagacguucccgcccaccgagcccaagaaggacaagaagaagaaggcggacgagacccaggcccucccccagcggcagaagaagcagcagaccgucacgcugcugcccgccgccgaccucgacgacuucuccaagcagcugcagcagagcauguccagcgcggacuccacccaggccuga

SEQ ID NO: 17289 - RNA, 1260 nt, Artificial Sequence
  SARS-CoV-2__MT831357.1__nucleocapsid protein (N) CDS gc
augagcgacaacggcccccagaaccagcgcaacgccccgcggaucaccuucgggggccccuccgacagcaccggguccaaccagaacggcgagcgcagcggggcccgguccaagcagcgccggccccagggccugcccaacaacacggcgagcugguucaccgcccucacccagcacggcaaggaggaccugaaguucccgcgcgggcagggcgugcccaucaacaccaacuccagccccgacgaccagaucggguacuaccggcgcgccacgcggcgcauccggggcggggacggcaagaugaaggaccugagcccccgcugguacuucuacuaccucggcaccgggccggaggccggccugcccuacggggccaacaaggacggcaucaucugggucgcgaccgagggcgcccugaacacccccaaggaccacaucgggacgcggaaccccgccaacaacgccgcgaucgugcuccagcugccgcagggcaccacccugcccaagggguucuacgccgagggcucccgcgggggcucccaggccagcucccggagcuccagccgcucccggaacagcucccgcaacagcacccccggcagcuccaagcggacgagccccgcccgcauggccgggaacggcggggacgcggcccucgcccugcugcuccuggaccggcugaaccagcucgaguccaagaugagcggcaaggggcagcagcagcagggccagaccgugaccaagaaguccgccgccgaggcgagcaagaagccgcgccagaagcgcaccgccacgaaggccuacaacgucacccaggccuucggccggcgcgggcccgagcagacccagggcaacuucggggaccaggagcugauccggcgcggcaccgacuacaagcacuggccccagaucgcccaguucgcgcccuccgccagcgccuucuucgggaugucccggaucggcauggaggugacgccgagcggcaccuggcugaccuacaccggggccaucaagcucgacgacaaggaccccaacuucaaggaccaggugauccugcugaacaagcacaucgacgccuacaagacguucccgcccaccgagcccaagaaggacaagaagaagaaggcggacgagacccaggcccucccccagcgccagaagaagcagcagaccgucacgcugcugcccgccgccgaccucgacgacuucuccaagcagcugcagcagagcauguccagcgcggacuccacccaggccuga

SEQ ID NO: 17290 - RNA, 1260 nt, Artificial Sequence
  SARS-CoV-2__MT831359.1__nucleocapsid protein (N) CDS gc
augagcgacaacggcccccagaaccagcgcaacgccccgcggaucaccuucgggggccccuccgacagcaccggguccaaccagaacggcgagcgcagcggggcccgguccaagcagcgccggccccagggccugcccaacaacacggcgagcugguucaccgcccucacccagcacggcaaggaggaccugaaguucccgcgcgggcagggcgugcccaucaacaccaacuccagccccgacgaccagaucggguacuaccggcgcgccacgcggcgcauccggggcggggacggcaagaugaaggaccugagcccccgcugguacuucuacuaccucggcaccgggccggaggccggccugcccuacggggccaacaaggacggcaucaucugggucgcgaccgagggcgcccugaacacccccaaggaccacaucgggacgcggaaccccgccaacaacgccgcgaucgugcuccagcugccgcagggcaccacccugcccaagggguucuacgccgagggcucccgcgggggcucccaggccagcucccggagcuccagccgcucccggaacagcucccgcaacagcacccccggcagcuccaagcggacgagccccgcccgcauggccgggaacggcggggacgcggcccucgcccugcugcuccuggaccggcugaaccagcucgaguccaagaugagcggcaaggggcagcagcagcagggccagaccgugaccaagaaguccgccgccgaggcgagcaagaagccgcgccagaagcgcaccgccacgaaggccuacaacgucacccaggccuucggccggcgcgggcccgagcagacccagggcaacuucggggaccaggagcugauccggcagggcaccgacuacaagcacuggccccagaucgcccaguucgcgcccuccgccagcgccuucuucgggaugucccgcaucggcauggaggugaucccgagcggcacguggcugaccuacaccggggccaucaagcucgacgacaaggaccccaacuucaaggaccaggugauccugcugaacaagcacaucgacgccuacaagaccuucccgcccacggagcccaagaaggacaagaagaagaaggcggacgagacccaggcccucccccagcggcagaagaagcagcagaccgucacccugcugcccgccgccgaccucgacgacuucuccaagcagcugcagcagagcauguccagcgcggacuccacgcaggccuga

SEQ ID NO: 17291 - RNA, 1260 nt, Artificial Sequence
  SARS-CoV-2__MT831366.1__nucleocapsid protein (N) CDS gc
augagcgacaacggcccccagaaccagcgcaacgccccgcggaucaccuucgggggccccuccgacagcaccggguccaaccagaacggcgagcgcagcggggcccgguccaagcagcgccggccccagggccugcccaacaacacggcgagcugguucaccgcccucacccagcacggcaaggaggaccugaaguucccgcgcgggcagggcgugcccaucaacaccaacuccagccccgacgaccagaucggguacuaccggcgcgccacgcggcgcauccggggcggggacggcaagaugaaggaccugagcccccgcugguacuucuacuaccucggcaccgggccggaggccggccugcccuacggggccaacaaggacggcaucaucugggucgcgaccgagggcgcccugaacacccccaaggaccacaucgggacgcggaaccccgccaacaacgccgcgaucgugcuccagcugccgcagggcaccacccugcccaagggguucuacgccgagggcucccgcgggggcucccaggccagcucccggagcuccagccgcucccggaacagcucccgcaacagcacccccggcagcucccgggggacgagccccgcccgcauggccggcaacgggggcgacgcggcccucgcccugcugcuccuggaccggcugaaccagcucgaguccaagaugagcgggaagggccagcagcagcagggccagaccgugaccaagaaguccgccgccgaggcgagcaagaagccgcgccagaagcgcaccgccacgaaggccuacaacgucacccaggccuucgggcggcgcggccccgagcagacccaggggaacuucggcgaccaggagcugauccggcaggggaccgacuacaagcacuggccccagaucgcccaguucgcgcccuccgccagcgccuucuucggcaugucccgcaucggcauggaggugacgccgagcgggaccuggcugaccuacaccggcgccaucaagcucgacgacaaggaccccaacuucaaggaccaggugauccugcugaacaagcacaucgacgccuacaagacguucccgcccaccgagcccaagaaggacaagaagaagaaggcggacgagacccaggcccucccccagcggcagaagaagcagcagaccgucacgcugcugcccgccgccgaccucgacgacuucuccaagcagcugcagcagagcauguccagcgcggacuccauccaggccuga

SEQ ID NO: 17292 - RNA, 1260 nt, Artificial Sequence
  SARS-CoV-2__MT831409.1__nucleocapsid protein (N) CDS gc
augagcgacaacggcccccagaaccagcgcaacgccccgcggaucaccuucgggggccccuccgacagcaccggguccaaccagaacggcgagcgcagcggggcccgguccaagcagcgccggccccagggccugcccaacaacacggcgagcugguucaccgcccucacccagcacggcaaggaggaccugaaguucccgcgcgggcagggcgugcccaucaacaccaacuccagccccgacgaccagaucggguacuaccggcgcgccacgcggcgcauccggggcggggacggcaagaugaaggaccugagcccccgcugguacuucuacuaccucggcaccgggccggaggccggccugcccuacggggccaacaaggacggcaucaucugggucgcgaccgagggcgcccugaacacccccaaggaccacaucgggacgcggaaccccgccaacaacgccgcgaucgugcuccagcugccgcagggcaccacccugcccaagggguucuacgccgagggcucccgcgggggcucccaggccagcucccggagcuccagccgcucccggaacagcucccgcaacagcacccccggcagcuccaagcggacgagccccgcccgcauggccgggaacggcggggacgcggcccucgcccugcugcuccuggaccggcugaaccagcucgaguccaagaugagcggcaaggggcagcagcagcagggccagaccgugaccaagaaguccgccgccgaggcgagcaagaagccgcgccagaagcgcaccgccacgaaggccuacaacgucacccaggccuucggccggcgcgggcccgagcagacccagggcaacuucggggaccaggagcugauccggcagggcaccgacuacaagcacuggccccagaucgcccaguucgcgcccuccgccagcgccuucuucgggaugucccgcaucggcauggaggugacgccgagcggcaccuggcugaccuacaccggggccaucaagcucgacgacaaggaccccaacuucaaggaccaggugauccugcugaacaagcacaucgacgccuacaagacguucccgcccaccgagcccaagaaggacaagaagaagaaggcggacgagacccaggcccucccccagcggcagaagaagcagcagaccgucacgcugcugcccgccguggaccucgacgacuucuccaagcagcugcagcagagcauguccagcgccgacuccacccaggcguga

SEQ ID NO: 17293 - RNA, 1260 nt, Artificial Sequence
  SARS-CoV-2__MT831449.1__nucleocapsid protein (N) CDS gc
augagcgacaacggcccccagaaccagcgcaacgccccgcggaucaccuucgggggccccuccgacagcaccggguccaaccagaacggcgagcgcagcggggcccgguccaagcagcgccggccccagggccugcccaacaacacggcgagcugguucaccgcccucacccagcacggcaaggaggaccugaaguucccgcgcgggcagggcgugcccaucaacaccaacuccagccccgacgaccagaucggguacuaccggcgcgccacgcggcgcauccggggcggggacggcaagaugaaggaccugagcccccgcugguacuucuacuaccucggcaccgggccggaggccggccugcccuacggggccaacaaggacggcaucaucugggucgcgaccgagggcgcccugaacacccccaaggaccacaucgggacgcggaaccccgccaacaacgccgcgaucgugcuccagcugccgcagggcaccacccugcccaagggguucuacgccgagggcucccgcgggggcucccaggccagcucccggagcuccagccgcucccggaacagcucccgcaacagcauccccggcagcucccgggggaccagccccgcccgcauggccggcaacgggggcgacgcggcccucgcccugcugcuccuggaccggcugaaccagcucgaguccaagaugagcgggaagggccagcagcagcagggccagacggugaccaagaaguccgccgccgaggcgagcaagaagccgcgccagaagcgcaccgccaccaaggccuacaacgucacgcaggccuucgggcggcgcggccccgagcagacccaggggaacuucggcgaccaggagcugauccggcaggggaccgacuacaagcacuggccccagaucgcccaguucgcgcccuccgccagcgccuucuucggcaugucccgcaucggcauggaggugaccccgagcgggacguggcugaccuacaccggcgccaucaagcucgacgacaaggaccccaacuucaaggaccaggugauccugcugaacaagcacaucgacgccuacaagaccuucccgcccacggagcccaagaaggacaagaagaagaaggcggacgagacccaggcccucccccagcggcagaagaagcagcagaccgucacccugcugcccgccgccgaccucgacgacuucuccaagcagcugcagcagagcauguccagcgcggacuccacgcaggccuga

SEQ ID NO: 17294 - RNA, 1260 nt, Artificial Sequence
  SARS-CoV-2__MT831483.1__nucleocapsid protein (N) CDS gc
augagcgacaacggcccccagaaccagcgcaacgccccgcggaucaccuucgggggccccuccgacagcaccggguccaaccagaacggcgagcgcagcggggcccgguccaagcagcgccggccccagggccugcccaacaacacggcgagcugguucaccgcccucacccagcacggcaaggaggaccugaaguucccgcgcgggcagggcgugcccaucaacaccaacuccagccccgacgaccagaucggguacuaccggcgcgccacgcggcgcauccggggcggggacggcaagaugaaggaccugagcccccgcugguacuucuacuaccucggcaccgggccggaggccggccugcccuacggggccaacaaggacggcaucaucugggucgcgaccgagggcgcccugaacacccccaaggaccacaucgggacgcggaaccccgccaacaacgccgcgaucgugcuccagcugccgcagggcaccauccugcccaagggguucuacgccgagggcucccgcgggggcucccaggccagcucccggagcuccagccgcucccggaacagcucccgcaacagcacccccggcagcucccgggggaccagccccgcccgcauggccggcaacgggggcgacgcggcccucgcccugcugcuccuggaccggcugaaccagcucgaguccaagaugagcgggaagggccagcagcagcagggccagacggugaccaagaaguccgccgccgaggcgagcaagaagccgcgccagaagcgcaccgccaccaaggccuacaacgucacgcaggccuucgggcggcgcggccccgagcagacccaggggaacuucggcgaccaggagcugauccggcaggggaccgacuacaagcacuggccccagaucgcccaguucgcgcccuccgccagcgccuucuucggcaugucccgcaucggcauggaggugaccccgagcgggacguggcugaccuacaccggcgccaucaagcucgacgacaaggaccccaacuucaaggaccaggugauccugcugaacaagcacaucgacgccuacaagaccuucccgcccacggagcccaagaaggacaagaagaagaaggcggacgagacccaggcccucccccagcggcagaagaagcagcagaccgucacccugcugcccgccgccgaccucgacgacuucuccaagcagcugcagcagagcauguccagcgcggacuccacgcaggccuga

SEQ ID NO: 17295 - RNA, 1260 nt, Artificial Sequence
  SARS-CoV-2__MT831593.1__nucleocapsid protein (N) CDS gc
augagcgacaacggcccccagaaccagcgcaacgccccgcggaucaccuucgggggccccuccgacagcaccggguccaaccagaacggcgagcgcagcggggcccgguccaagcagcgccggccccagggccugcccaacaacacggcgagcugguucaccgcccucacccagcacggcaaggaggaccugaaguucucccgcgggcagggcgugccgaucaacaccaacagcucccccgacgaccagaucggguacuaccggcgcgccacgcggcgcauccggggcggggacggcaagaugaaggaccugagcccccgcugguacuucuacuaccucggcaccgggcccgaggccggccugccguacggggccaacaaggacggcaucaucugggucgcgaccgagggcgcccugaacacccccaaggaccacaucgggacgcggaaccccgccaacaacgccgcgaucgugcuccagcugccccagggcaccacccugccgaagggguucuacgccgagggcucccgcgggggcagccaggccuccagccgguccagcucccgcagccggaacuccagccgcaacagcacccucggcuccagccgggggacgucccccgcccgcauggccggcaacgggggcgacgcggcccuggcccugcuccugcuggaccggcucaaccagcuggagagcaagauguccgggaagggccagcagcagcagggccagaccgugaccaagaaguccgccgccgaggcgagcaagaagccccgccagaagcgcaccgccacgaaggccuacaacgucacccaggccuucgggcggcgcggccccgagcagacccaggggaacuucggcgaccaggagcugauccggcaggggaccgacuacaagcacuggccgcagaucgcccaguucgcgcccagcgccuccgccuucuucggcaugagccgcaucggcauggaggugacgcccuccgggacccuccugaccuacaccggcgccaucaagcuggacgacaaggaccccaacuucaaggaccaggugauccuccugaacaagcacaucgacgccuacaagacguucccgcccaccgagcccaagaaggacaagaagaagaaggcggacgagacccaggcccugccccagcggcagaagaagcagcagaccgucacgcuccugccggccgccgaccuggacgacuucagcaagcagcuccagcaguccaugagcuccgcggacagcacccaggccuga

SEQ ID NO: 17296 - RNA, 1260 nt, Artificial Sequence
  SARS-CoV-2__MT831658.1__nucleocapsid protein (N) CDS gc
augagcgacaacggcccccagaaccagcgcaacgccccgcggaucaccuucgggggccccuccgacagcaccggguccaaccagaacggcgagcgcagcggggcccgguccaagcagcgccggccccagggccugcccaacaacacggcgagcugguucaccgcccucacccagcacggcaaggaggaccugaaguucccgcgcgggcagggcgugcccaucaacaccaacuccagccccgacgaccagaucggguacuaccggcgcgccacgcggcgcauccggggcggggacggcaagaugaaggaccugagcccccgcugguacuucuacuaccucggcaccgggccggaggccggccugcccuacggggccaacaaggacggcaucaucugggucgcgaccgagggcgcccugaacacccccaaggaccacaucgggacgcggaaccccgccaacaacgccgcgaucgugcuccagcugccgcagggcaccacccugcccaagggguucuacgccgagggcucccgcgggggcucccaggccagcucccggagcuccagccgcucccggaacagcucccgcaacagcacccccggcagcuccaagcggacgagccccgcccgcauggccgggaacggcggggacgcggcccucgcccugcugcuccuggaccggcugaaccagcucgaguccaagaugagcggcaaggggcagcagcagcagggccagaccgugaccaagaaguccgccgccgaggcgagcaagaagccgcgccagaagcgcaccgccacgaaggccuacaacgucacccaggccuucggccggcgcgggcccgagcagacccagggcaacuucggggaccaggagcugauccggcagggcaccgacuacaagcacuggccccagaucgcccaguucgcgcccuccgccagcgccuucuucgggaugucccgcaucggcauggaggugacgccgagcggcaccuggcugaccuacaccggggccaucaagcucgacgacaaggaccccaacuucaaggaccaggugauccugcugaacaagcacaucgacgccuacaagacguucccgcccaccgagcccaagaaggacaagaagaagaaggcggacgagacccaggcccucccccagcggcagaagaagcagcagaccgucacgcugcugcccgccgccgaccucgacgacuucuccaagcagcugcagcagagcaugggcuccgcggacagcacccaggccuga

SEQ ID NO: 17297 - RNA, 1260 nt, Artificial Sequence
  SARS-CoV-2__MT831701.1__nucleocapsid protein (N) CDS gc
augagcgacaacggcccccagaaccagcgcaacgccccgcggaucaccuucgggggccccuccgacagcaccggguccaaccagaacggcgagcgcagcggggcccgguccaagcagcgccggccccagggccugcccaacaacacggcgagcugguucaccgcccucacccagcacggcaaggaggaccugaaguucccgcgcgggcagggcgugcccaucaacaccaacuccagccccgacgaccagaucggguacuaccggcgcgccacgcggcgcauccggggcggggacggcaagaugaaggaccugagcccccgcugguacuucuacuaccucggcaccgggccggaggccggccugcccuacggggccaacaaggacggcaucaucugggucgcgaccgagggcgcccugaacacccccaaggaccacaucgggacgcggaaccccgccaacaacgccgcgaucgugcuccagcugccgcagggcaccacccugcccaagggguucuacgccgagggcucccgcgggggcucccaggccagcucccggagcuccagccgcucccggaacagcucccgcaacagcacccccggcagcuccaagcggacgagccccgcccgcauggccgggaacggcggggacgcggcccucgcccugcugcuccuggaccggcugaaccagcucgaguccaagaugagcggcaaggggcagcagcagcagggccagaccgugaccaagaaguccagcgccgaggccuccaagaagccgcgccagaagcgcaccgcgacgaaggccuacaacgucacccaggccuucggccggcgcgggcccgagcagacccagggcaacuucggggaccaggagcugauccggcagggcaccgacuacaagcacuggccccagaucgcccaguucgcccccagcgcguccgccuucuucgggaugagccgcaucggcauggaggugacgccguccggcaccuggcugaccuacaccggggccaucaagcucgacgacaaggaccccaacuucaaggaccaggugauccugcugaacaagcacaucgacgccuacaagacguucccgcccaccgagcccaagaaggacaagaagaagaaggccgacgagacccaggcgcucccccagcggcagaagaagcagcagaccgucacgcugcugcccgccgccgaccucgacgacuucagcaagcagcugcagcaguccaugagcuccgccgacagcacccaggcguga

SEQ ID NO: 17298 - RNA, 1260 nt, Artificial Sequence
  SARS-CoV-2__MT831717.1__nucleocapsid protein (N) CDS gc
augagcgacaacggcccccagaaccagcgcaacgccccgcggaucaccuucgggggccccuccgacagcaccggguccaaccagaacggcgagcgcagcggggcccgguccaagcagcgccggccccagggccugcccaacaacacggcgagcugguucaccgcccucacccagcacggcaaggaggaccugaaguucccgcgcgggcagggcgugcccaucaacaccaacuccagccccgacgaccagaucggguacuaccggcgcgccacgcggcgcauccggggcggggacggcaagaugaaggaccugagcccccgcugguacuucuacuaccucggcaccgggccggaggccggccugcccuacggggccaacaaggacggcaucaucugggucgcgaccgagggcgcccugaacacccccaaggaccacaucgggacgcggaaccccgccaacaacgccgcgaucgugcuccagcugccgcagggcaccacccugcccaagggguucuacgccgagggcagccgcgggggcucccaggccagcucccggagcuccagccgcucccggaacagcgcccgcaacuccacccccggcagcagccgggggacgucccccgcccgcauggcgggcaacgggggcgacgccgcccucgcccugcugcuccuggaccggcugaaccagcucgagagcaagauguccgggaagggccagcagcagcagggccagaccgugaccaagaaguccgccgcggaggccuccaagaagccgcgccagaagcgcaccgccacgaaggccuacaacgucacccaggccuucgggcggcgcggccccgagcagacccaggggaacuucggcgaccaggagcugauccggcaggggaccgacuacaagcacuggccccagaucgcgcaguucgcccccagcgccuccgccuucuucggcaugagccgcaucggcauggaggugacgccguccgggaccuggcugaccuacaccggcgccaucaagcucgacgacaaggaccccaacuucaaggaccaggugauccugcugaacaagcacaucgacgcguacaagacguucccgcccaccgagcccaagaaggacaagaagaagaaggccgacgagacccaggcccucccccagcggcagaagaagcagcagaccgucacgcugcugcccgccgcggaccucgacgacuucagcaagcagcugcagcaguccaugagcuccgccgacagcacccaggccuga

SEQ ID NO: 17299 - RNA, 1260 nt, Artificial Sequence
  SARS-CoV-2__MT831745.1__nucleocapsid protein (N) CDS gc
augagcgacaacggcccccagaaccagcgcaacgccccgcggaucaccuucgggggccccuccgacagcaccggguccaaccagaacggcgagcgcagcggggcccgguccaagcagcgccggccccagggccugcccaacaacacggcgagcugguucaccgcccucacccagcacggcaaggaggaccugaaguucccgcgcgggcagggcgugcccaucaacaccaacuccagccccgacgaccagaucggguacuaccggcgcgccacgcggcgcauccggggcggggacggcaagaugaaggaccugagcccccgcugguacuucuacuaccucggcaccgggccggaggccggccugcccuacggggccaacaaggacggcaucaucugggucgcgaccgagggcgcccugaacacccccaaggaccacaucgggacgcggaaccccgccaacaacgccgcgaucgugcuccagcugccgcagggcaccacccugcccaagggguucuacgccgagggcucccgcgggggcucccaggccagcucccggagcuccagccgcucccggaacagcucccgcaacagcacccccggcagcucccgggggacgagccccgcccgcauggccggcaacgggggcgacgcggcccucgcccugcugcuccuggaccggcugaaccagcucgaguccaagaugagcgggaagggccagcagcagcagggccagaccgugaccaagaaguccgccgccgaggcgagcaagaagccgcgccagaagcgcaccgccacgaaggccuacaacgucacccaggccuucgggcggcgcggccccgagcagacccaggggaacuucggcgaccaggagcugauccggcaggggaccgacuacaagcacuggccccagaucgcccaguucgcgcccuccgccagcgccuucuucggcaugucccgcaucggcauggaggugacgccgagcgggaccuggcugaccuacaccggcgccaucaagcucgacgacaaggaccccacguucaaggaccaggugauccugcugaacaagcacaucgacgccuacaagaccuucccgcccaccgagcccaagaaggacaagaagaagaaggcggacgagacccaggcccucccccagcggcagaagaagcagcagacggucacccugcugcccgccgccgaccucgacgacuucuccaagcagcugcagcagagcauguccagcgcggacuccacccaggccuga

SEQ ID NO: 17300 - RNA, 1260 nt, Artificial Sequence
  SARS-CoV-2__MT831837.1__nucleocapsid protein (N) CDS gc
augagcgacaacggcccccagaaccagcgcaacgccccgcggaucaccuucgggggccccuccgacagcaccggguccaaccagaacggcgagcgcagcggggcccgguccaagcagcgccggccccagggccugcccaacaacacggcgagcugguucaccgcccucacccagcacggcaaggaggaccugaaguucccgcgcgggcagggcgugcccaucaacaccaacuccagccccgacgaccagaucggguacuaccggcgcgccacgcggcgcauccggggcggggacggcaagaugaaggaccugagcccccgcugguacuucuacuaccucggcaccgggccggaggccggccugcccuacggggccaacaaggacggcaucaucugggucgcgaccgagggcgcccugaacacccccaaggaccacaucgggacgcggaaccccgccaacaacgccgcgaucgugcuccagcugccgcagggcaccacccugcccaagggguucuacgccgagggcucccgcgggggcucccaggccagcucccggagcuccagccgcucccggaacagcucccgcaacagcacccccggcagcucccgggggacgagccccgcccgcguggccggcaacgggggcgacgcggcccucgcccugcugcuccuggaccggcugaaccagcucgaguccaagaugagcgggaagggccagcagcagcagggccagaccgucaccaagaaguccgccgccgaggcgagcaagaagccgcgccagaagcgcaccgccacgaaggccuacaacgugacccaggccuucgggcggcgcggccccgagcagacccaggggaacuucggcgaccaggagcugauccggcaggggaccgacuacaagcacuggccccagaucgcccaguucgcgcccuccgccagcgccuucuucggcaugucccgcaucggcauggaggugacgccgagcgggaccuggcugaccuacaccggcgccaucaagcucgacgacaaggaccccaacuucaaggaccaggucauccugcugaacaagcacaucgacgccuacaagacguucccgcccaccgagcccaagaaggacaagaagaagaaggcggacgagacccaggcccucccccagcggcagaagaagcagcagaccgugacgcugcugcccgccgccgaccucgacgacuucuccaagcagcugcagcagagcauguccagcgcggacuccacccaggccuga

SEQ ID NO: 17301 - RNA, 1260 nt, Artificial Sequence
  SARS-CoV-2__MT833958.1__nucleocapsid protein (N) CDS gc
augagcgacaacggcccccagaaccagcgcaacgccccgcggaucaccuucgggggccccuccgacagcaccggguccaaccagaacggcaagcgcagcggggcccgguccaagcagcgccggccccagggccugcccaacaacacggcgagcugguucaccgcccucacccagcacggcaaggaggaccugaaguucccgcgcgggcagggcgugcccaucaacaccaacuccagccccgacgaccagaucggguacuaccggcgcgccacgcggcgcauccggggcggggacggcaagaugaaggaccugagcccccgcugguacuucuacuaccucggcaccgggccggaggccggccugcccuacggggccaacaaggacggcaucaucugggucgcgaccgagggcgcccugaacacccccaaggaccacaucgggacgcggaaccccgccaacaacgccgcgaucgugcuccagcugccgcagggcaccacccugcccaagggguucuacgccgagggcucccgcgggggcucccaggccagcucccggagcuccagccgcucccggaacagcucccgcaacagcacccccggcagcuccaagcggacgagccccgcccgcauggccgggaacggcggggacgcggcccucgcccugcugcuccuggaccggcugaaccagcucgaguccaagaugagcggcaaggggcagcagcagcagggccagaccgugaccaagaaguccgccgccgaggcgagcaagaagccgcgccagaagcgcaccgccacgaaggccuacaacgucacccaggccuucggccggcgcgggcccgagcagacccagggcaacuucggggaccaggagcugauccggcagggcaccgacuacaagcacuggccccagaucgcccaguucgcgcccuccgccagcgccuucuucgggaugucccgcaucggcauggaggugacgccgagcggcaccuggcugaccuacaccggggccaucaagcucgacgacaaggaccccaacuucaaggaccaggugauccugcugaacaagcacaucgacgccuacaagacguucccgcccaccgagcccaagaaggacaagaagaagaaggcggacgagacccaggcccucccccagcggcagaagaagcagcagaccgucacgcugcugcccgccgccgaccucgacgacuucuccaagcagcugcagcagagcauguccagcgcggacuccacccaggccuga

SEQ ID NO: 17302 - RNA, 1260 nt, Artificial Sequence
  SARS-CoV-2__MT833965.1__nucleocapsid protein (N) CDS gc
augagcgacaacggcccccagaaccagcgcaacgccccgcggaucaccuucgggggccccuccgacagcaccggguccaaccagaacggcgagcgcagcggggcccgguccaagcagcgccggccccagggccugcccaacaacacggcgagcugguucaccgcccucacccagcacggcaaggaggaccugaaguucccgcgcgggcagggcgugcccaucaacaccaacuccagccccgacgaccagaucggguacuaccggcgcgccacgcggcgcauccggggcggggacggcaagaugaaggaccugagcccccgcugguacuucuacuaccucggcaccgggccggaggccggccugcccuacggggccaacaaggacggcaucaucugggucgcgaccgagggcgcccugaacacccccaaggaccacaucgggacgcggaaccccgccaacaacgccgcgaucgugcuccagcugccgcagggcaccacccugcccaagggguucuacguggagggcucccgcgggggcucccaggccagcucccggagcuccagccgcucccggaacagcucccgcaacagcacccccggcagcucccgggggacgagccccgcccgcauggccggcaacgggggcgacgccgcgcucgcccugcugcuccuggaccggcugaaccagcucgaguccaagaugagcgggaagggccagcagcagcagggccagaccgucaccaagaaguccgccgccgaggccagcaagaagccgcgccagaagcgcaccgcgacgaaggccuacaacgugacccaggccuucgggcggcgcggccccgagcagacccaggggaacuucggcgaccaggagcugauccggcaggggaccgacuacaagcacuggccccagaucgcccaguucgcccccuccgcgagcgccuucuucggcaugucccgcaucggcauggaggugacgccgagcgggaccuggcugaccuacaccggcgccaucaagcucgacgacaaggaccccaacuucaaggaccaggucauccugcugaacaagcacaucgacgccuacaagacguucccgcccaccgagcccaagaaggacaagaagaagaaggccgacgagacccaggcgcucccccagcggcagaagaagcagcagaccgugacgcugcugcccgccgccgaccucgacgacuucuccaagcagcugcagcagagcauguccagcgccgacuccacccaggcguga

SEQ ID NO: 17303 - RNA, 1260 nt, Artificial Sequence
  SARS-CoV-2__MT833974.1__nucleocapsid protein (N) CDS gc
augagcgacaacggcccccagaaccagcgcaacgccccgcggaucaccuucgggggccccuccgacagcaccggguccaaccagaacggcgagcgcagcggggcccgguccaagcagcgccggccccagggccugcccaacaacacggcgagcugguucaccgcccucacccagcacggcaaggaggaccugaaguucccgcgcgggcagggcgugcccaucaacaccaacuccagccccgacgaccagaucggguacuaccggcgcgccacgcggcgcauccggggcggggacggcaagaugaaggaccugagcccccgcugguacuucuacuaccucggcaccgggccggaggccggccugcccuacggggccaacaaggacggcaucaucugggucgcgaccgagggcgcccugaacacccccaaggaccacaucgggacgcggaaccccgccaacaacgccgcgaucgugcuccagcugccgcagggcaccacccugcccaagggguucuacgccgagggcagccgcgggggcucccaggccagcucccggagcuccagccgcucccggaacagcucccgcaacagcaccagcggcuccagcaagcggacgucccccgcccgcauggccgggaacggcggggacgcggcccucgcccugcugcuccuggaccggcugaaccagcucgagagcaagauguccggcaaggggcagcagcagcagggccagaccgugaccaagaaguccgccgccgaggcguccaagaagccccgccagaagcgcaccgccacgaaggccuacaacgucacccaggccuucggccggcgcgggccggagcagacccagggcaacuucggggaccaggagcugauccggcagggcaccgacuacaagcacuggccccagaucgcccaguucgcgcccagcgccuccgccuucuucgggaugagccgcaucggcauggaggugacgcccuccggcaccuggcugaccuacaccggggccaucaagcucgacgacaaggacccgaacuucaaggaccaggugauccugcugaacaagcacaucgacgccuacaagacguucccgcccaccgagcccaagaaggacaagaagaagaaggcggacgagacccaggcccucccccagcggcagaagaagcagcagaccgucacgcugcugcccgccgccgaccucgacgacuucagcaagcagcugcagcaguccaugagcuccgcggacagcacccaggccuga

SEQ ID NO: 17304 - RNA, 1260 nt, Artificial Sequence
  SARS-CoV-2__MT834002.1__nucleocapsid protein (N) CDS gc
augagcgacaacggcccccagaaccagcgcaacgccccgcggaucaccuucgggggccccuccgacagcaccggguccaaccagaacggcgagcgcagcggggcccgguccaagcagcgccggccccagggccugcccaacaacacggcgagcugguucaccgcccucacccagcacggcaaggaggaccugaaguucccgcgcgggcagggcgugcccaucaacaccaacuccagccccgacgaccagaucggguacuaccggcgcgccacgcggcgcauccggggcggggacggcaagaugaaggaccugagcccccgcugguacuucuacuaccucggcaccgggccggaggccggccugcccuacggggccaacaaggacggcaucaucugggucgcgaccgagggcgcccugaacacccccaaggaccacaucgggacgcggaaccccgccaacaacguggccaucgugcuccagcugccgcagggcaccacccugcccaagggguucuacgcggagggcucccgcgggggcucccaggccagcucccggagcuccagccgcucccggaacagcucccgcaacagcacccccggcagcuccaagcggacgagccccgcccgcauggccgggaacggcggggacgccgcgcucgcccugcugcuccuggaccggcugaaccagcucgaguccaagaugagcggcaaggggcagcagcagcagggccagaccgucaccaagaaguccgccgccgaggccagcaagaagccgcgccagaagcgcaccgcgacgaaggccuacaacgugacccaggccuucggccggcgcgggcccgagcagacccagggcaacuucggggaccaggagcugauccggcagggcaccgacuacaagcacuggccccagaucgcccaguucgcccccuccgcgagcgccuucuucgggaugucccgcaucggcauggaggugacgccgagcggcaccuggcugaccuacaccggggccaucaagcucgacgacaaggaccccaacuucaaggaccaggucauccugcugaacaagcacaucgacgccuacaagacguucccgcccaccgagcccaagaaggacaagaagaagaaggccgacgagacccaggcgcucccccagcggcagaagaagcagcagaccgugacgcugcugcccgccgccgaccucgacgacuucuccaagcagcugcagcagagcauguccagcgccgacuccacccaggcguga

SEQ ID NO: 17305 - RNA, 1260 nt, Artificial Sequence
  SARS-CoV-2__MT834031.1__nucleocapsid protein (N) CDS gc
augagcgacaacggcccccagaaccagcgcaacgccccgcggaucaccuucgggggccccuccgacagcaccggguccaaccagaacggcgagcgcagcggggcccgguccaagcagcgccggccccagggccugcccaacaacacggcgagcugguucaccgcccucacccagcacggcaaggaggaccugaaguucccgcgcgggcagggcgugcccaucaacaccaacuccagccccgacgaccagaucggguacuaccggcgcgccacgcggcgcauccggggcggggacggcaagaugaaggaccugagcccccgcugguacuucuacuaccucggcaccgggccggaggccggccugcccuacggggccaacaaggacggcaucaucugggucgcgaccgagggcgcccugaacacccccaaggaccacaucgggacgcggaaccccgccaacaacgccgcgaucgugcuccagcugccgcagggcaccacccugcccaagggguucuacgccgagggcucccgcgggggcucccaggccagcucccggagcuccagccgcucccggaacagcucccgcaacagcacccccggcagcuccaagcggacgagccccgcccgcauggccgggaacggcggggacgcggcccucgcccugcugcuccuggaccggcugaaccagcucgaguccaagaugagcggcaaggggcagcagcagcagggccagaccgugaccaagaaguccgccgccgaggcgagcaagaagccgcgccagaagcgcaccgccacgaaggccuacaacgucacccaggccuucggccggcgcgggcccgagcagacccagggcaacuucggggaccaggagcugauccggcagggcaccgacuacaagcacuggccccagaucgcccaguucgcgcccuccgccagcgccuucuucgggaugucccgcaucggcauggaggugacgccgagcggcaccuggcugaccuacaucggggccaucaagcucgacgacaaggaccccaacuucaaggaccaggugauccugcugaacaagcacaucgacgccuacaagaccuucccgcccacggagcccaagaaggacaagaagaagaaggcggacgagacccaggcccucccccagcggcagaagaagcagcagaccgucacccugcugcccgccgccgaccucgacgacuucuccaagcagcugcagcagagcauguccagcgcggacuccacgcaggccuga

SEQ ID NO: 17306 - RNA, 1260 nt, Artificial Sequence
  SARS-CoV-2__MT834038.1__nucleocapsid protein (N) CDS gc
augagcgacaacggcccccagaaccagcgcaacgccccgcggaucaccuucgggggccccuccgacagcaccggguccaaccagaacggcgagcgcagcggggcccgguccaagcagcgccggccccagggccugcccaacaacacggcgagcugguucaccgcccucacccagcacggcaaggaggaccugaaguucccgcgcgggcagggcgugcccaucaacaccaacuccagccccgacgaccagaucggguacuaccggcgcgccacgcggcgcauccggggcggggacggcaagaugaaggaccugagcccccgcugguacuucuacuaccucggcaccgggccggaggccggccugcccuacggggccaacaaggacggcaucaucugggucgcgaccgagggcgcccugaacacccccaaggaccacaucgggacgcggaaccccgccaacaacgccgcgaucgugcuccagcugccgcagggcaccacccugcccaagggguucuacgccgagggcucccgcgggggcucccaggccagcucccggagcuccagccgcucccggaacagcucccgcaacagcacccccggcagcucccgggggacgagccccgcccgcauggccggcaacgggggcgacgcggcccucgcccugcugcuccuggaccggcugaaccagcucgaguccaagaugagcgggaagggccagcagcagcagggccagaccgugaccaagaaguccgccgccgaggcgagcaagaagccgcgccagaagcgcaccgccacgaaggccuacaacgucacccaggccuucgggcggcgcggccccgagcagacccaggggaacuucggcgaccaggagcugauccggcaggggaccgacuacaagcacuggccccagaucgcccaguucgcgcccuccgccagcgccuucuucggcaugucccgcaucggcauggaggugacgccgagcgggaccuggcugaccuacaccggcgccaucaagcucgacgacaaggaccccaacuucaaggaccaggugauccugcugaacaagcacaucgacgccuacaagacguucccgcccaccgagcccaagaaggacaagaagaagaaggcgggggagacccaggcccucccccagcggcagaagaagcagcagaccgucacgcugcugcccgccgccgaccucgacgacuucuccaagcagcugcagcagagcauguccagcgcggacuccacccaggccuga

SEQ ID NO: 17307 - RNA, 1260 nt, Artificial Sequence
  SARS-CoV-2__MT834043.1__nucleocapsid protein (N) CDS gc
augagcgacaacggcccccagaaccagcgcaacgccccgcggaucaccuucgggggccccuccgacagcaccggguccaaccagaacggcgagcgcagcggggcccgguccaagcagcgccggccccagggccugcccaacaacacggcgagcugguucaccgcccucacccagcacggcaagguggaccugaaguucccgcgcgggcagggcguccccaucaacaccaacuccagccccgacgaccagaucggguacuaccggcgcgccacgcggcgcauccggggcggggacggcaagaugaaggaccugagcccccgcugguacuucuacuaccucggcaccgggccggaggccggccugcccuacggggccaacaaggacggcaucaucuggguggcgaccgagggcgcccugaacacccccaaggaccacaucgggacgcggaaccccgccaacaacgccgcgaucgugcuccagcugccgcagggcaccacccugcccaagggguucuacgccgagggcagccgcgggggcucccaggccagcucccggagcuccagccgcucccggaacagccuccgcaacuccacccccggcagcagccgggggacgucccccgcccgcauggccggcaacgggggcgacgcggcccuggcccugcuccugcuggaccggcucaaccagcuggagagcaagauguccgggaagggccagcagcagcagggccagaccgucaccaagaaguccgccgccgaggcguccaagaagccgcgccagaagcgcaccgccacgaaggccuacaacgugacccaggccuucgggcggcgcggccccgagcagacccaggggaacuucggcgaccaggagcugauccggcaggggaccgacuacaagcacuggccccagaucgcccaguucgcgcccagcgccuccgccuucuucggcaugagccgcaucggcauggaggugacgccguccgggaccuggcucaccuacaccggcgccaucaagcuggacgacaaggaccccaacuucaaggaccaggucauccugcucaacaagcacaucgacgccuacaagacguucccgcccaccgagcccaagaaggacaagaagaagaaggcggacgagacccaggcccugccccagcggcagaagaagcagcagaccgugauccugcuccccgccgccgaccuggacgacuucagcaagcagcugcagcaguccaugagcuccgcggacagcacgcaggccuga

SEQ ID NO: 17308 - RNA, 1260 nt, Artificial Sequence
  SARS-CoV-2__MT834069.1__nucleocapsid protein (N) CDS gc
augagcgacaacggcccccagaaccagcgcaacgccccgcacaucaccuucgggggccccuccgacagcaccggguccaaccagaacggcgagcggagcggggcccgcuccaagcagcggcgcccccagggccugcccaacaacacggcgagcugguucaccgcccucacccagcacggcaaggaggaccugaaguucccgcgggggcagggcgugcccaucaacaccaacuccagccccgacgaccagaucggguacuaccgccgggccacgcgccggauccgcggcggggacggcaagaugaaggaccugagcccccggugguacuucuacuaccucggcaccgggccggaggccggccugcccuacggggccaacaaggacggcaucaucugggucgcgaccgagggcgcccugaacacccccaaggaccacaucgggacgcgcaaccccgccaacaacgccgcgaucgugcuccagcugccgcagggcaccacccugcccaagggguucuacgccgagggcucccgcgggggcucccaggccagcucccggagcuccagccggucccgcaacagcucccggaacagcacccccggcagcuccaagcgcacgagccccgcccggauggccgggaacggcggggacgcggcccucgcccugcugcuccuggaccgccugaaccagcucgaguccaagaugagcggcaaggggcagcagcagcagggccagaccgugaccaagaaguccgccgccgaggcgagcaagaagccgcggcagaagcgcaccgccacgaaggccuacaacgucacccaggccuucggccgccgggggcccgagcagacccagggcaacuucggggaccaggagcugauccgccagggcaccgacuacaagcacuggccccagaucgcccaguucgcgcccuccgccagcgccuucuucgggaugucccggaucggcauggaggugacgccgagcggcaccuggcugaccuacaccggggccaucaagcucgacgacaaggaccccaacuucaaggaccaggugauccugcugaacaagcacaucgacgccuacaagacguucccgcccaccgagcccaagaaggacaagaagaagaaggcggacgagacccaggcccucccccagcgccagaagaagcagcagaccgucacgcugcugcccgccgccgaccucgacgacuucuccaagcagcugcagcagagcauguccagcgcggacuccacccaggccuga

SEQ ID NO: 17309 - RNA, 1260 nt, Artificial Sequence
  SARS-CoV-2__MT834123.1__nucleocapsid protein (N) CDS gc
augagcgacaacggcccccagaaccagcgcaacgccccgcggaucaccuucgggggccccuccgacagcaccggguccaaccagaacggcgagcgcagcggggcccgguccaagcagcgccggccccagggccugagcaacaacacggcguccugguucaccgcccucacccagcacggcaaggaggaccugaaguucccccgcgggcagggcgugccgaucaacaccaacagcucccccgacgaccagaucggguacuaccggcgcgccacgcggcgcauccggggcggggacggcaagaugaaggaccugagcccccgcugguacuucuacuaccucggcaccgggcccgaggccggccugccguacggggccaacaaggacggcaucaucugggucgcgaccgagggcgcccugaacacccccaaggaccacaucgggacgcggaaccccgccaacaacgccgcgaucgugcuccagcugccccagggcaccacccugccgaagggguucuacgccgagggcucccgcgggggcagccaggccuccagccgguccagcucccgcagccggaacuccagccgcaacagcacccccggcuccagcaagcggacgucccccgcccgcauggccgggaacggcggggacgcggcccucgcccugcugcuccuggaccggcugaaccagcucgagagcaagauguccggcaaggggcagcagcagcagggccagaccgugaccaagaaguccgccgccgaggcgagcaagaagccccgccagaagcgcaccgccacgaaggccuacaacgucacccaggccuucggccggcgcgggccggagcagacccagggcaacuucggggaccaggagcugauccggcagggcaccgacuacaagcacuggccccagaucgcccaguucgcgcccagcgccuccgccuucuucgggaugagccgcaucggcauggaggugacgcccuccggcaccuggcugaccuacaccggggccaucaagcucgacgacaaggacccgaacuucaaggaccaggugauccugcugaacaagcacaucgacgccuacaagacguucccgcccaccgagcccaagaaggacaagaagaagaaggcggacgagacccaggcccucccccagcggcagaagaagcagcagaccgucacgcugcugcccgccgccgaccucgacgacuucagcaagcagcugcagcaguccaugagcuccgcggacagcacccaggccuga

SEQ ID NO: 17310 - RNA, 1260 nt, Artificial Sequence
  SARS-CoV-2__MT834129.1__nucleocapsid protein (N) CDS gc
augagcgacaacggcccccagaaccagcgcaacgccccgcggaucaccuucgggggccccuccgacagcaccggguccaaccagaacggcgagcgcagcggggcccgguccaagcagcgccggccccagggccugcccaacaacacggcgagcugguucaccgcccucacccagcacggcaaggaggaccugaaguucccgcgcgggcagggcgugcccaucaacaccaacuccagccccgacgaccagaucggguacuaccggcgcgccacgcggcgcauccggggcggggacggcaagaugaaggaccugagcccccgcugguacuucuacuaccucggcaccgggccggaggccggccugcccuacggggccaacaaggacggcaucaucugggucgcgaccgagggcgcccugaacacccccaaggaccacaucgggacgcggaaccccgccaacaacgccgcgaucgugcuccagcugccgcagggcaccacccugcccaagggguucuacgccgagggcucccgcgggggcucccaggccagcucccggagcuccagccgcucccggaacagcucccgcaacagcacccccggcagcuccaagcggacgagccccgcccgcauggccgggaacggcggggacgcggcccucgcccugcugcuccuggaccggcugaaccagcucgaguccaagaugagcggcaaggggcagcagcagcagggccagaccgugaccaagaaguccgccgccgaggcgagcaagaagccgcgccagaagcgcaccgccacgaaggccuacaacgucacccaggccuucggccggcgcgggcccgagcagacccagggcaacuucggggaccaggagcugauccggcagggcaccgacuacaagcacuggccccagaucgcccaguucgcgcccuccgccagcgccuucuucgggaugucccgcaucggcauggaggugacgccgagcggcauguggcugaccuacaccggggccaucaagcucgacgacaaggaccccaacuucaaggaccaggugauccugcugaacaagcacaucgacgccuacaagaccuucccgcccacggagcccaagaaggacaagaagaagaaggcggacgagacccaggcccucccccagcggcagaagaagcagcagaccgucacccugcugcccgccgccgaccucgacgacuucuccaagcagcugcagcagagcauguccagcgcggacuccacgcaggccuga

SEQ ID NO: 17311 - RNA, 1260 nt, Artificial Sequence
  SARS-CoV-2__MT834213.1__nucleocapsid protein (N) CDS gc
augagcgacaacggcccccagaaccagcgcaacgccccgcggaucaccuucgggggccccuccgacagcaccggguccaaccagaacggcgagcgcagcggggcccgguccaagcagcgccggccccagggccugcccaacaacacggcgagcugguucaccgcccucacccagcacggcaaggaggaccugaaguucccgcgcgggcagggcgugcccaucaacaccaacuccagccccgacgaccagaucggguacuaccggcgcgccacgcggcgcauccggggcggggacggcaagaugaaggaccugagcccccgcugguacuucuacuaccucggcaccgggccggaggccggccugcccuacggggccaacaaggacggcaucaucugggucgcgaccgagggcgcccugaacacccccaaggaccacaucgggacgcggaaccccgccaacaacgccgcgaucgugcuccagcugccgcagggcaccacccugcccaagggguucuacgccgagggcucccgcgggggcucccaggccagcucccggagcuccagccgcucccggaacagcucccgcaacagcacccccggcagcucccgggggacgagccccgcccgcauggccggcaacgggggcgacgcggcccucgcccugcugcuccuggaccggcugaaccagcucgaguccaagaugagcgggaagggccagcagcagcagggccagaccgugaccaagaaguccgccgccgaggcgagcaagaagccgcgccagaagcgcaccgccacgaaggccuacaacgucacccaggccuucgggcggcgcggccccgagcagacccaggggaacuucggcgaccaggagcugauccggcaggggaccgacuacaagcacuggccccagaucgcccaguucgcgcccuccgccagcgccuucuucggcaugucccgcaucggcauggaggugacgccgagcgggauguggcugaccuacaccggcgccaucaagcucgacgacaaggaccccaacuucaaggaccaggugauccugcugaacaagcacaucgacgccuacaagaccuucccgcccacggagcccaagaaggacaagaagaagaaggcggacgagacccaggcccucccccagcggcagaagaagcagcagaccgucacccugcugcccgccgccgaccucgacgacuucuccaagcagcugcagcagagcauguccagcgcggacuccacgcaggccuga

SEQ ID NO: 17312 - RNA, 1260 nt, Artificial Sequence
  SARS-CoV-2__MT834233.1__nucleocapsid protein (N) CDS gc
augagcgacaacggcccccagaaccagcgcaacgccccgcggaucaccuucgggggccccuccgacagcaccggguccaaccagaacggcgagcgcagcggggcccgguccaagcagcgccggccccagggccugcccaacaacacggcgagcugguucaccgcccucacccagcacggcaaggaggaccugaaguucccgcgcgggcagggcgugcccaucaacaccaacuccagccccgacgaccagaucggguacuaccggcgcgccacgcggcgcauccggggcggggacggcaagaugaaggaccugagcccccgcugguacuucuacuaccucggcaccgggccggaggccggccugcccuacggggccaacaaggacggcaucaucugggucgcgaccgagggcgcccugaacacccccaaggaccacaucgggacgcggaaccccgccaacaacgccgcgaucgugcuccagcugccgcagggcaccacccugcccaagggguucuacgccgagggcucccgcgggggcucccaggccagcucccggagcuccagccgcucccggaacagcucccgcaacagcacccccggcagcucccgggggacgagccccgcccgcauggccggcaacgggggcgacgcggcccucgcccugcugcuccuggaccggcugaaccagcucgaguccaagaugagcgggaagggccagcagcagcagggccagaccgugaccaagaaguccgccgccgaggcgagcaagaagccgcgccagaagcgcaccgccacgaaggccuacaacgucacccaggccuucgggcggcgcggccccgagcagacccaggggaacuucggcgaccaggagcugauccggcaggggaccgacuacaagcacuggccccagaucgcccaguucgcgcccuccgccagcgccuucuucggcaugucccgcaucggcauggaggugacgccgagcgggaccuggcugaccuacaccggcgccaucaagcucgacgacaaggaccccaacuucaaggaccaggugauccugcugaacaagcacaucgacgccuacaagacguucccccucaccgagcccaagaaggacaagaagaagaaggcggacgagacccaggcccugccgcagcggcagaagaagcagcagaccgucacgcugcuccccgccgccgaccuggacgacuucuccaagcagcugcagcagagcauguccagcgcggacuccacccaggccuga

SEQ ID NO: 17313 - RNA, 1260 nt, Artificial Sequence
  SARS-CoV-2__MT834245.1__nucleocapsid protein (N) CDS gc
augagcgacaacggcccccagaaccagcgcaacgccccgcggaucaccuucgggggccccuccgacagcaccggguccaaccagaacggcgagcgcagcggggcccgguccaagcagcgccggccccagggccugcccaacaacacggcgagcugguucaccgcccucacccagcacggcaaggaggaccugaaguucccgcgcgggcagggcgugcccaucaacaccaacuccagccccgacgaccagaucggguacuaccggcgcgccacgcggcgcauccggggcggggacggcaagaugaaggaccugagcccccgcugguacuucuacuaccucggcaccgggccggaggccggccugcccuacggggccaacaaggacggcaucaucugggucgcgaccgagggcgcccugaacacccccaaggaccacaucgggacgcggaaccccgccaacaacgccgcgaucgugcuccagcugccgcagggcaccacccugcccaagggguucuacgccgagggcucccgcgggggcucccaggccagcucccggagcuccagccgcucccggaacagcucccgcaacagcacccccggcagcuccaagcggacgagccccgcccgcauggccgggaacggcggggacgcggcccucgcccugcugcuccuggaccggcugaaccagcucgaguccaagaugagcggcaaggggcagcagcagcagugccagaccgugaccaagaaguccgccgccgaggcgagcaagaagccgcgccagaagcgcaccgccacgaaggccuacaacgucacccaggccuucggccggcgcggccccgagcagacccaggggaacuucggcgaccaggagcugauccggcaggggaccgacuacaagcacuggccccagaucgcccaguucgcgcccuccgccagcgccuucuucggcaugucccgcaucgggauggaggugacgccgagcggcaccuggcugaccuacaccggcgccaucaagcucgacgacaaggaccccaacuucaaggaccaggugauccugcugaacaagcacaucgacgccuacaagacguucccgcccaccgagcccaagaaggacaagaagaagaaggcggacgagacccaggcccucccccagcggcagaagaagcagcagaccgucacgcugcugcccgccgccgaccucgacgacuucuccaagcagcugcagcagagcauguccagcgcggacuccacccaggccuga

SEQ ID NO: 17314 - RNA, 1260 nt, Artificial Sequence
  SARS-CoV-2__MT834281.1__nucleocapsid protein (N) CDS gc
augagcgacaacggcccccagaaccagcgcaacgccccgcggaucaccuucgggggccccuccgacagcaccggguccaaccagaacggcgagcgcagcggggcccgguccaagcagcgccggccccagggccugcccaacaacacggcgagcugguucaccgcccucacccagcacggcaaggaggaccugaaguucccgcgcgggcagggcgugcccaucaacaccaacuccagccccgacgaccagaucggguacuaccggcgcgccacgcggcgcauccggggcggggacggcaagaugaaggaccugagcccccgcugguacuucuacuaccucggcaccgggccggaggccggccugcccuacggggccaacaaggacggcaucaucugggucgcgaccgagggcgcccugaacacccccaaggaccacaucgggacgcggaaccccgccaacaacgccgcgaucgugcuccagcugccgcagggcaccacccugcccaagggguucuacgccgagggcucccgcgggggcucccaggccagcucccggagcuccagccgcucccggaacagcucccgcaacagcacccccggcagcucccggcgcacgagccccgcccggauggccgggaacggcggggacgcggcccucgcccugcugcuccuggaccgccugaaccagcucgaguccaagaugagcggcaaggggcagcagcagcagggccagaccgugaccaagaaguccgccgccgaggcgagcaagaagccgcgccagaagcggaccgccacgaaggccuacaacgucacccaggccuucggccgccgggggcccgagcagacccagggcaacuucggggaccaggagcugauccgccagggcaccgacuacaagcacuggccccagaucgcccaguucgcgcccuccgccagcgccuucuucgggaugucccggaucggcauggaggugacgccgagcggcaccuggcugaccuacaccggggccaucaagcucgacgacaaggaccccaacuucaaggaccaggugauccugcugaacaagcacaucgacgccuacaagacguucccgcccaccgagcccaagaaggacaagaagaagaaggcggacgagacccaggcccucccccagcgccagaagaagcagcagaccgucacgcugcugcccgccgccgaccucgacgacuucuccaagcagcugcagcagagcauguccagcgcggacuccacccaggccuga

SEQ ID NO: 17315 - RNA, 1260 nt, Artificial Sequence
  SARS-CoV-2__MT834348.1__nucleocapsid protein (N) CDS gc
augagcgacaacggcccccagaaccagcgcaacgccccgcggaucaccuucgggggccccuccgacagcaccggguccaaccagaacggcgagcgcagcggggcccgguccaagcagcgccggccccagggccugcccaacaacacggcgagcugguucaccgcccucacccagcacggcaaggaggaccugaaguucccgcgcgggcagggcgugcccaucaacaccaacuccagccccgacgaccagaucggguacuaccggcgcgccacgcggcgcauccggggcggggacggcaagaugaaggaccugagcccccgcugguacuucuacuaccucggcaccgggccggaggucggccugcccuacggggccaacaaggacggcaucaucuggguggccaccgagggcgcgcugaacacccccaaggaccacaucgggacgcggaaccccgccaacaacgccgccaucgugcuccagcugccgcagggcaccacccugcccaagggguucuacgcggagggcucccgcgggggcucccaggccagcucccggagcuccagccgcucccggaacagcucccgcaacagcacccccggcagcuccaagcggacgagccccgcccgcauggccgggaacggcggggacgccgcgcucgcccugcugcuccuggaccggcugaaccagcucgaguccaagaugagcggcaaggggcagcagcagcagggccagaccgucaccaagaaguccgccgccgaggccagcaagaagccgcgccagaagcgcaccgcgacgaaggccuacaacgugacccaggccuucggccggcgcgggcccgagcagacccagggcaacuucggggaccaggagcugauccggcagggcaccgacuacaagcacuggccccagaucgcccaguucgcccccuccgcgagcgccuucuucgggaugucccgcaucggcauggaggugacgccgagcggcaccuggcugaccuacaccggggccaucaagcucgacgacaaggaccccaacuucaaggaccaggucauccugcugaacaagcacaucgacgccuacaagacguucccgcccaccgagcccaagaaggacaagaagaagaaggccgacgagacccaggcgcucccccagcggcagaagaagcagcagaccgugacgcugcugcccgccgccgaccucgacgacuucuccaagcagcugcagcagagcauguccagcgccgacuccacccaggcguga

SEQ ID NO: 17316 - RNA, 1260 nt, Artificial Sequence
  SARS-CoV-2__MT834661.1__nucleocapsid protein (N) CDS gc
augagcgacaacggcccccagaaccagcgcaacgccccgcggaucaccuucgggggccccuccgacagcaccggguccaaccagaacggcgagcgcagcggggcccgguccaagcagcgccggccccagggccugcccaacaacacggcgagcugguucaccgcccucacccagcacggcaaggaggaccugaaguucccgcgcgggcagggcgugcccaucaacaccaacuccagccccgacgaccagaucggguacuaccggcgcgccacgcggcgcauccggggcggggacggcaagaugaaggaccugagcccccgcugguacuucuacuaccucggcaccgggccggaggccggccugcccuacggggccaacaaggacggcaucaucugggucgcgaccgagggcgcccugaacacccccaaggaccacaucgggacgcggaaccccgccaacaacgccgcgaucgugcuccagcugccgcagggcaccacccugcccaagggguucuacgccgagggcucccgcgggggcucccagaccagcucccggagcuccagccgcucccggaacagcucccgcaacagcacgcccggcagcucccgggggaccagccccgcccgcauggccggcaacgggggcgacgccgcgcucgcccugcugcuccuggaccggcugaaccagcucgaguccaagaugagcgggaagggccagcagcagcagggccagaccgugaccaagaaguccgccgccgaggccagcaagaagccgcgccagaagcgcacggcgaccaaggccuacaacgucacccaggccuucgggcggcgcggccccgagcagacccaggggaacuucggcgaccaggagcugauccggcaggggacggacuacaagcacuggccccagaucgcccaguucgcccccuccgcgagcgccuucuucggcaugucccgcaucggcauggaggugaccccgagcgggaccuggcugaccuacacgggcgccaucaagcucgacgacaaggaccccaacuucaaggaccaggugauccugcugaacaagcacaucgacgccuacaagaccuucccgcccaccgagcccaagaaggacaagaagaagaaggccgacgagacccaggcgcucccccagcggcagaagaagcagcagacggucacccugcugcccgccgccgaccucgacgacuucuccaagcagcugcagcagagcauguccagcgccgacuccacccaggcguga

SEQ ID NO: 17317 - RNA, 1260 nt, Artificial Sequence
  SARS-CoV-2__MT834687.1__nucleocapsid protein (N) CDS gc
augagcgacaacggcccccagaaccagcgcaacgccccgcggaucaccuucgggggccccuccgacagcaccggguccaaccagaacggcgagcgcagcggggcccgguccaagcagcgccggccccagggccugcccaacaacacggcgagcugguucaccgcccucacccagcacggcaaggaggaccugaaguucccgcgcgggcagggcgugcccaucaacaccaacuccagccccgacgaccagaucggguacuaccggcgcgccacgcggcgcauccggggcggggacggcaagaugaaggaccugagcccccgcugguacuucuacuaccucggcaccgggccggaggccggccugcccuacggggccaacaaggacggcaucaucugggucgcgaccgagggcgcccugaacacccccaaggaccacaucgggacgcggaaccccgccaacaacgccgcgaucgugcuccagcugccgcagggcaccacccugcccaagggguucuacgccgagggcucccgcgggggcucccaggccagcucccggagcuccagccgcucccggaacagcucccgcaacagcacccccggcagcucccgggggacgagccucgccaagauggccggcaacgggggcgacgcggcccuggcccugcuccugcuggaccgccucaaccagcuggaguccaagaugagcgggaagggccagcagcagcagggccagaccgugaccaagaaguccgccgccgaggcgagcaagaagccccggcagaagcgcaccgccacgaaggccuacaacgucacccaggccuucgggcgccggggcccggagcagacccaggggaacuucggcgaccaggagcugauccgccaggggaccgacuacaagcacuggccccagaucgcccaguucgcgcccuccgccagcgccuucuucggcaugucccggaucggcauggaggugacgcccagcgggaccuggcucaccuacaccggcgccaucaagcuggacgacaaggacccgaacuucaaggaccaggugauccugcucaacaagcacaucgacgccuacaagacguucccgcccaccgagcccaagaaggacaagaagaagaaggcggacgagacccaggcccugucccagcgccagaagaagcagcagaccgucacgcugcuccccgccgccgaccuggacgacuucagcaagcagcugcagcaguccaugagcuccgcggacagcacccaggccuga

SEQ ID NO: 17318 - RNA, 1260 nt, Artificial Sequence
  SARS-CoV-2__MT834689.1__nucleocapsid protein (N) CDS gc
augagcgacaacggcccccagaaccagcgcaacgccccgcggaucaccuucgggggccccuccgacagcaccggguccaaccagaacggcgagcgcagcggggcccgguccaagcagcgccggccccagggccugcccaacaacacggcgagcugguucaccgcccucacccagcacggcaaggaggaccugaaguucccgcgcgggcagggcgugcccaucaacaccaacuccagccccgacgaccagaucggguacuaccggcgcgccacgcggcgcauccggggcggggacggcaagaugaaggaccugagcccccgcugguacuucuacuaccucggcaccgggccggaggccggccugcccuacggggccaacaaggacggcaucaucugggucgcgaccgagggcgcccugaacacccccaaggaccacaucgggacgcggaaccccgccaacaacgccgcgaucgugcuccagcugccgcagggcaccacccugcccaagggguucuacgccgagggcagccgcgggggcucccaggccagcucccggagcuccagccgcaaccggaacuccagccgcaacuccacccccggcagcagccgggggacgucccccgcccgcauggccggcaacgggggcgacgcggcccucgcccugcugcuccuggaccggcugaaccagcucgagagcaagauguccgggaagggccagcagcagcagggccagaccgugaccaagaaguccgccgccgaggcguccaagaagccgcgccagaagcgcaccgccacgaaggccuacaacgucacccaggccuucgggcggcgcggccccgagcagacccaggggaacuucggcgaccaggagcugauccggcaggggaccgacuacaagcacuggccccagaucgcccaguucgcgcccagcgccuccgccuucuucggcaugagccgcaucggcauggaggugacgccguccgggaccuggcugaccuacaccggcgccaucaagcucgacgacaaggaccccaacuucaaggaccaggugauccugcugaacaagcacaucgacgccuacaagacguucccgcccaccgagcccaagaaggacaagaagaagaaggcggacgagacccaggcccucccccagcggcagaagaagcagcagaccgucacgcugcugcccgccgccgaccucgacgacuucagcaagcagcugcagcaguccaugagcuccgcggacagcacccaggccuga

SEQ ID NO: 17319 - RNA, 1260 nt, Artificial Sequence
  SARS-CoV-2__MT834715.1__nucleocapsid protein (N) CDS gc
augagcgacaacggcccccagaaccagcgcaacgccccgcggaucaccuucgggggccccuccgacagcaccggguccaaccagaacggcgagcgcagcggggcccgguccaagcagcgccggccccagggccugcccaacaacacggcgagcugguucaccgcccucacccagcacggcaaggaggaccugaaguucccgcgcgggcagggcgugcccaucaacaccaacuccagccccgacgaccagaucggguacuaccggcgcgccacgcggcgcauccggggcggggacggcaagaugaaggaccugagcccccgcugguacuucuacuaccucggcaccgggccggaggccggccugcccuacggggccaacaaggacggcaucaucugggucgcgaccgagggcgcccugaacacccccaaggaccacaucgggacgcggaaccccgccaacaacgccgcgaucgugcuccagcugccgcagggcaccacccugcccaagggguucuacgccgagggcucccgcgggggcucccaggccagcucccggagcuccagccgcucccggaacagcucccgcaacagcacccccggcagcucccgggggacgagccccggccgcauggccgggaacggcggggacgccgcgcucgcccugcugcuccuggaccggcugaaccagcucgaguccaagaugagcggcaagggccagcagcagcaggggcagaccgugaccaagaaguccgccgccgaggccagcaagaagccgcgccagaagcgcaccgcgacgaaggccuacaacgucacccaggccuucggccggcgcgggcccgagcagacccagggcaacuucggggaccaggagcugauccggcagggcaccgacuacaagcacuggccccagaucgcccaguucgcccccuccgcgagcgccuucuucggcaugucccgcaucgggauggaggugacgccgagcggcaccuggcugaccuacaccggggccaucaagcucgacgacaaggaccccaacuucaaggaccaggugauccugcugaacaagcacaucgacgccuacaagacguucccgcccaccgagcccaagaaggacaagaagaagaaggccgacgagacccaggcgcucccccagcggcagaagaagcagcagaccgucauccugcugcccgccgccgaccucgacgacuucuccaagcagcugcagcagagcauguccagcgccgacuccacgcaggcguga

SEQ ID NO: 17320 - RNA, 1260 nt, Artificial Sequence
  SARS-CoV-2__MT827212.1__nucleocapsid protein (N) CDS gc
augagcgacaacggcccccagaaccagcgcaacgccccgcggaucaccuucgggggccccuccgacagcaccggguccaaccagaacggcgagcgcagcggggcccgguccaagcagcgccggccccagggccugcccaacaacacggcgagcugguucaccgcccucacccagcacggcaaggaggaccugaaguucccgcgcgggcagggcgugcccaucaacaccaacuccagccccgacgaccagaucggguacuaccggcgcgccacgcggcgcauccggggcggggacggcaagaugaaggaccugagcccccgcugguacuucuacuaccucggcaccgggccggaggccggccugcccuacggggccaacaaggacggcaucaucugggucgcgaccgagggcgcccugaacacccccaaggaccacaucgggacgcggaaccccgccaacaacgccgcgaucgugcuccagcugccgcagggcaccacccugcccaagggguucuacgccgagggcucccgcgggggcucccaggccagcucccggagcuccagccgcucccggaacagcucccgcaacagcacccccggcagcucccgggggacgagccccgcccgcauggccggcaacgggggcgacgcggcccucgcccugcugcuccuggaccggcugaaccagcucgaguccaagaugagcgggaagggccagcagcagcagggccagaccgugaccaagaaguccgucgccgaggccagcaagaagccgcgccagaagcgcaccgcgacgaaggccuacaacgugacccaggccuucgggcggcgcggccccgagcagacccaggggaacuucggcgaccaggagcugauccggcaggggaccgacuacaagcacuggccccagaucgcccaguucgcccccuccgcgagcgccuucuucggcaugucccgcaucggcauggaggugacgccgagcgggaccuggcugaccuacaccggcgccaucaagcucgacgacaaggaccccaacuucaaggaccaggucauccugcugaacaagcacaucgacgccuacaagacguucccgcccaccgagcccaagaaggacaagaagaagaaggccgacgagacccaggcgcucccccagcggcagaagaagcagcagaccgugacgcugcugcccgccgccgaccucgacgacuucuccaagcagcugcagcagagcauguccagcgccgacuccacccaggcguga

SEQ ID NO: 17321 - RNA, 1260 nt, Artificial Sequence
  SARS-CoV-2__MT825091.1__nucleocapsid protein (N) CDS gc
augagcgacaacggcccccagaaccagcagaacgccccgcgcaucaccuucgggggccacuccgacagcaccggguccaaccagaacggcgagcggagcggggcccgcuccaagcagcggcgcccccagggccugcccaacaacacggcgagcugguucaccgcccucacccagcacggcaaggaggaccugaaguucccccgggggcagggcgugccgaucaacaccaacuccagccccgacgaccagaucggguacuaccgccgggccacgcgccggauccgcggcggggacggcaagaugaaggaccugagcccccggugguacuucuacuaccucggcaccgggcccgaggccggccugccguacggggccaacaaggacggcaucaucugggucgcgaccgagggcgcccugaacacccccaaggaccacaucgggacgcucaaccccgccaacaacgccgcgaucgugcugcagcugccccagggcaccacccucccgaagggguucuacgccgagggcagccgcgggggcucccaggccagcucccggagcuccagccgcucccggaacagccugcgcaacuccacccccggcagcagccgggggacgucccccgcccgcauggccggcaacgggggcgacgcggcccuggcccuccugcugcucgaccggcugaaccagcuggagagcaagauguccgggaagggccagcagcagcagggccagaccgugaccaagaaguccgccgccgaggcguccaagaagccccgccagaagcggaccgccacgaaggccuacaacgucacccaggccuucgggcgccgcggcccggagcagacccaggggaacuucggcgaccaggagcucauccggcaggggaccgacuacaagcacuggccccagaucgcccaguucgcgcccagcgccuccgccuucuucggcaugagccgcaucggcauggaggugacgcccuccgggaccuggcugaccuacaccggcgccaucaagcuggacgacaaggacccgaacuucaaggaccaggugauccuccugaacaagcacaucgacgccuacaagacguucccgcccaccgagcccaagaaggacaagaagaagaaggcggacgagacccaggcccugccccagcggcagaagaagcagcucaccgucacgcugcugcccgccgccgaccucgacgacuucagcaagcagcugcagcaguccaugagcuccgcggacagcacccaggccuga

SEQ ID NO: 17322 - RNA, 1260 nt, Artificial Sequence
  SARS-CoV-2__MT821594.1__nucleocapsid protein (N) CDS gc
augagcgacaacggcccccagaaccagcgcaacgccccgcggaucaccuucgggggccccuccgacagcaccggguccaaccagaacggcgagcgcagcggggcccgguccaagcagcgccggccccagggccugcccaacaacacggcgagcugguucaccgcccucacccagcacggcaaggaggaccugaaguucccgcgcgggcagggcgugcccaucaacaccaacuccagccccgacgaccagaucggguacuaccggcgcgccacgcggcgcauccggggcggggacggcaagaugaaggaccugagcccccgcugguacuucuacuaccucggcaccgggccggaggccggccugcccuacggggccaacaaggacggcaucaucugggucgcgaccgagggcgcccugaacacccccaaggaccacaucgggacgcggaaccccgccaacaacgccgcgaucgugcuccagcugccgcagggcaccacccugcccaagggguucuacgccgagggcucccgcgggggcucccaggccagcucccggagcuccagccgcucccggaacagcucccgcaacagcacccccggcagcucccgggggacgagccccgcccgcauggccggcaacgggggcgacgcggcccucgcccugcugcuccuggaccggcugaaccagcucgaguccaagaugagcgggaagggccagcagcagcagggccagaccgugaccaagaaguccgccgccgaggcgagcaagaagccgcgccagaagcgcaccgccacgaaggccuacaacgucacccaggccuucgggcggcgcggccccgagcagacccaggggaacuucggcgaccaggagcugauccggcaggggaccgacuacaagcacuggccccagaucgcccaguucgcgcccuccgccagcgccuucuucggcaugucccgcaucggcauggaggugacgccgagcgggaccuggcugaccuacaccggcgccaucaagcucgacgacaaggaccccaacuucaaggaccaggugauccugcugaacaagcacaucgacgccuacaagacguuccccuccaccgagcccaagaaggacaagaagaagaaggcggacgagacccaggcccucccgcagcggcagaagaagcagcagaccgucacgcugcugcccgccgccgaccucgacgacuucagcaagcagcugcagcaguccaugagcuccgcggacagcacccaggccuga

SEQ ID NO: 17323 - RNA, 1260 nt, Artificial Sequence
  SARS-CoV-2__MT821646.1__nucleocapsid protein (N) CDS gc
augagcgacaacggcccccagaaccagcgcaacgccccgcggaucaccuucgggggccccuccgacagcaccggguccaaccagaacggcgagcgcagcggggcccgguccaagcagcgccggccccagggccugcccaacaacacggcgagcugguucaccgcccucacccagcacggcaaggaggaccugaaguucccgcgcgggcagggcgugcccaucaacaccaacuccagccccgacgaccagaucggguacuaccggcgcgccacgcggcgcauccggggcggggacggcaagaugaaggaccugagcccccgcugguacuucuacuaccucggcaccgggccggaggccggccugcccuacggggccaacaaggacggcaucaucugggucgcgaccgagggcgcccugaacacccccaaggaccacaucgggacgcggaaccccgccaacaacgccgcgaucgugcuccagcugccgcagggcaccacccugcccaagggguucuacgccgagggcucccgcgggggcucccaggccagcucccggagcuccagccgcucccggaacagcucccgcaacagcacccccggcagcuccaaggggacgagccccgcccggauggccggcaacgggggcgacgcggcccucgcccugcugcuccuggaccgccugaaccagcucgaguccaagaugagcgggaagggccagcagcagcagggccagaccgugaccaagaaguccgccgccgaggcgagcaagaagccgcggcagaagcgcaccgccacgaaggccuacaacgucacccaggccuucgggcgccggggccccgagcagacccaggggaacuucggcgaccaggagcugauccgccaggggaccgacuacaagcacuggccccagaucgcccaguucgcgcccuccgccagcgccuucuucggcaugucccggaucggcauggaggugacgccgagcgggaccuggcugaccuacaccggcgccaucaagcucgacgacaaggaccccaacuucaaggaccaggugauccugcugaacaagcacaucgacgccuacaagacguucccgcccaccgagcccaagaaggacaagaagaagaaggcggacgagacccaggcccucccccagcgccagaagaagcagcagaccgucacgcugcugcccgccgccgaccucgacgacuucuccaagcagcugcagcagagcauguccagcgcggacuccacccaggccuga

SEQ ID NO: 17324 - RNA, 1260 nt, Artificial Sequence
  SARS-CoV-2__MT821766.1__nucleocapsid protein (N) CDS gc
augagcgacaacggcccccagaaccagcgcaacgccccgcggaucaccuucgggggccccuccgacagcaccggguccaaccagaacggcgagcgcagcggggcccgguccaagcagcgccggccccagggccugcccaacaacacggcgagcugguucaccgcccucacccagcacggcaaggaggaccugaaguucccgcgcgggcagggcgugcccaucaacaccaacuccagccccgacgaccagaucggguacuaccggcgcgccacgcggcgcauccggggcggggacggcaagaugaaggaccugagcccccgcugguacuucuacuaccucggcaccgggccggaggccggccugcccuacggggccaacaaggacggcaucaucugggucgcgaucgagggcgcccugaacacccccaaggaccacaucgggacccggaaccccgccaacaacgccgcgaucgugcuccagcugccgcagggcacgacccugcccaagggguucuacgccgagggcucccgcgggggcucccaggccagcucccggagcuccagccgcucccggaacagcucccgcaacagcacccccggcagcucccgggggaccagccccgcccgcauggccggcaacgggggcgacgcggcccucgcccugcugcuccuggaccggcugaaccagcucgaguccaagaugagcgggaagggccagcagcagcagggccagacggugaccaagaaguccgccgccgaggcgagcaagaagccgcgccagaagcgcaccgccaccaaggccuacaacgucacgcaggccuucgggcggcgcggccccgagcagacccaggggaacuucggcgaccaggagcugauccggcaggggaccgacuacaagcacuggccccagaucgcccaguucgcgcccuccgccagcgccuucuucggcaugucccgcaucggcauggaggugaccccgagcgggacguggcugaccuacaccggcgccaucaagcucgacgacaaggaccccaacuucaaggaccaggugauccugcugaacaagcacaucgacgccuacaagaccuucccgcccacggagcccaagaaggacaagaagaagaaggcggacgagacccaggcccucccccagcggcagaagaagcagcagaccgucacccugcugcccgccgccgaccucgacgacuucuccaagcagcugcagcagagcauguccagcgcggacuccacgcaggccuga

SEQ ID NO: 17325 - RNA, 1260 nt, Artificial Sequence
  SARS-CoV-2__MT821773.1__nucleocapsid protein (N) CDS gc
augagcgacaacggcccccagaaccagcgcaacgccccgcggaucaccuucgggggccccuccgacagcaucggguccaaccagaacggcgagcgcagcggggcccgguccaagcagcgccggccccagggccugcccaacaacaccgcgagcugguucacggcccucacccagcacggcaaggaggaccugaaguucccgcgcgggcagggcgugcccaucaacaccaacuccagccccgacgaccagaucggguacuaccggcgcgccacccggcgcauccggggcggggacggcaagaugaaggaccugagcccccgcugguacuucuacuaccucggcacggggccggaggccggccugcccuacggggccaacaaggacggcaucaucugggucgcgaccgagggcgcccugaacacccccaaggaccacaucgggacccggaaccccgccaacaacgccgcgaucgugcuccagcugccgcagggcacgacccugcccaagggguucuacgccgagggcucccgcgggggcucccaggccagcucccggagcuccagccgcucccggaacagcucccgcaacagcacccccggcagcucccgggggaccagccccgcccgcauggccggcaacgggggcgacgcggcccucgcccugcugcuccuggaccggcugaaccagcucgaguccaagaugagcgggaagggccagcagcagcagggccagacggugaccaagaaguccgccgccgaggcgagcaagaagccgcgccagaagcgcaccgccaccaaggccuacaacgucacgcaggccuucgggcggcgcggccccgagcagacccaggggaacuucggcgaccaggagcugauccggcaggggaccgacuacaagcacuggccccagaucgcccaguucgcgcccuccgccagcgccuucuucggcaugucccgcaucggcauggaggugaccccgagcgggacguggcugaccuacaccggcgccaucaagcucgacgacaaggaccccaacuucaaggaccaggugauccugcugaacaagcacaucgacgccuacaagaccuucccgcccacggagcccaagaaggacaagaagaagaaggcggacgagacccaggcccucccccagcggcagaagaagcagcagaccgucacccugcugcccgccgccgaccucgacgacuucuccaagcagcugcagcagagcauguccagcgcggacuccacgcaggccuga

SEQ ID NO: 17326 - RNA, 1260 nt, Artificial Sequence
  SARS-CoV-2__MT821776.1__nucleocapsid protein (N) CDS gc
augagcgacaacggcccccagaaccagcgcaacgccccgcggaucaccuucgggggccccuccgacagcaccggguccaaccagaacggcgagcgcagcggggcccgguccaagcagcgccggccccagggccugcccaacaacacggcgagcugguucaccgcccucacccagcacggcaaggaggaccugaaguucccgcgcgggcagggcgugcccaucaacaccaacuccagccccgacgaccagaucggguacuaccggcgcgccacgcggcgcauccggggcggggacggcaagaugaaggaccugagcccccgcugguacuucuacuaccucggcaccgggccggaggccggccugcccuacggggccaacaaggacggcaucaucugggucgcgaccgagggcgccuucaacacccccaaggaccacaucgggacgcggaaccccgccaacaacgccgcgaucgugcugcagcucccgcagggcaccacccugcccaagggguucuacgccgagggcucccgcgggggcucccaggccagcucccggagcuccagccgcucccggaacagcucccgcaacagcacccccggcagcucccgggggacgagccccgcccgcauggccggcaacgggggcgacgcggcccuggcccuccugcugcucgaccggcugaaccagcuggaguccaagaugagcgggaagggccagcagcagcagggccagaccgugaccaagaaguccgccgccgaggcgagcaagaagccgcgccagaagcgcaccgccacgaaggccuacaacgucacccaggccuucgggcggcgcggccccgagcagacccaggggaacuucggcgaccaggagcucauccggcaggggaccgacuacaagcacuggccccagaucgcccaguucgcgcccuccgccagcgccuucuucggcaugucccgcaucggcauggaggugacgccgagcgggaccuggcugaccuacaccggcgccaucaagcuggacgacaaggaccccaacuucaaggaccaggugauccuccugaacaagcacaucgacgccuacaagacguucccgcccaccgagcccaagaaggacaagaagaagaaggcggacgagacccaggcccugccccagcggcagaagaagcagcagaccgucacgcuccugcccgccgccgaccuggacgacuucuccaagcagcuccagcagagcauguccagcgcggacuccacccaggccuga

SEQ ID NO: 17327 - RNA, 1260 nt, Artificial Sequence
  SARS-CoV-2__MT821778.1__nucleocapsid protein (N) CDS gc
augagcgacaacggcccccagaaccagcgcaacgccccgcggaucaccuucgggggccccuccgacagcaccggguccaaccagaacggcgagcgcagcggggcccgguccaagcagcgccggccccagggccugcccaacaacacggcgagcugguucaccgcccucacccagcacggcaaggaggaccugaaguucccgcgcgggcagggcgugcccaucaacaccaacuccagccccgacgaccagaucggguacuaccggcgcgccacgcggcgcauccggggcggggacggcaagaugaaggaccugagcccccgcugguacuucuacuaccucggcaccgggccggaggccggccugcccuacggggccaacaaggacggcaucaucugggucgcgaccgagggcgcccugaacacccccaaggaccacaucgggacgcggaaccccgccaacaacgccgcgaucgugcuccagcugccgcagggcaccacccugcccaagggguucuacgccgagggcucccgcgggggcucccaggccagcuccugcagcuccagccggucccgcaacagcucccggaacagcacccccggcagcucccgcgggacgagccccgcccggauggccggcaacgggggcgacgcggcccucgcccugcugcuccuggaccgccugaaccagcucgaguccaagaugagcgggaagggccagcagcagcagggccagaccgugaccaagaaguccgccgccgaggcgagcaagaagccgcggcagaagcgcaccgccacgaaggccuacaacgucacccaggccuucgggcgccggggccccgagcagacccaggggaacuucggcgaccaggagcugauccgccaggggaccgacuacaagcacuggccccagaucgcccaguucgcgcccuccgccagcgccuucuucggcaugucccggaucggcauggaggugacgccgagcgggaccuggcugaccuacaccggcgccaucaagcucgacgacaaggaccccaacuucaaggaccaggugauccugcugaacaagcacaucgacgccuacaagacguucccgcccaccgagcccaagaaggacaagaagaagaaggcggacgagacccaggcccucccccagcgccagaagaagcagcagaccgucacgcugcugcccgccgccgaccucgacgacuucuccaagcagcugcagcagagcauguccagcgcggacuccacccaggccuga

SEQ ID NO: 17328 - RNA, 1260 nt, Artificial Sequence
  SARS-CoV-2__MT820465.1__nucleocapsid protein (N) CDS gc
augagcgacaacggcccccagaaccagcgcaacgccccgcggaucaccuucgggggccccuccgacagcaccggguccaaccagaacggcgagcgcagcggggcccgguccaagcagcgccggccccagggccugcccaacaacacggcgagcugguucaccgcccucacccagcacggcaaggaggaccugaaguucccgcgcgggcagggcgugcccaucaacaccaacuccagccccgacgaccagaucggguacuaccggcgcgccacgcggcgcauccggggcggggacggcaagaugaaggaccugagcccccgcugguacuucuacuaccucggcaccgggccggaggccggccugcccuacggggccaacaaggacggcaucaucugggucgcgaccgagggcgcccugaacacccccaaggaccacaucgggacgcggaaccccgccaacaacgccgcgaucgugcuccagcugccgcagggcaccacccugcccaagggguucuacgccgagggcucccgcgggggcucccaggccagcucccggagcuccagccgcucccggaacagcucccgcaacagcacccccggcagcuccaagcggacgagccccgcccgcauggccgggaacggcggggacgcggcccucgcccugcugcuccuggaccggcugaaccagcucgaguccaagaugagcggcaaggggcagcagcagcagggccagaccgugaccaagaaguccgccgccgaggcgagcaagaagccgcgccagaagcgcaccgccacgaaggccuacaacgucacccaggccuucggccggcgcgggcccgagcagacccagggcaacuucggggaccaggagcugauccggcagggcaccgacuacaagcacuggccccagaucgcccaguucgcgcccuccgccagcgccuucuucgggaugucccgcaucggcauggaggugacgccgagcggcaccuggcugaccuacaccggggccaucaagcucgacgacaaggaccccaacuucaaggaccaggugauccugcugaacaagcacaucgacgccuacaagacguucccgcccaccgagcccaagauggacaagaagaagaaggcggacgagacccaggcccucccccagcggcagaagaagcagcagaccgucacgcugcugcccgccgccgaccucgacgacuucuccaagcagcugcagcagagcauguccagcgcggacuccacccaggccuga

SEQ ID NO: 17329 - RNA, 1260 nt, Artificial Sequence
  SARS-CoV-2__MT810677.1__nucleocapsid protein (N) CDS gc
augagcgacaacggccccaagaaccagcgcaacgccccgcggaucaccuucgggggccccuccgacagcaccggguccaaccagaacggcgagcgcagcggggcccgguccaagcagcgccggccccagggccugcccaacaacacggcgagcugguucaccgcccucacccagcacggcaaggaggaccugaaguucccgcgcgggcagggcgugcccaucaacaccaacuccagccccgacgaccagaucggguacuaccggcgcgccacgcggcgcauccggggcggggacggcaagaugaaggaccugagcccccgcugguacuucuacuaccucggcaccgggccggaggccggccugcccuacggggccaacaaggacggcaucaucugggucgcgaccgagggcgcccugaacacccccaaggaccacaucgggacgcggaaccccgccaacaacgccgcgaucgugcuccagcugccgcagggcaccacccugcccaagggguucuacgccgagggcagccgcgggggcucccaggccagcucccggagcuccagccgcucccggaacagccuccgcaacuccacccccggcagcagccgggggacgucccccgcccgcauggccggcaacgggggcgacgcggcccuggcccugcuccugcuggaccggcucaaccagcuggagagcaagauguccgggaagggccagcagcagcagggccagaccgugaccaagaaguccgccgccgaggcguccaagaagccgcgccagaagcgcaccgccacgaaggccuacaacgucacccaggccuucgggcggcgcggccccgagcagacccaggggaacuucggcgaccaggagcugauccggcaggggaccgacuacaagcacuggccccagaucgcccaguucgcgcccagcgccuccgccuucuucggcaugagccgcaucggcauggaggugacgccguccgggaccuggcucaccuacaccggcgccaucaagcuggacgacaaggaccccaacuucaaggaccaggugauccugcucaacaagcacaucgacgccuacaagacguucccgcccaccgagcccaagaaggacaagaagaagaaggcggacgagacccaggcccugccccagcggcagaagaagcagcagaccgucacgcugcuccccgccgccgaccuggacgacuucagcaagcagcugcagcaguccaugagcuccgcggacagcacccaggccuga

SEQ ID NO: 17330 - RNA, 1260 nt, Artificial Sequence
  SARS-CoV-2__MT810703.1__nucleocapsid protein (N) CDS gc
augagcgacaacggcccccagaaccagcgcaacgccccgcggaucaccuucgggggccccuccgacagcaccggguccaaccagaacggcgagcgcagcggggcccgguccaagcagcgccggccccagggccugcccaacaacacggcgagcugguucaccgcccucacccagcacggcaaggaggaccugaaguucccgcgcgggcagggcgugcccaucaacaccaacuccagccccgacgaccagaucggguacuaccggcgcgccacgcggcgcauccggggcggggacggcaagaugaaggaccugagcccccgcugguacuucuacuaccucggcaccgggccggaggccggccugcccuacggggccaacaaggacggcaucaucugggucgcgaccgagggcgcccugaacacccccaaggaccacaucgggacgcggaaccccgccaacaacgccgcgaucgugcuccagcugccgcagggcaccacccugcccaagggguucuacgccgagggcagccgcgggggcucccaggccagcucccggagcuccagccgcucccggaacagccuccgcaacuccacccccggcagcagccgggggacgucccccgcccgcauggccggcaacgggggcgacgcggcccuggcccugcuccugcuggaccggcucaaccagcuggagagcaagauguccgggaagggccagcagcagcagggccagaccgugaccaagaaguccgccgccgaggcguccaagaagccgcgccagaagcgcaccgccacgaaggccuacaacgucacccaggccuucgggcggcgcggccccgagcagacccaggggaacuucggcgaccaggagcugauccggaaggggaccgacuacaagcacuggccccagaucgcccaguucgcgcccagcgccuccgccuucuucggcaugagccgcaucggcauggaggugacgccguccgggaccuggcucaccuacaccggcgccaucaagcuggacgacaaggaccccaacuucaaggaccaggugauccugcucaacaagcacaucgacgccuacaagacguucccgcccaccgagcccaagaaggacaagaagaagaaggcggacgagacccaggcccugccccagcggcagaagaagcagcagaccgucacgcugcuccccgccgccgaccuggacgacuucagcaagcagcugcagcaguccaugagcuccgcggacagcacccaggccuga

SEQ ID NO: 17331 - RNA, 1260 nt, Artificial Sequence
  SARS-CoV-2__MT810718.1__nucleocapsid protein (N) CDS gc
augagcgacaacggcccccagaaccagcgcaacgccccgcggaucaccuucgggggccccuccgacagcaccggguccaaccagaacggcgagcgcagcggggcccgguccaagcagcgccggccccagggccugcccaacaacacggcgagcugguucaccgcccucacccagcacggcaaggaggaccugaaguucccgcgcgggcagggcgugcccaucaacaccaacuccagccccgacgaccagaucggguacuaccggcgcgccacgcggcgcauccggggcggggacggcaagaugaaggaccugagcccccgcugguacuucuacuaccucggcaccgggccggaggccggccugcccuacggggccaacaaggacggcaucaucugggucgcgaccgagggcgcccugaacacccccaaggaccacaucgggacgcggaaccccgccaacaacgccgcgaucgugcuccagcugccgcagggcaccacccugcccaagggguucuacgccgagggcagccgcgggggcucccaggccagcucccggagcuccagccgcucccggaacagccuccgcaacuccacccccggcagcagccgggggacgucccccgcccgcauggccggcaacgggggcgacgcggcccuggcccugcuccugcuggaccggcucaaccagcuggagagcaagauguccgggaagggccagcagcagcagggccagaccgugaccaagaaguccgccgccgaggcguccaagaagccgcgccagaagcgcaccgccacgaaggccuacaacgucacccaggccuucgggcggcgcggccccgagcagacccaggggaacuucggcgaccacgagcugauccggcaggggaccgacuacaagcacuggccccagaucgcccaguucgcgcccagcgccuccgccuucuucggcaugagccgcaucggcauggaggugacgccguccgggaccuggcucaccuacaccggcgccaucaagcuggacgacaaggaccccaacuucaaggaccaggugauccugcucaacaagcacaucgacgccuacaagacguucccgcccaccgagcccaagaaggacaagaagaagaaggcggacgagacccaggcccugccccagcggcagaagaagcagcagaccgucacgcugcuccccgccgccgaccuggacgacuucagcaagcagcugcagcaguccaugagcuccgcggacagcacccaggccuga

SEQ ID NO: 17332 - RNA, 1260 nt, Artificial Sequence
  SARS-CoV-2__MT810839.1__nucleocapsid protein (N) CDS gc
augagcgacaacggcccccagaaccagcgcaacgccccgcggaucaccuucgggggccccuccgacagcaccggguccaaccagaacggcgagcgcagcggggcccgguccaagcagcgccggccccagggccugcccaacaacacggcgagcugguucaccgcccucacccagcacggcaaggaggaccugaaguucccgcgcgggcagggcgugcccaucaacaccaacuccagccccgacgaccagaucggguacuaccggcgcgccacgcggcgcauccggggcggggacggcaagaugaaggaccugagcccccgcugguacuucuacuaccucggcaccgggccggaggccggccugcccuacggggccaacaaggacggcaucaucugggucgcgaccgagggcgcccugaacacccccaaggaccacaucgggacgcggaaccccgccaacaacgccgcgaucgugcuccagcugccgcagggcaccacccugcccaagggguucuacgccgagggcagccgcgggggcucccaggccagcucccggagcuccagccgcucccggaacagccuccgcaacuccacccccggcagcagccgggggacgucccccgcccgcauggccggcaacgggggcgacgcggcccuggcccugcuccugcuggaccggcucaaccagcuggagagcaagauguccgggaagggccagcagcagcagggccagaccgugaccaagaaguccgccgccgaggcguccaagaagccgcgccagaagcgcaccgccacgaaggccuacaacgucacccaggccuucgggcggcgcggccccgagcagauccaggggaacuucggcgaccaggagcugauccggcaggggaccgacuacaagcacuggccccagaucgcccaguucgcgcccagcgccuccgccuucuucggcaugagccgcaucggcauggaggugaccccguccgggacguggcucaccuacaccggcgccaucaagcuggacgacaaggaccccaacuucaaggaccaggugauccugcucaacaagcacaucgacgccuacaagaccuucccgcccacggagcccaagaaggacaagaagaagaaggcggacgagacccaggcccugccccagcggcagaagaagcagcagaccgucacccugcuccccgccgccgaccuggacgacuucagcaagcagcugcagcaguccaugagcuccgcggacagcacgcaggccuga

SEQ ID NO: 17333 - RNA, 1260 nt, Artificial Sequence
  SARS-CoV-2__MT810848.1__nucleocapsid protein (N) CDS gc
augagcgacaacggcccccagaaccaccgcaacgccccgcggaucaccuucgggggccccuccgacagcaccggguccaaccagaacggcgagcgcagcggggcccgguccaagcagcgccggccccagggccugcccaacaacacggcgagcugguucaccgcccucacccagcacggcaaggaggaccugaaguucccgcgcgggcagggcgugcccaucaacaccaacuccagccccgacgaccagaucggguacuaccggcgcgccacgcggcgcauccggggcggggacggcaagaugaaggaccugagcccccgcugguacuucuacuaccucggcaccgggccggaggccggccugcccuacggggccaacaaggacggcaucaucugggucgcgaccgagggcgcccugaacacccccaaggaccacaucgggacgcggaaccccgccaacaacgccgcgaucgugcuccagcugccgcagggcaccacccugcccaagggguucuacgccgagggcagccgcgggggcucccaggccagcucccggagcuccagccgcucccggaacagccuccgcaacuccacccccggcagcagccgggggacgucccccgcccgcauggccggcaacgggggcgacgcggcccuggcccugcuccugcuggaccggcucaaccagcuggagagcaagauguccgggaagggccagcagcagcagggccagaccgugaccaagaaguccgccgccgaggcguccaagaagccgcgccagaagcgcaccgccacgaaggccuacaacgucacccaggccuucgggcggcgcggccccgagcagacccaggggaacuucggcgaccaggagcugauccggcaggggaccgacuacaagcacuggccccagaucgcccaguucgcgcccagcgccuccgccuucuucggcaugagccgcaucggcauggaggugacgccguccgggaccuggcucaccuacaccggcgccaucaagcuggacgacaaggaccccaacuucaaggaccaggugauccugcucaacaagcacaucgacgccuacaagacguucccgcccaccgagcccaagaaggacaagaagaagaaggcggacgagacccaggcccugccccagcggcagaagaagcagcagaccgucacgcugcuccccgccgccgaccuggacgacuucagcaagcagcugcagcaguccaugagcuccgcggacagcacccaggccuga

SEQ ID NO: 17334 - RNA, 1260 nt, Artificial Sequence
  SARS-CoV-2__MT810855.1__nucleocapsid protein (N) CDS gc
augagcgacaacggcccccagaaccagcgcaacgccccgcggaucaccuucgggggccccuccgacagcaccggguccaaccagaacggcgagcgcagcggggcccgguccaagcagcgccggccccagggccugcccaacaacacggcgagcugguucaccgcccucacccagcacggcaaggaggaccugaaguucccgcgcgggcagggcgugcccaucaacaccaacuccagccccgacgaccagaucggguacuaccggcgcgccacgcggcgcauccggggcggggacggcaagaugaaggaccugagcccccgcugguacuucuacuaccucggcaccgggccggaggccggccugcccuacggggccaacaaggacggcaucaucugggucgcgaccgagggcgcccugaacacccccaaggaccacaucgggacgcggaaccccgccaacaacgccgcgaucgugcuccagcugccgcagggcaccacccugcccaagggguucuacgccgagggcucccgcgggggcucccaggccagcucccggagcuccagccgcucccggaacagcucccgcaacagcacccccggcagcuccauggggacgagccccgcccggauggccggcaacgggggcgacgcggcccucgcccugcugcuccuggaccgccugaaccagcucgaguccaagaugagcgggaagggccagcagcagcagggccagaccgugaccaagaaguccgccgccgaggcgagcaagaagccgcggcagaagcgcaccgccacgaaggccuacaacgucacccaggccuucgggcgccggggccccgagcagacccaggggaacuucggcgaccaggagcugauccgccaggggaccgacuacaagcacuggccccagaucgcccaguucgcgcccuccgccagcgccuucuucggcaugucccggaucggcauggaggugacgccgagcgggaccuggcugaccuacaccggcgccaucaagcucgacgacaaggaccccaacuucaaggaccaggugauccugcugaacaagcacaucgacgccuacaagacguucccgcccaccgagcccaagaaggacaagaagaagaaggcggacgagacccaggcccucccccagcgccagaagaagcagcagaccgucacgcugcugcccgccgccgaccucgacgacuucuccaagcagcugcagcagagcauguccagcgcggacuccacccaggccuga

SEQ ID NO: 17335 - RNA, 1260 nt, Artificial Sequence
  SARS-CoV-2__MT810952.1__nucleocapsid protein (N) CDS gc
augagcgacaacggcccccagaaccagcgcaacgccccgcggaucaccuucgggggccccuccgacagcaccggguccaaccagaacggcgagcgcagcggggcccgguccaagcagcgccggccccagggccugcccaacaacacggcgagcugguucaccgcccucacccagcacggcaaggaggaccugaaguucccgcgcgggcagggcgugcccaucaacaccaacuccagccccgacgaccagaucggguacuaccggcgcgccacgcggcgcauccggggcggggacggcaagaugaaggaccugagcccccgcugguacuucuacuaccucggcaccgggccggaggccggccugcccuacggggccaacaaggacggcaucaucugggucgcgaccgagggcgcccugaacacccccaaggaccacaucgggacgcggaaccccgccaacaacgccgcgaucgugcuccagcugccgcagggcaccacccugcccaagggguucuacgccgagggcucccgcgggggcucccaggccagcucccggagcuccagccgcucccggaacagcucccgcaacagcacccccggcagcucccgggggacgagccccgcccgcauggccggcaacgggggcgacgcggcccucgcccugcugcuccuggaccggcugaaccagcucgaguccaagaugagcgggaagggccagcagcagcagggccagaccgugaccaagaaguccgccgccgaggcgagcaagaagccgcgccagaagcgcaccgccacgaaggccuacaacgucacccaggccuucgggcggcgcggccccgagcagacccaggggaacuucggcgaccaggagcugauccggcaggggaccgacuacaagcacuggccccagaucgcccaguucgcgcccuccgccagcgccuucuucggcaugucccgcaucggcauggaggugacgccgagcgggaccuggcugaccuacaccggcgccaucaagcucgacgacaaggaccccaacuucaaggaccaggugauccugcugaacaagcacaucgacgccuacaagacguucccgcccaccgagcccaagaaggacaagaagaagaaggcggacgagacccaggcccucccccagcggcagaagaagcagcagaccgucacgcugcugcacgccgccgaccucgacgacuucuccaagcagcugcagcagagcauguccagcgcggacuccacccaggccuga

SEQ ID NO: 17336 - RNA, 1260 nt, Artificial Sequence
  SARS-CoV-2__MT811022.1__nucleocapsid protein (N) CDS gc
augagcgacaacggcccccagaaccagcgcaacgccccgcggaucaccuucgggggccccuccgacagcaccggguccaaccagaacggcgagcgcagcggggcccgguccaagcagcgccggccccagggccugcccaacaacacggcgagcugguucaccgcccucacccagcacggcaaggaggaccugaaguucccgcgcgggcagggcgugcccaucaacaccaacuccagccccgacgaccagaucggguacuaccggcgcgccacgcggcgcauccggggcggggacggcaagaugaaggaccugagcccccgcugguacuucuacuaccucggcaccgggccggaggccggccugcccuacggggccaacaaggacggcaucaucugggucgcgaccgagggcgcccugaacacccccaaggaccacaucgggacgcggaaccccgccaacaacgccgcgaucgugcuccagcugccgcagggcaccacccugcccaagggguucuacgccgagggcucccgcgggggcucccaggccagcucccggagcuccagccgcucccggaacagcucccgcaacagcacccccggcagcucccgggggacgagccccgcccgcauggccggcaacgggggcgacgcggcccucgcccugcugcuccuggaccggcugaaccagcucgaguccaagaugagcgggaagggccagcagcagcagggccagaccgugaccaagaaguccgccgccgaggcgagcaagaagccgcgccagaagcgcaccgccacgaaggccuacaacgucacccaggccuucgggcggcgcggccccgagcagacccaggggaacuucggcgaccaggagcugauccggcaggggaccgacuacaagcacuggccccagaucgcccaguucgcgcccuccgccagcgccuucuucggcaugucccgcaucggcauggaggugacgccgagcgggaccuggcugaccuacaccggcgccaucaagcucgacgacaaggaccccaacuucaagcaccaggugauccugcugaacaagcacaucgacgccuacaagacguucccgcccaccgagcccaagaaggacaagaagaagaaggcggacgagacccaggcccucccccagcggcagaagaagcagcagaccgucacgcugcugcccgccgccgaccucgacgacuucuccaagcagcugcagcagagcauguccagcgcggacuccacccaggccuga

SEQ ID NO: 17337 - RNA, 1260 nt, Artificial Sequence
  SARS-CoV-2__MT811201.1__nucleocapsid protein (N) CDS gc
augagcgacaacggcccccagaaccagcgcaacgccccgcggaucaccuucgggggccccuccgacagcaccggguccaaccagaacggcgagcgcagcggggcccgguccaagcagcgccggccccagggccugcccaacaacacggcgagcugguucaccgcccucacccagcacggcaaggaggaccugaaguucccgcgcgggcagggcgugcccaucaacaccaacuccagccccgacgaccagaucggguacuaccggcgcgccacgcggcgcauccggggcggggacggcaagaugaaggaccugagcccccgcugguacuucuacuaccucggcaccgggccggaggccggccugcccuacggggccaacaaggacggcaucaucugggucgcgaccgagggcgcccugaacacccccaaggaccacaucgggacgcggaaccccgccaacaacgccgcgaucgugcuccagcugccgcagggcaccacccugcccaagggguucuacgccgagggcucccgcgggggcucccaggccagcucccggagcuccagccgcucccggaacagcucccgcaacagcacccccggcagcucccgggggacgagccccgcccgcauggccggcaacgggggcgacgcggcccucgcccugcugcuccuggaccggcugaaccagcucgaguccaagaugagcgggaagggccagcagcagcagggccagaccgugaccaagaaguccgccgccgaggcgagcaagaagccgcgccagaagcgcaccgccacgaaggccuacaacgucacccaggccuucgggcggcgcggccccgagcagacccaggggaacuucggcgaccaggagcugauccggcaggggaccgacuacaagcacuggccccagaucgcccaguucgcgcccuccgccagcgccuucuucggcaugucccgcaucggcauggaggugacgccgagcgggaccuggcugaccuacaccggcgccaucaagcucgacgacaaggaccccaacuucaaggaccaggugauccugcugaacaagcacaucgacgccuacaagacguucccgcccaccgagcccaagaaggacaagaagaagaaggcggacgagacccaggcccucccccagcggcagaagaagcagcagaccgucacgcugcugcccgccgccgaccucgacgacuucuccaagcagcugcagcagagcauguccagcgcggacuccacccacgccuga

SEQ ID NO: 17338 - RNA, 1260 nt, Artificial Sequence
  SARS-CoV-2__MT811202.1__nucleocapsid protein (N) CDS gc
augagcgacaacggcccccagaaccagcgcaacgccccgcggaucaccuucgggggccccuccgacagcaccggguccaaccagaacggcgagcgcagcggggcccgguccaagcagcgccggccccagggccugcccaacaacacggcgagcugguucaccgcccucacccagcacggcaaggaggaccugaaguucccgcgcgggcagggcgugcccaucaacaccaacuccagccccgacgaccagaucggguacuaccggcgcgccacgcggcgcauccggggcggggacggcaagaugaaggaccugagcccccgcugguacuucuacuaccucggcaccgggccggaggccggccugcccuacggggccaacaaggacggcaucaucugggucgcgaccgagggcgcccugaacacccccaaggaccacaucgggacgcggaaccccgccaacaacgccgcgaucgugcuccagcugccgcagggcaccacccugcccaagggguucuacgccgagggcucccgcgggggcucccaggccagcucccggagcuccagccgcucccggaacagcucccgcaacagcacccccggcagcucccgggggacgagccccgcccgcauggccggcaacgggggcgacgcggcccucgcccugcugcuccuggaccggcugaaccagcucgaguccaagaugagcgggaagggccagcagcagcagggccagaccgugaccaagaaguccgccgccgaggcgagcaagaagccgcgccagaagcgcaccgccacgaaggccuacaacgucacccaggccuucgggcggcgcggccccgagcagacccaggggaacuucggcgaccaggagcugauccggcaggggaccgacuacaagcacuggccccagaucgcccaguucgcgcccuccgccagcgccuucuucggcaugucccgcaucggcauggaggugacgccgagcgggaccuggcugaccuacaccggcgccaucaagcucgacgacaaguaccccaacuucaaggaccaggugauccugcugaacaagcacaucgacgccuacaagacguucccgcccaccgagcccaagaaggacaagaagaagaaggcggacgagacccaggcccucccccagcggcagaagaagcagcagaccgucacgcugcugcccgccgccgaccucgacgacuucuccaagcagcugcagcagagcauguccagcgcggacuccacccaggccuga

SEQ ID NO: 17339 - RNA, 1260 nt, Artificial Sequence
  SARS-CoV-2__MT811229.1__nucleocapsid protein (N) CDS gc
augagcgacaacggcccccagaaccagcgcaacgccccgcggaucaccuucgggggccccuccgacagcaccggguccaaccagaacggcgagcgcagcggggcccgguccaagcagcgccggccccagggccugcccaacaacacggcgagcugguucaccgcccucacccagcacggcaaggaggaccugaaguucccgcgcgggcagggcgugcccaucaacaccaacuccagccccgacgaccagaucggguacuaccggcgcgccacgcggcgcauccggggcggggacggcaagaugaaggaccugagcccccgcugguacuucuacuaccucggcaccgggccggaggccggccugcccuacggggccaacaaggacggcaucaucugggucgcgaccgagggcgcccugaacacccccaaggaccacaucgggacgcggaaccccgccaacaacgccgcgaucgugcuccagcugccgcagggcaccacccugcccaagggguucuacgccgagggcagccgcgggggcucccaggccagcucccggagcuccagccgcucccggaacagccuccgcaacuccacccccggcagcagccgggggacgucccccgcccgcauggccggcaacgggggcgacgcggcccuggcccugcuccugcuggaccggcucaaccagcuggagagcaagauguccgggaagggccagcagcagcagggccagaccgugaccaagaaguccuccgccgaggccagcaagaagccgcgccagaagcgcaccgcgacgaaggccuacaacgucacccaggccuucgggcggcgcggccccgagcagacccaggggaacuucggcgaccaggagcugauccggcaggggaccgacuacaagcacuggccccagaucgcccaguucgcccccuccgcgagcgccuucuucggcaugucccgcaucggcauggaggugacgccgagcgggaccuggcucaccuacaccggcgccaucaagcuggacgacaaggaccccaacuucaaggaccaggugauccugcucaacaagcacaucgacgccuacaagacguucccgcccaccgagcccaagaaggacaagaagaagaaggccgacgagacccaggcgcugccccagcggcagaagaagcagcagaccgucacgcugcuccccgccgccgaccuggacgacuucuccaagcagcugcagcagagcauguccagcgccgacuccacccaggcguga

SEQ ID NO: 17340 - RNA, 1260 nt, Artificial Sequence
  SARS-CoV-2__MT811240.1__nucleocapsid protein (N) CDS gc
augagcgacaacggcccccagaaccagcgcaacgccccgcggaucaccuucgggggccccuccgacagcaccggguccaaccagaacggcgagcgcagcggggcccgguccaagcagcgccggccccagggccugcccaacaacacggcgagcugguucaccgcccucacccagcacggcaaggaggaccugaaguucccgcgcgggcagggcgugcccaucaacaccaacuccagccccgacgaccagaucggguacuaccggcgcgccacgcggcgcauccggggcggggacggcaagaugaaggaccugagcccccgcugguacuucuacuaccucggcaccgggccggaggccggccugcccuacggggccaacaaggacggcaucaucugggucgcgaccgagggcgcccugaacacccccaaggaccacaucgggacgcggaaccccgccaacaacgccgcgaucgugcuccagcugccgcagggcaccacccugcccaagggguucuacgccgagggcagccgcgggggcucccaggccagcucccggagcuccagccgcucccggaacagccuccgcaacuccacccccggcagcagccgggggacgucccccgcccgcauggccggcaacgggggcgacgcggcccuggcccugcuccugcuggaccggcucaaccagcuggagagcaagauguccgggaaggugcagcagcagcagggccagaccgucaccaagaaguccgccgccgaggcguccaagaagccgcgccagaagcgcaccgccacgaaggccuacaacgugacccaggccuucggccggcgcgggcccgagcagacccagggcaacuucggggaccaggagcugauccggcagggcaccgacuacaagcacuggccccagaucgcccaguucgcgcccagcgccuccgccuucuucgggaugagccgcaucggcauggaggugacgccguccggcaccuggcucaccuacaccggggccaucaagcuggacgacaaggaccccaacuucaaggaccaggucauccugcucaacaagcacaucgacgccuacaagacguucccgcccaccgagcccaagaaggacaagaagaagaaggcggacgagacccaggcccugccccagcggcagaagaagcagcagaccgugacgcugcuccccgccgccgaccuggacgacuucagcaagcagcugcagcaguccaugagcuccgcggacagcacccaggccuga

SEQ ID NO: 17341 - RNA, 1260 nt, Artificial Sequence
  SARS-CoV-2__MT811246.1__nucleocapsid protein (N) CDS gc
augagcgacaacggcccccagaaccagcgcaacgccccgcggaucaccuucgggggccccuccgacagcaccggguccaaccagaacggcgagcgcagcggggcccgguccaagcagcgccggccccagggccugcccaacaacacggcgagcugguucaccgcccucacccagcacggcaaggaggaccugaaguucccgcgcgggcagggcgugcccaucaacaccaacuccagccccgacgaccagaucggguacuaccggcgcgccacgcggcgcauccggggcggggacggcaagaugaaggaccugagcccccgcugguacuucuacuaccucggcaccgggccggaggccggccugcccuacggggccaacaaggacggcaucaucugggucgcgaccgagggcgcccugaacacccccaaggaccacaucgggacgcggaaccccgccaacaacgccgcgaucgugcuccagcugccgcagggcaccacccugcccaagggguucuacgccgagggcagccgcgggggcucccaggccagcucccggagcuccagccgcucccggaacagccuccgcaacuccacccccggcagcagccgggggaucucccccgcccgcauggccggcaacgggggcgacgcggcccuggcccugcuccugcuggaccggcucaaccagcuggagagcaagauguccgggaagggccagcagcagcagggccagacggugaccaagaaguccgccgccgaggcguccaagaagccgcgccagaagcgcaccgccaccaaggccuacaacgucacgcaggccuucgggcggcgcggccccgagcagacccaggggaacuucggcgaccaggagcugauccggcaggggaccgacuacaagcacuggccccagaucgcccaguucgcgcccagcgccuccgccuucuucggcaugagccgcaucggcauggaggugaccccguccgggacguggcucaccuacaccggcgccaucaagcuggacgacaaggaccccaacuucaaggaccaggugauccugcucaacaagcacaucgacgccuacaagaccuucccgcccacggagcccaagaaggacaagaagaagaaggcggacgagacccaggcccugccccagcggcagaagaagcagcagaccgucacccugcuccccgccgccgaccuggacgacuucagcaagcagcugcagcaguccaugagcuccgcggacagcacgcaggccuga

SEQ ID NO: 17342 - RNA, 1260 nt, Artificial Sequence
  SARS-CoV-2__MT811251.1__nucleocapsid protein (N) CDS gc
augagcgacaacggcccccagaaccagcgcaacgccccggggaucaccuucggcgggcccuccgacagcaccggcuccaaccagaacggggagcggagcggcgcccgcuccaagcagcggcgcccccagggccugcccaacaacacggcgagcugguucaccgcccucacccagcacgggaaggaggaccugaaguucccgcggggccagggggugcccaucaacaccaacuccagccccgacgaccagaucggcuacuaccgccgggccacgcgccggauccgcgggggcgacggcaagaugaaggaccugagcccccggugguacuucuacuaccucgggaccggcccggaggccgggcugcccuacggcgccaacaaggacggcaucaucugggucgcgaccgagggggcccugaacacccccaaggaccacaucggcacgcgcaaccccgccaacaacgccgcgaucgugcuccagcugccgcaggggaccacccugcccaagggcuucuacgccgaggggagccggggcggcucccaggccagcucccgcagcuccagccggucccgcaacagccuccggaacuccacccccgggagcagccgcggcacgucccccgcccggauggccgggaacggcggggacgcggcccuggcccugcuccugcuggaccgccucaaccagcuggagagcaagauguccggcaagggccagcagcagcaggggcagaccgugaccaagaaguccgccgccgaggcguccaagaagccgcggcagaagcgcaccgccacgaaggccuacaacgucacccaggccuucggccgccgggggcccgagcagacccagggcaacuucggggaccaggagcugauccgccagggcaccgacuacaagcacuggccccagaucgcccaguucgcgcccagcgccuccgccuucuucggcaugagccggaucgggauggaggugacgccguccggcaccuggcucaccuacaccggggccaucaagcuggacgacaaggaccccaacuucaaggaccaggugauccugcucaacaagcacaucgacgccuacaagacguucccgcccaccgagcccaagaaggacaagaagaagaaggcggacgagacccaggcccugccccagcgccagaagaagcagcagaccgucacgcugcuccccgccgccgaccuggacgacuucagcaagcagcugcagcaguccaugagcuccgcggacagcacccaggccuga

SEQ ID NO: 17343 - RNA, 1260 nt, Artificial Sequence
  SARS-CoV-2__MT811325.1__nucleocapsid protein (N) CDS gc
augagcgacaacggcccccagaaccagcgcaacgccccgcggaucaccuucgggggccccuccgacagcaccggguccaaccagaacggcgagcgcagcggggcccgguccaagcagcgccggccccagggccugcccaacaacacggcgagcugguucaccgcccucacccagcacggcaaggaggaccugaaguucccgcgcgggcagggcgugcccaucaacaccaacuccagccccgacgaccagaucggguacuaccggcgcgccacgcggcgcauccggggcggggacggcaagaugaaggaccugagcccccgcugguacuucuacuaccucggcaccgggccggaggccggccugcccuacggggccaacaaggacggcaucaucugggucgcgaccgagggcgcccugaacacccccaaggaccacaucgggacgcggaaccccgccaacaacgccgcgaucgugcuccagcugccgcagggcaccacccugagcaagggguucuacgccgagggcucccgcgggggcagccaggccuccagccgguccagcucccgcagccggaacuccagccgcaacagcacccccggcuccagccgggggacgucccccgcccgcauggccggcaacgggggcgacgcggcccucgcccugcugcuccuggaccggcugaaccagcucgagagcaagauguccgggaagggccagcagcagcagggccagaccgugaccaagaaguccgccgccgaggcguccaagaagccccgccagaagcgcaccgccacgaaggccuacaacgucacccaggccuucgggcggcgcggcccggagcagacccaggggaacuucggcgaccaggagcugauccggcaggggaccgacuacaagcacuggccccagaucgcccaguucgcgcccagcgccuccgccuucuucggcaugagccgcaucggcauggaggugacgcccuccgggaccuggcugaccuacaccggcgccaucaagcucgacgacaaggacccgaacuucaaggaccaggugauccugcugaacaagcacaucgacgccuacaagacguucccgcccaccgagcccaagaaggacaagaagaagaaggcggacgagacccaggcccucccccagcggcagaagaagcagcagaccgucacgcugcugcccgccgccgaccucgacgacuucagcaagcagcugcagcaguccaugagcuccgcggacagcacccaggccuga

SEQ ID NO: 17344 - RNA, 1260 nt, Artificial Sequence
  SARS-CoV-2__MT811330.1__nucleocapsid protein (N) CDS gc
augagcgacaacggcccccagaaccagcgcaacgccccgcggaucaccuucgggggccccuccgacagcaccggguccaaccagaacggcgagcgcagcggggcccgguccaagcagcgccggccccagggccugcccaacaacacggcgagcugguucaccgcccucacccagcacggcaaggaggaccugaaguucccgcgcgggcagggcgugcccaucaacaccaacuccagccccgacgaccagaucggguacuaccggcgcgccacgcggcgcauccggggcggggacggcaagaugaaggaccugagcccccgcugguacuucuacuaccucggcaccgggccggaggccggccugcccuacggggccaacaaggacggcaucaucugggucgcgaccgagggcgcccugaacacccccaaggaccacaucgggacgcggaaccccgccaacaacgccgcgaucgugcuccagcugccgcagggcaccacccugcccaagggguucuacgccgagggcucccgcgggggcucccaggccagcucccggagcuccagccgcucccggaacagcucccgcaacagcacccccggcagcucccgggggacgagccccgcccgcauggccggcaacgggggcgacgcggcccucgcccugcugcuccuggaccggcugaaccagcucgaguccaagaugagcgggaagggccagcagcagcagggccagaccgugaccaagaaguccgccgccgaggcgagcaagaagccgcgccagaagcgcaccgccacgaaggccuacaacgucacccaggccuucgggcggcgcggccccgugcagacccaggggaacuucggcgaccaggagcugauccggcaggggaccgacuacaagcacuggccccagaucgcccaguucgcgcccuccgccagcgccuucuucggcaugucccgcaucggcauggaggugacgccgagcgggaccuggcugaccuacaccggcgccaucaagcucgacgacaaggaccccaacuucaaggaccaggucauccugcugaacaagcacaucgacgccuacaagacguucccgcccaccgagcccaagaaggacaagaagaagaaggcggacgagacccaggcccucccccagcggcagaagaagcagcagaccgugacgcugcugcccgccgccgaccucgacgacuucuccaagcagcugcagcagagcauguccagcgcggacuccacccaggccuga

SEQ ID NO: 17345 - RNA, 1260 nt, Artificial Sequence
  SARS-CoV-2__MT811407.1__nucleocapsid protein (N) CDS gc
augagcgacaacggcccccagaaccagcgcaacgccccgcggaucaccuucgggggccccuccgacagcaccggguccaaccagaacggcgagcgcagcggggcccgguccaagcagcgccggccccagggccugcccaacaacacggcgagcugguucaccgcccucacccagcacggcaaggaggaccugaaguucccgcgcgggcagggcgugcccaucaacaccaacuccagccccgacgaccagaucggguacuaccggcgcgccacgcggcgcauccggggcggggacggcaagaugaaggaccugagcccccgcugguacuucuacuaccucggcaccgggccggaggccggccugcccuacggggccaacaaggacggcaucaucugggucgcgaccgagggcgcccugaacacccccaaggaccacaucgggacgcggaaccccgccaacaacgccgcgaucgugcuccagcugccgcagggcaccacccugcccaagggguucuacaccgagggcagccgcgggggcucccaggccagcucccggagcuccagccgcucccggaacagccuccgcaacuccacgcccggcagcagccgggggaccucccccgcccgcauggccggcaacgggggcgacgccgcgcuggcccugcuccugcuggaccggcucaaccagcuggagagcaagauguccgggaagggccagcagcagcagggccagaccgugaccaagaaguccgccgccgaggccuccaagaagccgcgccagaagcgcacggcgaccaaggccuacaacgucacccaggccuucgggcggcgcggccccgagcagacccaggggaacuucggcgaccaggagcugauccggcaggggacggacuacaagcacuggccccagaucgcccaguucgcccccagcgcguccgccuucuucggcaugagccgcaucggcauggaggugaccccguccgggaccuggcucaccuacacgggcgccaucaagcuggacgacaaggaccccaacuucaaggaccaggugauccugcucaacaagcacaucgacgccuacaagaccuucccgcccaccgagcccaagaaggacaagaagaagaaggccgacgagacccaggcgcugccccagcggcagaagaagcagcagacggucacccugcuccccgccgccgaccuggacgacuucagcaagcagcugcagcaguccaugagcuccgccgacagcacccaggcguga

SEQ ID NO: 17346 - RNA, 1260 nt, Artificial Sequence
  SARS-CoV-2__MT811416.1__nucleocapsid protein (N) CDS gc
augagcgacaacggcccccagaaccagcgcaacgccccgcggaucaccuucgggggccccuccgacagcaccggguccaaccagaacggcgagcgcagcggggcccgguccaagcagcgccggccccagggccugcccaacaacacggcgagcugguucaccgcccucacccagcacggcaaggaggaccugaaguucccgcgcgggcagggcgugcccaucaacaccaacuccagccccgacgaccagaucggguacuaccggcgcgccacgcggcgcauccggggcggggacggcaagaugaaggaccugagcccccgcugguacuucuacuaccucggcaccgggccggaggccggccugcccuacggggccaacaaggacggcaucaucugggucgcgaccgagggcgcccugaacacccccaaggaccacaucgggacgcggaaccccgccaacaacgccgcgaucgugcuccagcugccgcagggcaccacccugcccaagggguucuacgccgagggcagccgcgggggcucccaggccagcucccggagcuccagccgcucccggaacagccuccgcaacuccacccccggcagcagccgggggacgucccccgcccgcauggccggcaacgggggcgacgcggcccuggcccugcuccugcuggaccggcucaaccagcuggagagcaagauguccgggaagggccagcagcagcagggccagaccgugaccaagaaguccgccgccgaggcguccaagaagccgcgccagaagcgcaccgccacgaaggccuacaacgucacccaggccuucgggcggcgcggccccgagcagacccaggggaacuucggcgaccaggagcugauccggcaggggaccgacuacaagcacuggccccagaucgcccaguucgcgcccagcgccuccgccuucuucggcaugagccgcaucggcauggaggugacgccguccgggaccuggcucaccuacaccggcgccaucaagcuggacgacaaguaccccaacuucaaggaccaggugauccugcucaacaagcacaucgacgccuacaagacguucccgcccaccgagcccaagaaggacaagaagaagaaggcggacgagacccaggcccugccccagcggcagaagaagcagcagaccgucacgcugcuccccgccgccgaccuggacgacuucagcaagcagcugcagcaguccaugagcuccgcggacagcacccaggccuga

SEQ ID NO: 17347 - RNA, 1260 nt, Artificial Sequence
  SARS-CoV-2__MT811458.1__nucleocapsid protein (N) CDS gc
augagcgacaacggcccccagaaccagcgcaacgccccgcggaucaccuucgggggccccuccgacagcaccggguccaaccagaacggcgagcgcagcggggcccgguccaagcagcgccggccccagggccugcccaacaacacggcgagcugguucaccgcccucacccagcacggcaaggaggaccugaaguucccgcgcgggcagggcgugcccaucaacaccaacuccagccccgacgaccagaucggguacuaccggcgcgccacgcggcgcauccggggcggggacggcaagaugaaggaccugagcccccgcugguacuucuacuaccucggcaccgggccggaggccggccugcccuacggggccaacaaggacggcaucaucugggucgcgaccgagggcgcccugaacacccccaaggaccacaucgggacgcggaaccccgccaacaacgccgcgaucgugcuccagcugccgcagggcaccacccugcccaagggguucuacgccgagggcagccgcgggggcucccaggccagcucccggagcuccagccgcucccggaacagccuccgcaacuccacccccggcagcagccgggggacgucccccgcccgcauggccggcaacgggggcgacgcggcccuggcccugcuccugcuggaccggcucaaccagcuggagagcaagauguccgggaagggccagcagcagcagggccagaccgugaccaagaaguccgccgccgaggcguccaagaagccgcgccagaagcgcaccgccacgaaggccuacaacgucacccaggccuucgggcggcgcggccccgagcagacccaggggaacuucggcgaccaggagcugauccggcaggggaccgacuacaagcacuggccccagaucgcccaguucgcgcccagcgccuccgccuucuucggcaugagccgcaucggcauggaggugacgccguccgggaccuggcucaccuacaccggcgccaucaagcuggacgacaaggaccccaacuucaaggaccaggugauccugcucaacaagcacaucgacgccuacaagacguucccgcccaccgagcccaagaaggacaagaagaagaaggcggacgagacccaggcccugccccagcggcagaagcgccagcagaccgucacgcugcuccccgccgccgaccuggacgacuucagcaagcagcugcagcaguccaugagcuccgcggacagcacccaggccuga

SEQ ID NO: 17348 - RNA, 1260 nt, Artificial Sequence
  SARS-CoV-2__MT811483.1__nucleocapsid protein (N) CDS gc
augagcgacaacggcccccagaaccagcgcaacgccccgcggaucaccuucgggggccccuccgacagcaccggguccaaccagaacggcgagcgcagcggggcccgguccaagcagcgccggccccagggccugcccaacaacacggcgagcugguucaccgcccucacccagcacggcaaggaggaccugaaguucccgcgcgggcagggcgugcccaucaacaccaacuccagccccgacgaccagaucggguacuaccggcgcgccacgcggcgcauccggggcggggacggcaagaugaaggaccugagcccccgcugguacuucuacuaccucggcaccgggccggaggccggccugcccuacggggccaacaaggacggcaucaucugggucgcgaccgagggcgcccugaacacccccaaggaccacaucgggacgcggaaccccgccaacaacgccgcgaucgugcuccagcugccgcagggcaccacccugcccaagggguucuacgccgagggcagccgcgggggcucccaggccagcucccggagcuccagccgcucccggaacagccuccgcaacuccacccccggcagcagccgggggacgucccccgcccgcauggccggcaacgggggcgacgcggcccuggcccugcuccugcuggaccggcucaaccagcuggagagcaagauguccgggaagggccagcagcagcagggccagaccgugaccaagaaguccgccgccgaggcguccaagaagccgcgccagaagcgcaccgccacgaaggccuacaacgucacccaggccuucgggcggcgcggccccgagcagacccaggggaacuucggcgaccaggagcugauccggcaggggaccgacuacaagcacuggccccagaucgcccaguucgcgcccagcgccuccgccuucuucggcaugagccgcaucggcauggaggugacgccguccgggaccuggcucaccuacaccggcgccaucaagcuggacgacaaggaccccaacuucaaggaccaggugauccugcucaacaagcacaucgacgccuacaagacguucccgcccaccgagcccaagaaggacaagaagaagaaggcggacgagacccaggcccugccccagcggcagaagaagcagcagaccgucacgcugcuccccgccgccaaccuggacgacuucagcaagcagcugcagcaguccaugagcuccgcggacagcacccaggccuga

SEQ ID NO: 17349 - RNA, 1260 nt, Artificial Sequence
  SARS-CoV-2__MT811485.1__nucleocapsid protein (N) CDS gc
augagcgacaacggcccccagaaccagcgcaacgccccgcggaucaccuucgggggccccuccgacagcaccggguccaaccagaacggcgagcgcagcggggcccgguccaagcagcgccggccccagggccugcccaacaacacggcgagcugguucaccgcccucacccagcacggcaaggaggaccugaaguucucccgcgggcagggcgugccgaucaacaccaacagcucccccgacgaccagaucggguacuaccggcgcgccacgcggcgcauccggggcggggacggcaagaugaaggaccugagcccccgcugguacuucuacuaccucggcaccgggcccgaggccggccugccguacggggccaacaaggacggcaucaucugggucgcgaccgagggcgcccugaacacccccaaggaccacaucgggacgcggaaccccgccaacaacgccgcgaucgugcuccagcugccccagggcaccacccugccgaagggguucuacgccgagggcucccgcgggggcagccaggccuccagccgguccagcucccgcagccggaacuccagccgcaacagcacccucggcuccagccgggggacgucccccgcccgcauggccggcaacgggggcgacgcggcccuggcccugcuccugcuggaccggcucaaccagcuggagagcaagauguccgggaagggccagcagcagcagggccagaccgugaccaagaaguccgccgccgaggcgagcaagaagccccgccagaagcgcaccgccacgaaggccuacaacgucacccaggccuucgggcggcgcggccccgagcagacccaggggaacuucggcgaccaggagcugauccggcaggggaccgacuacaagcacuggccgcagaucgcccaguucgcgcccagcgccuccgccuucuucggcaugagccgcaucggcauggaggugacgcccuccgggaccuggcucaccuacaccggcgccaucaagcuggacgacaaggaccccaacuucaaggaccaggugauccugcucaacaagcacaucgacgccuacaagacguucccgcccaccgagcccaagaaggacaagaagaagaaggcggacgagacccaggcccugccccagcggcagaagaagcagcagaccgucacgcugcucccggccgccgaccuggacgacuucagcaagcagcugcagcaguccaugagcuccgcggacagcacccaggccuga

SEQ ID NO: 17350 - RNA, 1260 nt, Artificial Sequence
  SARS-CoV-2__MT811488.1__nucleocapsid protein (N) CDS gc
augagcgacaacggcccccagaaccagcgcaacgccccgcggaucaccuucgggggccccuccgacagcaccggguccaaccagaacggcgagcgcagcggggcccgguccaagcagcgccggccccagggccugcccaacaacacggcgagcugguucaccgcccucacccagcacggcaaggaggaccugaaguucccgcgcgggcagggcgugcccaucaacaccaacuccagccccgacgaccagaucggguacuaccggcgcgccacgcggcgcauccggggcggggacggcaagaugaaggaccugagcccccgcugguacuucuacuaccucggcaccgggccggaggccggccugcccuacggggccaacaaggacggcaucaucugggucgcgaccgagggcgcccugaacacccccaaggaccacaucgggacgcggaaccccgccaacaacgccgcgaucgugcuccagcugccgcagggcaccacccugcccaagggguucuacgccgagggcagccgcgggggcucccaggccagcucccggagcuccagccgcucccggaacagccuccgcaacuccacccccggcagcagccgggggacgucccccgcccgcauggccggcaacgggggcgacgcggcccuggcccugcuccugcuggaccggcucaaccagcuggagagcaagauguccgggaagggccagcagcagcagggccagaccgugaccaagaaguccgccgccgaggcguccaagaagccgcgccagaagcgcaccgccacgaaggccuacaacgucacccaggccuucgggcggcgcggccccgagcagacccaggggaacuucggcgaccaggagcugauccggcaggggaccgacuacaagcacuggccccagaucgcccaguucgcgcccagcgccuccgccuucuucggcaugagccgcaucggcauggaggugacgccguccgggaccuggcucaccuacaccggcgccaucaagcuggacgacaaggaccccaacuucaaggaccaggugauccugcucaacaagcacaucgacgccuacaagacguucccgcccaccgaccccaagaaggacaagaagaagaaggcggacgagacccaggcccugccccagcggcagaagaagcagcagaccgucacgcugcuccccgccgccgaccuggacgacuucagcaagcagcugcagcaguccaugagcuccgcggacagcacccaggccuga

SEQ ID NO: 17351 - RNA, 1260 nt, Artificial Sequence
  SARS-CoV-2__MT811490.1__nucleocapsid protein (N) CDS gc
augagcgacaacggcccccagaaccagcgcaacgccccgcggaucaccuucgggggccccuccgacagcaucggguccaaccagaacggcgagcgcagcggggcccgguccaagcagcgccggccccagggccugcccaacaacaccgcgagcugguucacggcccucacccagcacggcaaggaggaccugaaguucccgcgcgggcagggcgugcccaucaacaccaacuccagccccgacgaccagaucggguacuaccggcgcgccacccggcgcauccggggcggggacggcaagaugaaggaccugagcccccgcugguacuucuacuaccucggcacggggccggaggccggccugcccuacggggccaacaaggacggcaucaucugggucgcgaccgagggcgcccugaacacccccaaggaccacaucgggacccggaaccccgccaacaacgccgcgaucgugcuccagcugccgcagggcacgacccugcccaagggguucuacgccgagggcucccgcgggggcucccaggccagcucccggagcuccagccgcucccggaacagcucccgcaacagcacccccggcagcuccaagcggaccagccccgcccgcauggccgggaacggcggggacgcggcccucgcccugcugcuccuggaccggcugaaccagcucgaguccaagaugagcggcaaggggcagcagcagcagggccagacggugaccaagaaguccgccgccgaggcgagcaagaagccgcgccagaagcgcaccgccaccaaggccuacaacgucacgcaggccuucggccggcgcgggcccgagcagacccagggcaacuucggggaccaggagcugauccggcagggcaccgacuacaagcacuggccccagaucgcccaguucgcgcccuccgccagcgccuucuucgggaugucccgcaucggcauggaggugaccccgagcggcacguggcugaccuacaccggggccaucaagcucgacgacaaggaccccaacuucaaggaccaggugauccugcugaacaagcacaucgacgccuacaagaccuucccgcccacggagcccaagaaggacaagaagaagaaggcggacgagacccaggcccucccccagcggcagaagaagcagcagaccgucacccugcugcccgccgccgaccucgacgacuucuccaagcagcugcagcagagcauguccagcgcggacuccacgcaggccuga

SEQ ID NO: 17352 - RNA, 1260 nt, Artificial Sequence
  SARS-CoV-2__MT811492.1__nucleocapsid protein (N) CDS gc
augagcgacaacggcccccagaaccagcgcaacgccccgcggaucaccuucgggggccccuccgacagcaccggguccaaccagaacggcgagcgcagcggggcccgguccaagcagcgccggccccugggccuccccaacaacacggcgagcugguucaccgcccugacccagcacggcaaggaggaccugaaguucccgcgcgggcagggcgugcccaucaacaccaacuccagccccgacgaccagaucggguacuaccggcgcgccacgcggcgcauccggggcggggacggcaagaugaaggaccucagcccccgcugguacuucuacuaccugggcaccgggccggaggccggccugcccuacggggccaacaaggacggcaucaucugggucgcgaccgagggcgcccucaacacccccaaggaccacaucgggacgcggaaccccgccaacaacgccgcgaucgugcugcagcugccgcagggcaccacccuccccaagggguucuacgccgagggcagccgcgggggcucccaggccagcucccggagcuccagccgcucccggaacagccugcgcaacuccacccccggcagcagccgggggacgucccccgcccgcauggccggcaacgggggcgacgcggcccuggcccuccugcugcucgaccggcugaaccagcuggagagcaagauguccgggaagggccagcagcagcagggccagaccgugaccaagaaguccgccgccgaggcguccaagaagccgcgccagaagcgcaccgccacgaaggccuacaacgucacccaggccuucgggcggcgcggccccgagcagacccaggggaacuucggcgaccaggagcucauccggcaggggaccgacuacaagcacuggccccagaucgcccaguucgcgcccagcgccuccgccuucuucggcaugagccgcaucggcauggaggugacgccguccgggaccuggcugaccuacaccggcgccaucaagcuggacgacaaggaccccaacuucaaggaccaggugauccuccugaacaagcacaucgacgccuacaagacguucccgcccaccgagcccaagaaggacaagaagaagaaggcggacgagacccaggcccugccccagcggcagaagaagcagcagaccgucacgcuccugcccgccgccgaccuggacgacuucagcaagcagcuccagcaguccaugagcuccgcggacagcacccaggccuga

SEQ ID NO: 17353 - RNA, 1260 nt, Artificial Sequence
  SARS-CoV-2__MT811500.1__nucleocapsid protein (N) CDS gc
augagcgacaacggcccccagaaccagcgcaacgccccgcggaucaccuucgggggccccuccgacagcaccggguccaaccagaacggcgagcgcagcggggcccgguccaagcagcgccggccccagggccugcccaacaacacggcgagcugguucaccgcccucacccagcacggcaaggaggaccugaaguucccgcgcgggcagggcgugcccaucaacaccaacuccagccccgacgaccagaucggguacuaccggcgcgccacgcggcgcauccggggcggggacggcaagaugaaggaccugagcccccgcugguacuucuacuaccucggcaccgggccggaggccggccugcccuacggggccaacaaggacggcaucaucugggucgcgaccgagggcgcccugaacacccccaaggaccacaucgggacgcggaaccccgccaacaacgccgcgaucgugcuccagcugccgcagggcaccacccugcccaagggguucuacgccgagggcagccgcgggggcucccaggccagcucccggagcuccagccgcucccggaacagccuccgcaacuccacccccggcagcagccgggggacgucccccgcccgcauggccggcaacgggggcgacgcggcccuggcccugcuccugcuggaccggcucaaccagcuggagagcaagauguccgggaagggccagcagcagcagggccagaccgugaccaagaaguccgccgccgaggcguccaagaagccgcgccagaagcgcaccgccacgaaggccuacaacgucacccaggccuucgggcggcgcggccccgagcagacccaggggaacuucggcgaccaggagcugauccggcaggggaccgacuacaagcacuggccccagaucgcccaguucgcgcccagcgccuccgccuucuucggcaugagccgcaucggcauggaggugacgccguccgggaccuggcucaccuacaccggcgccaucaagcuggacgacaaggaccccaacuucaaggaccaggugauccugcucaacaagcacaucgacgccuacaagacguucccgcccaccgagcccaagaaggacaagaagaagaaggcggacgagacccaggcccugccccagcggcagaagauccagcagaccgucacgcugcuccccgccgccgaccuggacgacuucagcaagcagcugcagcaguccaugagcuccgcggacagcacccaggccuga

SEQ ID NO: 17354 - RNA, 1260 nt, Artificial Sequence
  SARS-CoV-2__MT811507.1__nucleocapsid protein (N) CDS gc
augagcgacaacggcccccagaaccagcgcaacgccccgcggaucaccuucgggggccccuccgacagcaccggguccaaccagaacggcgagcgcagcggggcccgguccaagcagcgccggccccagggccugcccaacaacacggcgagcugguucaccgcccucacccagcacggcaaggaggaccugaaguucccgcgcgggcagggcgugcccaucaacaccaacuccagccccgacgaccagaucggguacuaccggcgcgccacgcggcgcauccggggcggggacggcaagaugaaggaccugagcccccgcugguacuucuacuaccucggcaccgggccggaggccggccugcccuacggggccaacaaggacggcaucaucugggucgcgaccgagggcgcccugaacacccccaaggaccacaucgggacgcggaaccccgccaacaacgccgcgaucgugcuccagcugccgcagggcaccacccugcccaagggguucuacgccgagggcucccgcgggggcucccaggccagcucccggagcuccagccgcucccggaacagcucccgcaacagcacccccggcagcucccgggggacgagccccgcccgcauggccggcaacgggggcgacgcggcccucgcccugcugcuccuggaccggcugaaccaguucgaguccaagaugagcgggaagggccagcagcagcagggccagaccgugaccaagaaguccgccgccgaggcgagcaagaagccgcgccagaagcgcaccgccacgaaggccuacaacgucacccaggccuucgggcggcgcggccccgagcagacccaggggaacuucggcgaccaggagcucauccggcaggggaccgacuacaagcacuggccccagaucgcccaguucgcgcccuccgccagcgccuucuucggcaugucccgcaucggcauggaggugacgccgagcgggaccuggcugaccuacaccggcgccaucaagcuggacgacaaggaccccaacuucaaggaccaggugauccuccugaacaagcacaucgacgccuacaagacguucccgcccaccgagcccaagaaggacaagaagaagaaggcggacgagacccaggcccugccccagcggcagaagaagcagcagaccgucacgcuccugcccgccgccgaccuggacgacuucuccaagcagcuccagcagagcauguccaacgcggacagcacccaggccuga

SEQ ID NO: 17355 - RNA, 1260 nt, Artificial Sequence
  SARS-CoV-2__MT811511.1__nucleocapsid protein (N) CDS gc
augagcgacaacggcccccagaaccagcgcaacgccccgcggaucaccuucgggggccccuccgacagcaccggguccaaccagaacggcgagcgcagcggggcccgguccaagcagcgccggccccagggccugcccaacaacacggcgagcugguucaccgcccucacccagcacggcaaggaggaccugaaguucccgcgcgggcagggcgugcccaucaacaccaacuccagccccgacgaccagaucggguacuaccggcgcgccacgcggcgcauccggggcggggacggcaagaugaaggaccugagcccccgcugguacuucuacuaccucggcaccgggccggaggccggccugcccuacggggccaacaaggacggcaucaucugggucgcgaccgagggcgcccugaacacccccaaggaccacaucgggacgcggaaccccgccaacaacgccgcgaucgugcuccagcugccgcagggcaccacccugcccaagggguucuacgccgagggcucccgcgggggcucccaggccagcucccggagcuccagccgcucccggaacagcucccgcaacagcacccccggcagcucccgggggacgagccccgcccgcauggccggcaacgggggcgacgcggcccucgcccugcugcuccuggaccggcugaaccagcucgaguccaagaugagcgggaagggccagcagcagcagggccagaccgugaccaagaaguccgccgccgaggcgagcaagaagccgcgccagaagcgcaccgccacgaaggccuacaacgucacccaggccuucgggcggcgcggccccgagcagacccaggggaacuucggcgaccaggagcugauccggcaggggaccgacuacaagcacuggccccagaucgcccaguucgcgcccuccgccagcgccuucuucggcaugucccgcaucggcauggaggugacgccgagcgggaccuggcugaccuacaccggcgccaucaagcucgacgacaaggaccccaacuucaaggaccaggugauccugcugaacaagcacaucgacgccuacaagacguucccgcccaccgagcccaagaaggacaagaagaagaaggcggacgagacccaggcccuccugcagcggcagaagaagcagcagaccgucacgcugcuccccgccgccgaccuggacgacuucuccaagcagcugcagcagagcauguccagcgcggacuccacccaggccuga

SEQ ID NO: 17356 - RNA, 1260 nt, Artificial Sequence
  SARS-CoV-2__MT811513.1__nucleocapsid protein (N) CDS gc
augagcgacaacggcccccagaaccagcgcaacgccccgcggaucaccuucgggggccccuccgacagcaccggguccaaccagaacggcgagcgcagcggggcccgguccaagcagcgccggccccagggccugcccaacaacacggcgagcugguucaccgcccucacccagcacggcaaggaggaccugaaguucccgcgcgggcagggcgugcccaucaacaccaacuccagccccgacgaccagaucggguacuaccggcgcgccacgcggcgcauccggggcggggacggcaagaugaaggaccugagcccccgcugguacuucuacuaccucggcaccgggccggaggccggccugcccuacggggccaacaaggacggcaucaucugggucgcgaccgagggcgcccugaacacccccaaggaccacaucgggacgcggaaccccgccaacaacgccgcgaucgugcuccagcugccgcagggcaccacccugcccaagggguucuacgccgagggcagccgcgggggcucccaggccagcucccggagcuccagccgcucccggaacagccuccgcaacuccacccccggcagcagccgggggacgucccccgcccgcauggccggcaacgggggcgacgcggcccuggcccugcuccugcuggaccggcucaaccagcuggagagcaagauguccgggaagggccagcagcagcagggccagaccgugaccaagaaguccgccgccgaggcguccaagaagccgcgccagaagcgcaccgccacgaaggccuacaacgucacccaggccuucgggcggcgcggccccgagcagauccaggggaacuucggcgaccaggagcugauccggcaggggaccgacuacaagcacuggccccagaucgcccaguucgcgcccagcgccuccgccuucuucggcaugagccgcaucggcauggaggugaccccguccgggacguggcucaccuacaccggcgccaucaagcuggacgacaaggaccccaacuucaaggaccaggugauccugcucaacaagcacaucgacgccuacaagaccuucccgcccacggagcccaagaaggacaagaagaagaaggcggacgagacccaggcccugagccagcggcagaagaagcagcagaccgucacccugcuccccgccgccgaccuggacgacuucuccaagcagcugcagcagagcauguccagcgcggacuccacgcaggccuga

SEQ ID NO: 17357 - RNA, 1260 nt, Artificial Sequence
  SARS-CoV-2__MT811515.1__nucleocapsid protein (N) CDS gc
augagcgacaacggcccccagaaccagcgcaacgccccgcggaucaccuucgggggccuguccgacagcaccggguccaaccagaacggcgagcgcagcggggcccgguccaagcagcgccggccccagggccuccccaacaacacggcgagcugguucaccgcccugacccagcacggcaaggaggaccugaaguucccccgcgggcagggcgugccgaucaacaccaacuccagccccgacgaccagaucggguacuaccggcgcgccacgcggcgcauccggggcggggacggcaagaugaaggaccucagcccccgcugguacuucuacuaccugggcaccgggcccgaggccggccugccguacggggccaacaaggacggcaucaucugggucgcgaccgagggcgcccucaacacccccaaggaccacaucgggacgcggaaccccgccaacaacgccgcgaucgugcugcagcugccccagggcaccacccucccgaagggguucuacgccgagggcagccgcgggggcucccaggccagcucccggagcuccagccgcucccggaacagccugcgcaacuccacccccggcagcagccgggggacgucccccgcccgcauggccggcaacgggggcgacgcggcccuggcccuccugcugcucgaccggcugaaccagcuggagagcaagauguccgggaagggccagcagcagcagggccagaccgugaccaagaaguccgccgccgaggcguccaagaagccccgccagaagcgcaccgccacgaaggccuacaacgucacccaggccuucgggcggcgcggcccggagcagacccaggggaacuucggcgaccaggagcucauccggcaggggaccgacuacaagcacuggccccagaucgcccaguucgcgcccagcgccuccgccuucuucggcaugagccgcaucggcauggaggugacgcccuccgggaccuggcugaccuacaccggcgccaucaagcuggacgacaaggacccgaacuucaaggaccaggugauccuccugaacaagcacaucgacgccuacaagacguucccgcccaccgagcccaagaaggacaagaagaagaaggcggacgagacccaggcccugccccagcggcagaagaagcagcagaccgucacgcuccugcccgccgccgaccuggacgacuucagcaagcagcuccagcaguccaugagcuccgcggacagcacccaggccuga

SEQ ID NO: 17358 - RNA, 1260 nt, Artificial Sequence
  SARS-CoV-2__MT811521.1__nucleocapsid protein (N) CDS gc
augagcgacaacggcccccagaaccagcgcaacgccccgcggaucaccuucgggggccccuccgacagcaccggguccaaccagaacggcgagcgcagcggggcccgguccaagcagcgccggccccagggccugcccaacaacacggcgagcugguucaccgcccucacccagcacggcaaggaggaccugaaguucccgcgcgggcagggcgugcccaucaacaccaacuccagccccgacgaccagaucggguacuaccggcgcgccacgcggcgcauccggggcggggacggcaagaugaaggaccugagcccccgcugguacuucuacuaccucggcaccgggccggaggccggccugcccuacggggccaacaaggacggcaucaucugggucgcgaccgagggcgcccugaacacccccaaggaccacaucgggacgcggaaccccgccaacaacgccgcgaucgugcuccagcugccgcagggcaccacccugcccaagggguucuacgccgagggcucccgcgggggcucccaggccagcucccggagcuccagccgcucccggaacagcucccgcaacagcacccccggcagcucccgggggacgagccccgcccgcauggccggcaacgggggcgacgcggcccucacccugcugcuccuggaccggcugaaccagcucgaguccaagaugagcgggaagggccagcagcagcagggccagaccgugaccaagaaguccgccgccgaggccagcaagaagccgcgccagaagcgcacggcgaccaaggccuacaacgucacccaggccuucgggcggcgcggccccgagcagacccaggggaacuucggcgaccaggagcugauccggcaggggacggacuacaagcacuggccccagaucgcccaguucgcccccuccgcgagcgccuucuucggcaugucccgcaucggcauggaggugaccccgagcgggaccuggcugaccuacacgggcgccaucaagcucgacgacaaggaccccaacuucaaggaccaggugauccugcugaacaagcacaucgacgccuacaagaccuucccgcccaccgagcccaagaaggacaagaagaagaaggccgacgagacccaggcgcucccccagcggcagaagaagcagcagacggucacccugcugcccgccgccgaccucgacgacuucuccaagcagcugcagcagagcauguccagcgccgacuccacccaggcguga

SEQ ID NO: 17359 - RNA, 1260 nt, Artificial Sequence
  SARS-CoV-2__MT811726.1__nucleocapsid protein (N) CDS gc
augagcgacaacggcccccagaaccagcgcaacgccccgcggaucaccuucgggggccccuccgacagcaccggguccaaccagaacggcgagcgcagcggggcccgguccaagcagcgccggccccagggccugcccaacaacacggcgagcugguucaccgcccucacccagcacggcaaggaggaccugaaguucccgcgcgggcagggcgugcccaucaacaccaacuccagccccgacgaccagaucggguacuaccggcgcgccacgcggcgcauccggggcggggacggcaagaugaaggaccugagcccccgcugguacuucuacuaccucggcaccgggccggaggccggccugcccuacggggccaacaaggacggcaucaucugggucgcgaccgagggcgcccugaacaccagcaaggaccacaucgggacgcggaaccccgccaacaacgccgcgaucgugcuccagcugccccagggcaccacccugccgaagggguucuacgccgagggcucccgcgggggcagccaggccuccagccgguccagcucccgcagccggaacuccagccgcaacagcacccccggcuccagccgggggacgucccccgcccgcauggccggcaacgggggcgacgcggcccucgcccugcugcuccuggaccggcugaaccagcucgagagcaagauguccgggaagggccagcagcagcagggccagaccgugaccaagaaguccgccgccgaggcguccaagaagccccgccagaagcgcaccgccacgaaggccuacaacgucacccaggccuucgggcggcgcggcccggagcagacccaggggaacuucggcgaccaggagcugauccggcaggggaccgacuacaagcacuggccccagaucgcccaguucgcgcccagcgccuccgccuucuucggcaugagccgcaucggcauggaggugacgcccuccgggaccuggcugaccuacaccggcgccaucaagcucgacgacaaggacccgaacuucaaggaccaggugauccugcugaacaagcacaucgacgccuacaagacguucccgcccaccgagcccaagaaggacaagaagaagaaggcggacgagacccaggcccucccccagcggcagaagaagcagcagaccgucacgcugcugcccgccgccgaccucgacgacuucagcaagcagcugcagcaguccaugagcuccgcggacagcacccaggccuga

SEQ ID NO: 17360 - RNA, 1260 nt, Artificial Sequence
  SARS-CoV-2__MT806773.1__nucleocapsid protein (N) CDS gc
augagcgacaacggcccccagaaccagcgcaacgccccgcggaucaccuucgggggccccuccgacagcaccggguccaaccagaacggcgagcgcagcggggcccgguccaagcagcgccggccccagggccugcccaacaacacggcgagcugguucaccgcccucacccagcacggcaaggaggaccugaaguucccgcgcgggcagggcgugcccaucaacaccaacuccagccccgacgaccagaucggguacuaccggcgcgccacgcggcgcauccggggcggggacggcaagaugaaggaccugagcccccgcugguacuucuacuaccucggcaccgggccggaggccggccugcccuacggggccaacaaggacggcaucaucugggucgcgaccgagggcgcccugaacacccccaaggaccacaucgggacgcggaaccccgccaacaacgccgcgaucgugcuccagcugccgcagggcaccacccugcccaagggguucuacgccgagggcagccgcgggggcucccaggccagcucccggagcuccagccgcucccggaacagcucccgcaacagcacccccggcagcauccgggggacgucccccgcccgcauggccggcaacgggggcgacgcggcccucgcccugcugcuccuggaccggcugaaccagcucgagagcaagauguccgggaagggccagcagcagcagggccagaccgugaccaagaaguccgccgccgaggcguccaagaagccgcgccagaagcgcaccgccacgaaggccuacaacgucacccaggccuucgggcggcgcggccccgagcagacccaggggaacuucggcgaccaggagcugauccggcaggggaccgacuacaagcacuggccccagaucgcccaguucgcgcccagcgccuccgccuucuucggcaugagccgcaucggcauggaggugacgccguccgggaccuggcugaccuacaccggcgccaucaagcucgacgacaaggaccccaacuucaaggaccaggugauccugcugaacaagcacaucgacgccuacaagacguucccgcccaccgagcccaagaaggacaagaagaagaaggcggacgagacccaggcccucccccagcggcagaagaagcagcagaccgucacgcugcugcccgccgccgaccucgacgacuucagcaagcagcugcagcaguccaugagcuccgcggacagcacccaggccuga

SEQ ID NO: 17361 - RNA, 1260 nt, Artificial Sequence
  SARS-CoV-2__MT806776.1__nucleocapsid protein (N) CDS gc
augagcgacaacggcccccagaaccagcgcaacgccccgcggaucaccuucgggggccccuccgacagcaccggguccaaccagaacggcgagcgcagcggggcccgguccaagcagcgccggccccagggccugcccaacaacacggcgagcugguucaccgcccucacccagcacggcaaggaggaccugaaguucccgcgcgggcagggcgugcccaucaacaccaacuccagccccgacgaccagaucggguacuaccggcgcgccacgcggcgcauccggggcggggacggcaagaugaaggaccugagcccccgcugguacuucuacuaccucggcaccgggccggaggccggccugcccuacggggccaacaaggacggcaucaucugggucgcgaccgagggcgcccugaacacccccaaggaccacaucgggacgcggaaccccgccaacaacgccgcgaucgugcuccagcugccgcagggcaccacccugcccaagggguucuacgccgagggcucccgcgggggcucccaggccagcucccggagcuccagccgcucccggaacagcucccgcaacagcacccccggcagcucccgggggacgagccccgcccgcauggccggcaacgggggcgacgcggcccucgcccugcugcuccuggaccggcugaaccagcucgaguccaagaugagcgggaagggccagcagcagcagggccagaccgugaccaagaaguccgccgccgaggcgagcaagaagccgcgccagaagcgcaccgccacgaaggccuacaacgucacccaggccuucgggcggcgcggccccgagcagacccaggggaacuucggcgaccaggagcugauccggcaggggaccgacuacaagcacuggccccagaucgcccaguucgcgcccuccgccagcgccuucuucggcaugucccgcaucggcauggaggugacgccgagcgggaccuggcugaccuacaccggcgccaucaagcucgacgacaaggaccccaacuucaaggaccaggugauccugcugaacaagcacaucgacgccuacaagacguucccgcccaucgagcccaagaaggacaagaagaagaaggcggacgagacccaggcccucccccagcggcagaagaagcagcagaccgucacccugcugcccgccgccgaccucgacgacuucuccaagcagcugcagcagagcauguccagcgcggacuccacgcaggccuga

SEQ ID NO: 17362 - RNA, 1260 nt, Artificial Sequence
  SARS-CoV-2__MT806778.1__nucleocapsid protein (N) CDS gc
augagcgacaacggcccccagaaccagcgcaacgccccgcggaucaccuucgggggccccuccgacagcaccggguccaaccagaacggcgagcgcagcggggcccgguccaagcagcgccggccccagggccugcccaacaacacggcgagcugguucaccgcccucacccagcacggcaaggaggaccugaaguucccgcgcgggcagggcgugcccaucaacaccaacuccagccccgacgaccagaucggguacuaccggcgcgccacgcggcgcauccggggcggggacggcaagaugaaggaccugagcccccgcugguacuucuacuaccucggcaccgggccggaggccggccugcccuacggggccaacaaggacggcaucaucugggucgcgaccgagggcgcccugaacacccccaaggaccacaucgggacgcggaaccccgccaacaacgccgcgaucgugcuccagcugccgcagggcaccacccugcccaagggguucuacgccgagggcagccgcgggggcucccaggccagcucccggagcuccagccgcucccggaacagcucccgcaacagcacccccggcagcucccgggggacgagccccgcccgcauguccggcaacgggggcgacgccgcgcucgcccugcugcuccuggaccggcugaaccagcucgagagcaagauguccgggaagggccagcagcagcagggccagaccgugaccaagaaguccgccgccgaggccuccaagaagccgcgccagaagcgcaccgcgacgaaggccuacaacgucacccaggccuucgggcggcgcggccccgagcagacccaggggaacuucggcgaccaggagcugauccggcaggggaccgacuacaagcacuggccccagaucgcccaguucgcccccagcgcguccgccuucuucggcaugagccgcaucggcauggaggugacgccguccgggaccuggcugaccuacaccggcgccaucaagcucgacgacaaggaccccaacuucaaggaccaggugauccugcugaacaagcacaucgacgccuacaagacguucccgcccaccgagcccaagaaggacaagaagaagaaggccgacgagacccaggcgcucccccagcggcagaagaagcagcagaccgucacgcugcugcccgccgccgaccucgacgacuucagcaagcagcugcagcaguccaugagcuccgccgacagcacccaggcguga

SEQ ID NO: 17363 - RNA, 1260 nt, Artificial Sequence
  SARS-CoV-2__MT806787.1__nucleocapsid protein (N) CDS gc
augagcgacaacggcccccagaaccagcgcaacgccccgcggaucaccuucgggggccccuccgacagcaccggguccaaccagaacggcgagcgcagcggggcccgguccaagcagcgccggccccagggccugcccaacaacacggcgagcugguucaccgcccucacccagcacggcaaggaggaccugaaguucccgcgcgggcagggcgugcccaucaacaccaacuccagccccgacgaccagaucggguacuaccggcgcgccacgcggcgcauccggggcggggacggcaagaugaaggaccugagcccccgcugguacuucuacuaccucggcaccgggccggaggccggccugcccuacggggccaacaaggacggcaucaucugggucgcgaccgagggcgcccugaacacccccaaggaccacaucgggacgcggaaccccgccaacaacgccgcgaucgugcuccagcugccgcagggcaccacccugcccaagggguucuacgccgagggcucccgcgggggcucccaggccagcucccggagcuccagccgcucccggaacagcucccgcaacagcacccccggcagcucccgggggacgagccccgcccgcauggccggcaacugcggggacgcggcccucgcccugcugcuccuggaccggcugaaccagcucgaguccaagaugagcggcaaggggcagcagcagcagggccagaccgugaccaagaaguccgccgccgaggcgagcaagaagccgcgccagaagcgcaccgccacgaaggccuacaacgucacccaggccuucggccggcgcgggcccgagcagacccagggcaacuucggggaccaggagcugauccggcagggcaccgacuacaagcacuggccccagaucgcccaguucgcgcccuccgccagcgccuucuucgggaugucccgcaucggcauggaggugacgccgagcggcaccuggcugaccuacaccggggccaucaagcucgacgacaaggaccccaacuucaaggaccaggugauccugcugaacaagcacaucgacgccuacaagacguucccgcccaccgagcccaagaaggacaagaagaagaaggcggacgagacccaggcccucccccagcggcagaagaagcagcagaccgucacgcugcugcccgccgccgaccucgacgacuucuccaagcagcugcagcagagcauguccagcgcggacuccacccaggccuga

SEQ ID NO: 17364 - RNA, 1260 nt, Artificial Sequence
  SARS-CoV-2__MT800928.1__nucleocapsid protein (N) CDS gc
augagcgacaacggcccccagaaccagcgcaacgccccgcggaucaccuucgggggccccuccgacagcaccggguccaaccagaacggcgagcgcagcggggcccgguccaagcagcgccggccccagggccugcccaacaacacggcgagcugguucaccgcccucacccagcacggcaaggaggaccugaaguucccgcgcgggcagggcgugcccaucaacaccaacuccagccccgacgaccagaucggguacuaccggcgcgccacgcggcgcauccggggcggggacggcaagaugaaggaccugagcccccgcugguacuucuacuaccucggcaccgggccggaggccggccugcccuacggggccaacaaggacggcaucaucugggucgcgaccgagggcgcccugaacacccccaaggaccacaucgggacgcggaaccccgccaacaacgccgcgaucgugcuccagcugccgcagggcaccacccugcccaagggguucuacgccgagggcagccgcgggggcucccaggccagcucccggagcuccagccgcucccggaacagccuccgcaacuccacccccggcagcagcaagacgaccucccccgcccggauggccgggaacggcggggacgcggcccuggcccugcuccugcuggaccgccucaaccagcuggagagcaagauguccggcaaggggcagcagcagcagggccagaccgugaccaagaaguccgccgccgaggcguccaagaagccgcggcagaagcgcacggccaccaaggccuacaacgucacccaggccuucggccgccgggggcccgagcagacccagggcaacuucggggaccaggagcugauccgccagggcacggacuacaagcacuggccccagaucgcccaguucgcgcccagcgccuccgccuucuucgggaugagccggaucggcauggaggugaccccguccggcaccuggcucaccuacacgggggccaucaagcuggacgacaaggaccccaacuucaaggaccaggugauccugcucaacaagcacaucgacgccuacaagaccuucccgcccaccgagcccaagaaggacaagaagaagaaggcggacgagacccaggcccugccccagcgccagaagaagcagcagacggucacccugcuccccgccgccgaccuggacgacuucagcaagcagcugcagcaguccaugagcuccgcggacagcacccaggccuga

SEQ ID NO: 17365 - RNA, 1260 nt, Artificial Sequence
  SARS-CoV-2__MT797771.1__nucleocapsid protein (N) CDS gc
augagcgacaacggcccccagaaccagcgcaacgccccgcggaucaccuucgggggccccuccgacagcaccggguccaaccagaacggcgagcgcagcggggcccgguccaagcagcgccggccccagggccugcccaacaacacggcgagcugguucaccgcccucacccagcacggcaaggaggaccugaaguucccgcgcgggcagggcgugcccaucaacaccaacuccagccccgacgaccagaucggguacuaccggcgcgccacgcggcgcauccggggcggggacggcaagaugaaggaccugagcccccgcugguacuucuacuaccucggcaccgggccggaggccggccugcccuacggggccaacaaggacggcaucaucugggucgcgaccgagggcgcccugaacacccccaaggaccacaucgggacgcggaaccccgccaacaacgccgcgaucgugcuccagcugccgcagggcaccacccugcccaagggguucuacgccgagggcagccgcgggggcucccaggccagcucccggagcuccagccgcggccggaacuccagccgcaacuccacccccgggagcagccggggcacgucccccgcccgcauggccgggaacggcggggacgcggcccucgcccugcugcuccuggaccggcugaaccagcucgagagcaagauguccggcaagggccagcagcagcaggggcagaccgugaccaagaaguccgccgccgaggcguccaagaagccgcgccagaagcgcaccgccacgaaggccuacaacgucacccaggccuucggccggcgcgggcccgagcagacccagggcaacuucggggaccaggagcugauccggcagggcaccgacuacaagcacuggccccagaucgcccaguucgcgcccagcgccuccgccuucuucggcaugagccgcaucgggauggaggugacgccguccggcaccuggcugaccuacaccggggccaucaagcucgacgacaaggaccccaacuucaaggaccaggugauccugcugaacaagcacaucgacgccuacaagacguucccgcccaccgagcccaagaaggacaagaagaagaaggcggacgagacccaggcccuccugcagcggcagaagaagcagcagaccgucacgcugcuccccgccgccgaccuggacgacuucagcaagcagcugcagcaguccaugagcuccgcggacagcacccaggccuga

SEQ ID NO: 17366 - RNA, 1260 nt, Artificial Sequence
  SARS-CoV-2__MT791844.1__nucleocapsid protein (N) CDS gc
augagcgacaacggcccccagaaccagcgcaacgccccgcggaucaccuucgggggccccuccgacagcaccggguccaaccagaacggcgagcgcagcggggcccgguccaagcagcgccggccccagggccugcccaacaacacggcgagcugguucaccgcccucacccagcacggcaaggaggaccugaaguucccgcgcgggcagggcgugcccaucaacaccaacuccagccccgacgaccagaucggguacuaccggcgcgccacgcggcgcauccggggcggggacggcaagaugaaggaccugagcccccgcugguacuucuacuaccucggcaccgggccggaggccggccugcccuacggggccaacaaggacggcaucaucugggucgcgaccgagggcgcccugaacauccccaaggaccacaucgggacccggaaccccgccaacaacgccgcgaucgugcuccagcugccgcagggcacgacccugcccaagggguucuacgccgagggcucccgcgggggcucccaggccagcucccggagcuccagccgcucccggaacagcucccgcaacagcacccccggcagcucccgggggaccagccccgcccgcauggccggcaacgggggcgacgcggcccucgcccugcugcuccuggaccggcugaaccagcucgaguccaagaugagcgggaagggccagcagcagcagggccagacggugaccaagaaguccgccgccgaggcgagcaagaagccgcgccagaagcgcaccgccaccaaggccuacaacgucacgcaggccuucgggcggcgcggccccgagcagacccaggggaacuucggcgaccaggagcugauccggcaggggaccgacuacaagcacuggccccagaucgcccaguucgcgcccuccgccagcgccuucuucggcaugucccgcaucggcauggaggugaccccgagcgggacguggcugaccuacaccggcgccaucaagcucgacgacaaggaccccaacuucaaggaccaggugauccugcugaacaagcacaucgacgccuacaagaccuucccgcccacggagcccaagaaggacaagaagaagaaggcggacgagacccaggcccucccccagcggcagaagaagcagcagaccgucacccugcugcccgccgccgaccucgacgacuucuccaagcagcugcagcagagcauguccagcgcggacuccacgcaggccuga

SEQ ID NO: 17367 - RNA, 1260 nt, Artificial Sequence
  SARS-CoV-2__MT791858.1__nucleocapsid protein (N) CDS gc
augagcgacaacggcccccagaaccagcgcaacgccccgcggaucaccuucgggggccccuccgggagcaccggcuccaaccagaacggggagcgcagcggcgcccgguccaagcagcgccggccccagggccugcccaacaacacggcgagcugguucaccgcccucacccagcacgggaaggaggaccugaaguucccgcgcggccagggggugcccaucaacaccaacuccagccccgacgaccagaucggcuacuaccggcgcgccacgcggcgcauccgcgggggcgacggcaagaugaaggaccugagcccccggugguacuucuacuaccucgggaccggcccggaggccgggcugcccuacggcgccaacaaggacggcaucaucugggucgcgaccgagggggcccugaacacccccaaggaccacaucggcacgcggaaccccgccaacaacgccgcgaucgugcuccagcugccgcaggggaccacccugcccaagggcuucuacgccgaggggucccgcggcggcucccaggccagcucccggagcuccagccgcucccggaacagcucccgcaacagcacccccgggagcucccggggcacgagccccgcccgcauggccgggaacggcggggacgcggcccucgcccugcugcuccuggaccggcugaaccagcucgaguccaagaugagcggcaagggccagcagcagcaggggcagaccgugaccaagaaguccgccgccgaggcgagcaagaagccgcgccagaagcgcaccgccacgaaggccuacaacgucacccaggccuucggccggcgcgggcccgagcagacccagggcaacuucggggaccaggagcugauccggcagggcaccgacuacaagcacuggccccagaucgcccaguucgcgcccuccgccagcgccuucuucggcaugucccgcaucgggauggaggugacgccgagcggcaccuggcugaccuacaccggggccaucaagcucgacgacaaggaccccaacuucaaggaccaggugauccugcugaacaagcacaucgacgccuacaagacguucccgcccaccgagcccaagaaggacaagaagaagaaggcggacgagacccaggcccucccccagcggcagaagaagcagcagaccgucacgcugcugcccgccgccgaccucgacgacuucuccaagcagcugcagcagagcauguccagcgcggacuccacccaggccuga

SEQ ID NO: 17368 - RNA, 1260 nt, Artificial Sequence
  SARS-CoV-2__MT791862.1__nucleocapsid protein (N) CDS gc
augagcgacaacggcccccagaaccagcgcaacgccccgcggaucaccuucgggggccccuccgacagcaccggguccaaccagaacggcgagcgcagcggggcccgguccaagcagcgccggccccagggccugcccaacaacacggcgagcugguucaccgcccucacccagcacggcaaggaggaccugaaguucccgcgcgggcagggcgugcccaucaacaccaacuccagccccgacgaccagaucggguacuaccggcgcgccacgcggcgcauccggggcggggacggcaagaugaaggaccugagcccccgcugguacuucuacuaccucggcaccgggccggaggccggccugcccuacggggccaacaaggacggcaucaucugggucgcgaccgagggcgcccugaacacccccaaggaccacaucgggacgcggaaccccgccaacaacgccgcgaucgugcuccagcugccgcagggcaccacccugcccaagggguucuacgccgagggcagccgcgggggcacccaggccuccagccgguccagcucccgcagccggaacuccagccgcaacuccacgcccggcagcagccgggggaccucccccgcccgcauggccggcaacgggggcgacgcggcccucgcccugcugcuccuggaccggcugaaccagcucgagagcaagauguccgggaagggccagcagcagcagggccagaccgugaccaagaaguccgccgccgaggcguccaagaagccgcgccagaagcgcacggccaccaaggccuacaacgucacccaggccuucgggcggcgcggccccgagcagacccaggggaacuucggcgaccaggagcugauccggcaggggacggacuacaagcacuggccccagaucgcccaguucgcgcccagcgccuccgccuucuucggcaugagccgcaucggcauggaggugaccccguccgggaccuggcugaccuacacgggcgccaucaagcucgacgacaaggaccccaacuucaaggaccaggugauccugcugaacaagcacaucgacgccuacaagaccuucccgcccaccgagcccaagaaggacaagaagaagaaggcggacgagacccaggcccucccccagcggcagaagaagcagcagacggucacccugcugcccgccgccgaccucgacgacuucagcaagcagcugcagcaguccaugagcuccgcggacagcacccaggccuga

SEQ ID NO: 17369 - RNA, 1260 nt, Artificial Sequence
  SARS-CoV-2__MT791896.1__nucleocapsid protein (N) CDS gc
augagcgacaacggcccccagaaccagcgcaacgugccgcggaucaccuucgggggccccuccgacagcaccggguccaaccagaacggcgagcgcagcggggcccgguccaagcagcgccggccccagggccugcccaacaacacggccagcugguucaccgcgcucacccagcacggcaaggaggaccugaaguucccgcgcgggcagggcguccccaucaacaccaacuccagccccgacgaccagaucggguacuaccggcgcgccacgcggcgcauccggggcggggacggcaagaugaaggaccugagcccccgcugguacuucuacuaccucggcaccgggccggaggccggccugcccuacggggccaacaaggacggcaucaucuggguggccaccgagggcgcgcugaacacccccaaggaccacaucgggacgcggaaccccgccaacaacgccgccaucgugcuccagcugccgcagggcaccacccugcccaagggguucuacgcggagggcucccgcgggggcucccaggccagcucccggagcuccagccgcucccggaacagcucccgcaacagcacccccggcagcucccgggggacgagccccgcccgcauggccggcaacgggggcgacgccgcgcucgcccugcugcuccuggaccggcugaaccagcucgaguccaagaugagcgggaagggccagcagcagcagggccagaccgucaccaagaaguccgccgccgaggccagcaagaagccgcgccagaagcgcaccgcgacgaaggccuacaacgugacccaggccuucgggcggcgcggccccgagcagacccaggggaacuucggcgaccaggagcugauccggcaggggaccgacuacaagcacuggccccagaucgcccaguucgcccccuccgcgagcgccuucuucggcaugucccgcaucggcauggaggugacgccgagcgggaccuggcugaccuacaccggcgccaucaagcucgacgacaaggaccccaacuucaaggaccaggucauccugcugaacaagcacaucgacgccuacaagacguucccgcccaccgagcccaagaaggacaagaagaagaaggccgacgagacccaggcgcucccccagcggcagaagaagcagcagaccgugacgcugcugcccgccgccgaccucgacgacuucuccaagcagcugcagcagagcauguccagcgccgacuccacccaggcguga

SEQ ID NO: 17370 - RNA, 1260 nt, Artificial Sequence
  SARS-CoV-2__MT791938.1__nucleocapsid protein (N) CDS gc
augagcgacaacggcccccagaaccagcgcaacgccccgcggaucaccuucgggggccccuccgacagcaccggguccaaccagaacggcgagcgcagcggggcccgguccaagcagcgccggccccagggccugcccaacaacacggcgagcugguucaccgcccucacccagcacggcaaggaggaccugaaguucccgcgcgggcagggcgugcccaucaacaccaacuccagccccgacgaccagaucggguacuaccggcgcgccacgcggcgcauccggggcggggacggcaagaugaaggaccugagcccccgcugguacuucuacuaccucggcaccgggccggagagcggccugcccuacggggccaacaaggacggcaucaucugggucgccaccgagggcgcgcugaacacccccaaggaccacaucgggacgcggaaccccgccaacaacgccgccaucgugcuccagcugccgcagggcaccacccugcccaagggguucuacgcggagggcucccgcgggggcagccaggccuccagccgguccagcucccgcagccggaacuccagccgcaacagcacccccggcuccagccgggggacgucccccgcccgcauggccggcaacgggggcgacgccgcgcucgcccugcugcuccuggaccggcugaaccagcucgagagcaagauguccgggaagggccagcagcagcagggccagaccgugaccaagaaguccgccgccgaggccuccaagaagccgcgccagaagcgcaccgcgacgaaggccuacaacgucacccaggccuucgggcggcgcggccccgagcagacccaggggaacuucggcgaccaggagcugauccggcaggggaccgacuacaagcacuggccccagaucgcccaguucgcccccagcgcguccgccuucuucggcaugagccgcaucggcauggaggugacgccguccgggaccuggcugaccuacaccggcgccaucaagcucgacgacaaggaccccaacuucaaggaccaggugauccugcugaacaagcacaucgacgccuacaagacguucccgcccaccgagcccaagaaggacaagaagaagaaggccgacgagacccaggcgcucccccagcggcagaagaagcagcagaccgucacgcugcugcccgccgccgaccucgacgacuucagcaagcagcugcagcaguccaugagcuccgccgacagcacccaggcguga

SEQ ID NO: 17371 - RNA, 1260 nt, Artificial Sequence
  SARS-CoV-2__MT791944.1__nucleocapsid protein (N) CDS gc
augagcgacaacggcccccagaaccagcgcaacgccccgcggaucaccuucgggggccccuccgacagcaccggguccaaccagaacggcgagcgcagcggggcccgguccaagcagcgccggccccagggccugcccaacaacacggcgagcugguucaccgcccucacccagcacggcaaggaggaccugaaguucccgcgcgggcagggcgugcccaucaacaccaacuccagccccgacgaccagaucggguacuaccggcgcgccacgcggcgcauccggggcggggacggcaagaugaaggaccugagcccccgcugguacuucuacuaccucggcaccgggccggaggccggccugcccuacggggccaacaaggacggcaucaucugggucgcgaccgagggcgcccugaacacccccaaggaccacaucgggacgcggaaccccgccaacaacgccgcgaucgugcuccagcugccgcagggcaccacccugcccaagggguucuacgccgagggcucccgcgggggcucccaggccagcucccggagcuccagccgcucccggaacagcucccgcaacagcacccccggcagcucccgggggacgagccccgcccgcauggccggcaacgggggcgacgcggcccucgcccugcugcuccuggaccggcugaaccagcucgaguccaagaugagcgggaagggccagcagcagcagggccagaccgugaccaagaaguccgccgccgaggcgagcaagaagccgcgccagaagcgcaccgccacgaaggccuacaacgucacccaggccuucgggcggcgcggccccgagcagacccaggggaacuucggcgaccaggagcugauccggcaggggaccgacuacaagcaguggccccagaucgcccaguucgcgcccuccgccagcgccuucuucggcaugucccgcaucggcauggaggugacgccgagcgggaccuggcugaccuacaccggcgccaucaagcucgacgacaaggaccccaacuucaaggaccaggugauccugcugaacaagcacaucgacgccuacaagacguucccgcccaccgagcccaagaaggacaagaagaagaaggcggacgagacccaggcccucccccagcggcagaagaagcagcagaccgucacgcugcugcccgccgccgaccucgacgacuucuccaagcagcugcagcagagcauguccagcgcggacuccacccaggccuga

SEQ ID NO: 17372 - RNA, 1260 nt, Artificial Sequence
  SARS-CoV-2__MT791948.1__nucleocapsid protein (N) CDS gc
augagcgacaacggcccccagaaccagcgcaacgccccgcggaucaccuucgggggccccuccgacagcaccggguccaaccagaacggcgagcgcagcggggcccgguccaagcagcgccggccccagggccugcccaacaacacggcgagcugguucaccgcccucacccagcacggcaaggaggaccugaaguucccgcgcgggcagggcgugcccaucaacaccaacuccagccccgacgaccagaucggguacuaccggcgcgccacgcggcgcauccggggcggggacggcaagaugaaggaccugagcccccgcugguacuucuacuaccucggcaccgggccggaggccggccugcccuacggggccaacaaggacggcaucaucugggucgcgaccgagggcgcccugaacacccccaaggaccacaucgggacgcggaaccccgccaacaacgccgcgaucgugcuccagcugccgcagggcaccacccugcccaagggguucuacgccgagggcucccgcgggggcucccaggccagcucccggagcuccagccgcucccggaacagcucccgcaacagcacccccggcagcucccgggggacgagccccgcccgcauggccggcaacgggggcgacgcggcccucgcccugcugcuccuggaccggcugaaccagcucgaguccaagaugagcgggaagggccagcagcagcagggccagaccgugaccaagaaguccgccgccgaggcgagcaagaagccgcgccagaagcgcaccgccacgaaggccuacaacgucacccaggccuucgggcggcgcggccccgagcagacccaggggaacuucggcgaccaggagcugauccggcaggggaccgacuacaagcacuggccccagaucgcccaguucgcgcccuccgccagcgccuucuucggcaugucccgcaucggcauggaggugacgccgagcgggaccuggcugaccuacaccggcgccaucaagcucgacgacaaggaccccaacuucaaggaccaggugauccugcugaacaagcacaucgacgccuacaagacguucccgcccaccgagcccaagaaggacaagaagaagaaggcggacgagacccaggcccucccccagcggcagaagaagcagcagaccgucacgcugcugcccgccgccgaccucgacgacuucuccaagcagcugcagcagagcauguccagcgcggacuccacccagagcuga

SEQ ID NO: 17373 - RNA, 1260 nt, Artificial Sequence
  SARS-CoV-2__MT786836.1__nucleocapsid protein (N) CDS gc
augagcgacaacggcccccagaaccagcgcaacgccccgcggaucaccuucgggggccccuccgacagcaccggguccaaccagaacggcgagcgcagcggggcccgguccaagcagcgccggccccagggccugcccaacaacacggcgagcugguucaccgcccucacccagcacggcaaggaggaccugaaguucccgcgcgggcagggcgugcccaucaacaccaacuccagccccgacgaccagaucggguacuaccggcgcgccacgcggcgcauccggggcggggacggcaagaugaaggaccugagcccccgcugguacuucuacuaccucggcaccgggccggaggccggccugcccuacggggccaacaaggacggcaucaucugggucgcgaccgagggcgcccugaacacccccaaggaccacaucgggacgcggaaccccgccaacaacgccgcgaucgugcuccagcugccgcagggcaccacccugcccaagggguucuacgccgagggcucccgcgggggcucccaggccagcucccggagcuccagccgcucccggaacagcuccaagaacagcacccccggcagcucccgcgggacgagccccgcccggauggccggcaacgggggcgacgcggcccucgcccugcugcuccuggaccgccugaaccagcucgaguccaagaugagcgggaagggccagcagcagcagggccagaccgugaccaagaaguccgccgccgaggcgagcaagaagccgcggcagaagcgcaccgccacgaaggccuacaacgucacccaggccuucgggcgccggggccccgagcagacccaggggaacuucggcgaccaggagcugauccgccaggggaccgacuacaagcacuggccccagaucgcccaguucgcgcccuccgccagcgccuucuucggcaugucccggaucggcauggaggugacgccgagcgggaccuggcugaccuacaccggcgccaucaagcucgacgacaaggaccccaacuucaaggaccaggugauccugcugaacaagcacaucgacgccuacaagacguucccgcccaccgagcccaagaaggacaagaagaagaaggcggacgagacccaggcccucccccagcgccagaagaagcagcagaccgucacgcugcugcccgccgccgaccucgacgacuucuccaagcagcugcagcagagcauguccagcgcggacuccacccaggccuga

SEQ ID NO: 17374 - RNA, 1260 nt, Artificial Sequence
  SARS-CoV-2__MT786839.1__nucleocapsid protein (N) CDS gc
augagcgacaacggcccccagaaccagcgcaacgccccgcggaucaccuucgggggccccuccgacagcaccggguccaaccagaacggcgagcgcagcggggcccgguccaagcagcgccggccccagggccugcccaacaacacggcgagcugguucaccgcccucacccagcacggcaaggaggaccugaaguucccgcgcgggcagggcgugcccaucaacaccaacuccagccccgacgaccagaucggguacuaccggcgcgccacgcggcgcauccggggcggggacggcaagaugaaggaccugagcccccgcugguacuucuacuaccucggcaccgggccggaggccggccugcccuacggggccaacaaggacggcaucaucugggucgcgaccgagggcgcccugaacacccccaaggaccacaucgggacgcggaaccccgccaacaacgccgcgaucgugcuccagcugccgcagggcaccacccugcccaagggguucuacgccgagggcucccgcgggggcucccaggccagcucccggagcuccagccgcucccggaacagcucccgcaacagcacccccggcagcucccgggggaucagccccggccgcauggccgggaacggcggggacgccgcgcucgcccugcugcuccuggaccggcugaaccagcucgaguccaagaugagcggcaagggccagcagcagcaggggcagacggugaccaagaaguccgccgccgaggccagcaagaagccgcgccagaagcgcaccgcgaccaaggccuacaacgucacgcaggccuucggccggcgcgggcccgagcagacccagggcaacuucggggaccaggagcugauccggcagggcaccgacuacaagcacuggccccagaucgcccaguucgcccccuccgcgagcgccuucuucggcaugucccgcaucgggauggaggugaccccgagcggcacguggcugaccuacaccggggccaucaagcucgacgacaaggaccccaacuucaaggaccaggugauccugcugaacaagcacaucgacgccuacaagaccuucccgcccacggagcccaagaaggacaagaagaagaaggccgacgagacccaggcgcucccccagcggcagaagaagcagcagaccgucacccugcugcccgccgccgaccucgacgacuucuccaagcagcugcagcagagcauguccagcgccgacuccacgcaggcguga

SEQ ID NO: 17375 - RNA, 1260 nt, Artificial Sequence
  SARS-CoV-2__MT787500.1__nucleocapsid protein (N) CDS gc
augagcgacaacggcccccagaaccagcgcaacgccccgcggaucaccuucgggggccccuccgacagcaccggguccaaccagaacggcgagcgcagcggggcccgguccaagcagcgccggccccagggccugcccaacaacacggcgagcugguucaccgcccucacccagcacggcaaggaggaccugaaguucccgcgcgggcagggcgugcccaucaacaccaacuccagccccgacgaccagaucggguacuaccggcgcgccacgcggcgcauccggggcggggacggcaagaugaaggaccugagcccccgcugguacuucuacuaccucggcaccgggccggaggccggccugcccuacggggccaacaaggacggcaucaucugggucgcgaccgagggcgcccugaacacccccaaggaccacaucgggacgcggaaccccgccaacaacgccgcgaucgugcuccagcugccgcagggcaccacccugcccaagggguucuacgccgagggcucccgcgggggcucccaggccagcucccggagcuccagccgcucccggaacagcuccaucaacagcacccccggcagcucccgcgggacgagccccgcccggauggccggcaacgggggcgacgcggcccucgcccugcugcuccuggaccgccugaaccagcucgaguccaagaugagcgggaagggccagcagcagcagggccagaccgugaccaagaaguccgccgccgaggcgagcaagaagccgcggcagaagcgcaccgccacgaaggccuacaacgucacccaggccuucgggcgccggggccccgagcagacccaggggaacuucggcgaccaggagcugauccgccaggggaccgacuacaagcacuggccccagaucgcccaguucgcgcccuccgccagcgccuucuucggcaugucccggaucggcauggaggugacgccgagcgggaccuggcugaccuacaccggcgccaucaagcucgacgacaaggaccccaacuucaaggaccaggugauccugcugaacaagcacaucgacgccuacaagacguucccgcccaccgagcccaagaaggacaagaagaagaaggcggacgagacccaggcccucccccagcgccagaagaagcagcagaccgucacgcugcugcccgccgccgaccucgacgacuucuccaagcagcugcagcagagcauguccagcgcggacuccacccaggccuga

SEQ ID NO: 17376 - RNA, 1260 nt, Artificial Sequence
  SARS-CoV-2__MT787564.1__nucleocapsid protein (N) CDS gc
augagcgacaacggcccccagaaccagcgcaacgccccgcggaucaccuucgggggccccuccgacagcaccggguccaaccagaacggcgagcgcagcggggcccgguccaagcagcgccggccccagggccugcccaacaacacggcgagcugguucaccgcccucacccagcacggcaaggaggaccugaaguucccgcgcgggcagggcgugcccaucaacaccaacuccagccccgacgaccagaucggguacuaccggcgcgccacgcggcgcauccggggcggggacggcaagaugaaggaccugagcccccgcugguacuucuacuaccucggcaccgggccggaggccggccugcccuacggggccaacaaggacggcaucaucugggucgcgaccgagggcgcccugaacacccccaaggaccacaucgggacgcggaaccccgccaacaacgccgcgaucgugcuccagcugccgcagggcaccacccugcccaagggguucuacgccgagggcucccgcgggggcucccaggccagcucccggagcuccagccgcucccggaacagcucccgcaacagcacccccggcagcuccaagcggacgagccccgcccgcauggccgggaacggcggggacgcggcccucgcccugcugcuccuggaccggcugaaccagcucgaguccaagaugagcggcaaggggcagcagcagcagggccagaccgugaccaagaaguccgccgccgaggcgagcaagaagccgcgccagaagcgcaccgccacgaaggccuacaacgucacccaggccuucggccggcgcgggcccgagcagacccagggcaacuucggggaccaggagcugauccggcagggcaccgacuacaaguacuggccccagaucgcccaguucgcgcccuccgccagcgccuucuucgggaugucccgcaucggcauggaggugacgccgagcggcaccuggcugaccuacaccggggccaucaagcucgacgacaaggaccccaacuucaaggaccaggugauccugcugaacaagcacaucgacgccuacaagacguucccgcccaccgagcccaagaaggacaagaagaagaaggcggacgagacccaggcccucccccagcggcagaagaagcagcagaccgucacgcugcugcccgccgccgaccucgacgacuucuccaagcagcugcagcagagcauguccagcgcggacuccacccaggccuga

SEQ ID NO: 17377 - RNA, 1260 nt, Artificial Sequence
  SARS-CoV-2__MT789690.1__nucleocapsid protein (N) CDS gc
augagcgacaacggcccccagaaccagcgcaacgccccgcggaucaccuucgggggccccuccgacagcaccggguccaaccagaacggcgagcgcagcggggcccgguccaagcagcgccggccccagggccugcccaacaacacggcgagcugguucaccgcccucacccagcacggcaaggaggaccugaaguucccgcgcgggcagggcgugcccaucaacaccaacuccagccccgacgaccagaucggguacuaccggcgcgccacgcggcgcauccggggcggggacggcaagaugaaggaccugagcccccgcugguacuucuacuaccucggcaccgggccggaggccggccugcccuacggggccaacaaggacggcaucaucugggucgcgaccgagggcgccuucaacacccccaaggaccacaucgggacgcggaaccccgccaacaacgccgcgaucgugcugcagcucccgcagggcaccacccugcccaagggguucuacgccgagggcagccgcgggggcucccaggccagcucccggagcuccagccgcucccggaacagccugcgcaacuccacccccggcagcagccgggggacgucccccgcccgcauggccggcaacgggggcgacgcggcccucgcccugcugcuccuggaccggcugaaccagcucgagagcaagauguccgggaagggccagcagcagcagggccagaccgugaccaagaaguccgccgccgaggcguccaagaagccgcgccagaagcgcaccgccacgaaggccuacaacgucacccaggccuucgggcggcgcggccccgagcagacccaggggaacuucggcgaccaggagcugauccggcaggggaccgacuacaagcacuggccccagaucgcccaguucgcgcccagcgccuccgccuucuucggcaugagccgcaucggcauggaggugacgccguccgggaccuggcugaccuacaccggcgccaucaagcucgacgacaaggaccccaacuucaaggaccaggugauccugcugaacaagcacaucgacgccuacaagacguucccgcccaccgagcccaagaaggacaagaagaagaaggcggacgagacccaggcccucccccagcggcagaagaagcagcagaccgucacgcugcugcccgccgccgaccucgacgacuucagcaagcagcugcagcaguccaugagcuccgcggacagcacccaggccuga

SEQ ID NO: 17378 - RNA, 1260 nt, Artificial Sequence
  SARS-CoV-2__MT775831.1__nucleocapsid protein (N) CDS gc
augagcgacaacggcccccagaaccagcgcaacgccccgcggaucaccuucgggggccccuccgacagcaccggguccaaccagaacggcgagcgcagcggggcccgguccaagcagcgccggccccagggccugcccaacaacacggcgagcugguucaccgcccucacccagcacggcaaggaggaccugaaguucccgcgcgggcagggcgugcccaucaacaccaacuccagccccgacgaccagaucggguacuaccggcgcgccacgcggcgcauccggggcggggacggcaagaugaaggaccugagcccccgcugguacuucuacuaccucggcaccgggccggaggccggccugcccuacggggccaacaaggacggcaucaucugggucgcgaccgagggcgcccugaacacccccaaggaccacaucgggacgcggaaccccgccaacaacgccgcgaucgugcuccagcugccgcagggcaccacccugcccaagggguucuacgccgagggcagccgcgggggcucccaggccagcucccggagcuccagccgcucccggaacagcucccgcaacagcacccccggcaacagcaagcggacgucccccgcccgcauggccgggaacggcggggacgcggcccucgcccugcugcuccuggaccggcugaaccagcucgagagcaagauguccggcaaggggcagcagcagcagggccagaccgugaccaagaaguccgccgccgaggcguccaagaagccgcgccagaagcgcaccgccacgaaggccuacaacgucacccaggccuucggccggcgcgggcccgagcagacccagggcaacuucggggaccaggagcugauccggcagggcaccgacuacaagcacuggccccagaucgcccaguucgcgcccagcgccuccgccuucuucgggaugagccgcaucggcauggaggugacgccguccggcaccuggcugaccuacaccggggccaucaagcucgacgacaaggaccccaacuucaaggaccaggugauccugcugaacaagcacaucgacgccuacaagacguucccgcccaccgagcccaagaaggacaagaagaagaaggcggacgagacccaggcccucccccagcggcagaagaagcagcagaccgucacgcugcugcccgccgccgaccucgacgacuucagcaagcagcugcagcaguccaugagcuccgcggacagcacccaggccuga

SEQ ID NO: 17379 - RNA, 1260 nt, Artificial Sequence
  SARS-CoV-2__MT772427.1__nucleocapsid protein (N) CDS gc
augagcgacaacggcccccagaaccagcgcaacgccccgcggaucaccuucgggggccccuccgacagcaccggguccaaccagaacggcgagcgcagcggggcccgguccaagcagcgccggccccagggccugcccaacaacacggcgagcugguucaccgcccucacccagcacggcaaggaggaccugaaguucccgcgcgggcagggcgugcccaucaacaccaacuccagccccgacgaccagaucggguacuaccggcgcgccacgcggcgcauccggggcggggacggcaagaugaaggaccugagcccccgcugguacuucuacuaccucggcaccgggccggaggccggccugcccuacggggccaacaaggacggcaucaucugggucgcgaccgagggcgcccugaacacccccaaggaccacaucgggacgcggaaccccgccaacaacgccgcgaucgugcuccagcugccgcagggcaccacccugcccaagggguucuacgccgagggcucccgcgggggcucccaggccagcucccggagcuccagccgcucccggaacagcucccgcaacagcacccccggcagcuccauggggacgagccccgcccggauggccggcaacgggggcgacgcggcccucgcccugcugcuccuggaccgccugaaccagcucgaguccaagaugagcgggaagggccagcagcagcagggccagaccgugaccaagaaguccgccgccgaggcgagcaagaagccgcggcagaagcgcaccgccacgaaggccuacaacgucacccaggccuucgggcgccggggccccgagcagacccaggggaacuucggcgaccaggagcugauccgccaggggaccgacuacaagcacuggccccagaucgcccaguucgcgcccuccgccagcgccuucuucggcaugucccggaucggcauggaggugacgccgagcgggaccuggcugaccuacaccggcgccaucaagcucgacgacaaggaccccaacuucaaggaccaggugauccugcugaacaagcacaucgacgccuacaagacguucccgcccaccgagcccaagaaggacaagaagaagaaggcggacgccacccaggcccucccccagcgccagaagaagcagcagaccgucacgcugcugcccgccgcggaccucgacgacuucuccaagcagcugcagcagagcauguccagcgccgacuccacccaggccuga

SEQ ID NO: 17380 - RNA, 1260 nt, Artificial Sequence
  SARS-CoV-2__MT772433.1__nucleocapsid protein (N) CDS gc
augagcgacaacggcccccagaaccagcgcaacgccccgcggaucaccuucgggggccccuccgacagcaccggguccaaccagaacguggagcgcagcggcgcccgguccaagcagcgccggccccaggggcugcccaacaacacggcgagcugguucaccgcccucacccagcacggcaaggaggaccugaaguucccgcgcggccaggggguccccaucaacaccaacuccagccccgacgaccagaucggcuacuaccggcgcgccacgcggcgcauccgcgggggcgacgggaagaugaaggaccugagcccccggugguacuucuacuaccucggcaccggcccggaggccgggcugcccuacggcgccaacaaggacgggaucaucuggguggcgaccgagggcgcccugaacacccccaaggaccacaucggcacgcggaaccccgccaacaacgccgcgaucgugcuccagcugccgcaggggaccacccugcccaagggcuucuacgccgaggggucccgcggcgggucccaggccagcucccggagcuccagccgcucccggaacagcucccgcaacagcacccccggcagcucccggggcacgagccccgcccgcauggccgggaacggcggggacgcggcccucgcccugcugcuccuggaccggcugaaccagcucgaguccaagaugagcggcaaggggcagcagcagcagggccagaccgucaccaagaaguccgccgccgaggcgagcaagaagccgcgccagaagcgcaccgccacgaaggccuacaacgugacccaggccuucggccggcgcgggcccgagcagacccagggcaacuucggggaccaggagcugauccggcagggcaccgacuacaagcacuggccccagaucgcccaguucgcgcccuccgccagcgccuucuucgggaugucccgcaucggcauggaggugacgccgagcggcaccuggcugaccuacaccggggccaucaagcucgacgacaaggaccccaacuucaaggaccaggucauccugcugaacaagcacaucgacgccuacaagacguucccgcccaccgagcccaagaaggacaagaagaagaaggcggacgagacccaggcccucccccagcggcagaagaagcagcagaccgugacgcugcugcccgccgccgaccucgacgacuucuccaagcagcugcagcagagcauguccagcgcggacuccacccaggccuga

SEQ ID NO: 17381 - RNA, 1260 nt, Artificial Sequence
  SARS-CoV-2__MT766907.1__nucleocapsid protein (N) CDS gc
augagcgacaacggcccccagaaccagcgcaacgccccgcggaucaccuucgggggccccuccgacagcaccggguccaaccagaacggcgagcgcagcggggcccgguccaagcagcgccggccccagggccugcccaacaacacggcgagcugguucaccgcccucacccagcacggcaaggaggaccugaaguucccgcgcgggcagggcgugcccaucaacaccaacuccagccccgacgaccagaucggguacuaccggcgcgccacgcggcgcauccggggcggggacggcaagaugaaggaccugagcccccgcugguacuucuacuaccucggcaccgggccggaggccggccugcccuacggggccaacaaggacggcaucaucugggucgcgaccgagggcgcccugaacacccccaaggaccacaucgggacgcggaaccccgccaacaacgccgcgaucgugcuccagcugccgcagggcaccacccugcccaagggguucuacgccgagggcagccgcgggggcucccaggccagcucccggagcuccagccgcucccggaacagcucccgcaacagcacccccggcgggagccggggcacgucccccgcccgcauggccgggaacggcggggacgcggcccucgcccugcugcuccuggaccggcugaaccagcucgagagcaagauguccggcaagggccagcagcagcaggggcagaccgugaccaagaaguccgccgccgaggcguccaagaagccgcgccagaagcgcaccgccacgaaggccuacaacgucacccaggccuucggccggcgcgggcccgagcagacccagggcaacuucggggaccaggagcugauccggcagggcaccgacuacaagcacuggccccagaucgcccaguucgcgcccagcgccuccgccuucuucggcaugagccgcaucgggauggaggugacgccguccggcaccuggcugaccuacaccggggccaucaagcucgacgacaaggaccccaacuucaaggaccaggugauccugcugaacaagcacaucgacgccuacaagacguucccgcccaccgagcccaagaaggacaagaagaagaaggcggacgagacccaggcccucccccagcggcagaagaagcagcagaccgucacgcugcugcccgccgccgaccucgacgacuucagcaagcagcugcagcaguccaugagcuccgcggacagcacccaggccuga

SEQ ID NO: 17382 - RNA, 1260 nt, Artificial Sequence
  SARS-CoV-2__MT772085.1__nucleocapsid protein (N) CDS gc
augagcgacaacggcccccagaaccagcgcaacgccccgcggaucaccuucgggggccccuccgacagcaccggguccaaccagaacggcgagcgcagcggggcccgguccaagcagcgccggccccagggccugcccaacaacacggcgagcugguucaccgcccucacccagcacggcaaggaggaccugaaguucccgcgcgggcagggcgugcccaucaacaccaacuccagccccgacgaccagaucggguacuaccggcgcgccacgcggcgcauccggggcggggacggcaagaugaaggaccugagcccccgcugguacuucuacuaccucggcaccgggccggaggccggccugcuguacggggccaacaaggacggcaucaucugggucgcgaccgagggcgcccucaacacccccaaggaccacaucgggacgcggaaccccgccaacaacgccgcgaucgugcugcagcugccccagggcaccacccucccgaagggguucuacgccgagggcucccgcgggggcucccaggccagcucccggagcuccagccgcucccggaacagcucccgcaacagcacccccggcagcucccgggggacgagccccgcccgcauggccggcaacgggggcgacgcggcccuggcccugcuccugcuggaccggcucaaccagcuggaguccaagaugagcgggaagggccagcagcagcagggccagaccgugaccaagaaguccgccgccgaggcgagcaagaagccccgccagaagcgcaccgccacgaaggccuacaacgucacccaggccuucgggcggcgcggcccggagcagacccaggggaacuucggcgaccaggagcugauccggcaggggaccgacuacaagcacuggccccagaucgcccaguucgcgcccuccgccagcgccuucuucggcaugucccgcaucggcauggaggugacgcccagcgggaccuggcucaccuacaccggcgccaucaagcuggacgacaaggacccgaacuucaaggaccaggugauccugcucaacaagcacaucgacgccuacaagacguucccgcccaccgagcccaagaaggacaagaagaagaaggcggacgagacccaggcccugccccagcggcagaagaagcagcagaccgucacgcugcuccccgccgccgaccuggacgacuucuccaagcagcugcagcagagcauguccagcgcggacuccacccaggccuga

SEQ ID NO: 17383 - RNA, 1260 nt, Artificial Sequence
  SARS-CoV-2__MT758213.1__nucleocapsid protein (N) CDS gc
augagcgacaacggcccccagaaccagcgcaacgccccgcggaucaccuucgggggccccuccgacagcaccggguccaaccagaacggcgagcgcagcggggcccgguccaagcagcgccggccccagggccugcccaacaacacggcgagcugguucaccgcccucacccagcacggcaaggaggaccugaaguucccgcgcgggcagggcgugcccaucaacaccaacuccagccccgacgaccagaucggguacuaccggcgcgccacgcggcgcauccggggcuccgacgggaagaugaaggaccugagcccccgcugguacuucuacuaccucggcaccggcccggaggccgggcugcccuacggcgccaacaaggacgggaucaucugggucgcgaccgagggcgcccugaacacccccaaggaccacaucggcacgcggaaccccgccaacaacgccgcgaucgugcuccagcugccgcaggggaccacccugcccaagggcuucuacgccgaggggucccgcggcgggagccaggccuccagccgguccagcucccgcagccggaacucccuccgcaacagcacccccggcagcucccggggcacgagccccgcccgcauggccgggaacggcggggacgcggcccuggcccugcuccugcuggaccggcucaaccagcuggaguccaagaugagcggcaaggggcagcagcagcagggccagaccgugaccaagaaguccgccgccgaggcgagcaagaagccgcgccagaagcgcaccgccacgaaggccuacaacgucacccaggccuucggccggcgcgggcccgagcagacccagggcaacuucggggaccaggagcugauccggcagggcaccgacuacaagcacuggccccagaucgcccaguucgcgcccuccgccagcgccuucuucgggaugucccgcaucggcauggaggugacgccgagcggcaccuggcucaccuacaccggggccaucaagcuggacgacaaggaccccaacuucaaggaccaggugauccugcucaacaagcacaucgacgccuacaagacguucccgcccaccgagcccaagaaggacaagaagaagaaggcggacgagacccaggcccugccccagcggcagaagaagcagcagaccgucacgcugcuccccgccgccgaccuggacgacuucuccaagcagcugcagcagagcauguccagcgcggacuccacccaggccuga

SEQ ID NO: 17384 - RNA, 1260 nt, Artificial Sequence
  SARS-CoV-2__MT758471.1__nucleocapsid protein (N) CDS gc
augagcgacaacggcccccagaaccagcgcaacgccccgcggaucaccuucgggggccccuccgacagcaccggguccaaccagaacggcgagcgcagcggggcccgguccaagcagcgccggccccagggccugcccaacaacacggcgagcugguucaccgcccucacccagcacggcaaggaggaccugaaguucccgcgcgggcagggcgugcccaucaacaccaacuccagccccgacgaccagaucggguacuaccggcgcgccacgcggcgcauccggggcggggacggcaagaugaaggaccugagcccccgcugguacuucuacuaccucggcaccgggccggaggccggccugcccuacggggccaacaaggacggcaucaucugggucgcgaccgagggcgcccugaacacccccaaggaccacaucgggacgcggaaccccgccaacaacgccgcgaucgugcuccagcugccgcagggcaccacccugcccaagggguucuacgccgagggcucccgcgggggcucccaggccagcucccggagcuccagccgcucccggaacagccuccgcaacuccacccccggcagcaaccgggggacgagccccgcccgcauggccggcaacgggggcgacgcggcccuggcccugcuccugcuggaccggcucaaccagcuggaguccaagaugagcgggaagggccagcagcagcagggccagaccgugaccaagaaguccgccgccgaggcgagcaagaagccgcgccagaagcgcaccgccacgaaggccuacaacgucacccaggccuucgggcggcgcggccccgagcagacccaggggaacuucggcgaccaggagcugauccggcaggggaccgacuacaagcacuggccccagaucgcccaguucgcgcccuccgccagcgccuucuucggcaugucccgcaucggcauggaggugacgccgagcgggaccuggcucaccuacaccggcgccaucaagcuggacgacaaggaccccaacuucaaggaccaggugauccugcucaacaagcacaucgacgccuacaagacguucccgcccaccgagcccaagaaggacaagaagaagaaggcggacgagacccaggcccugccccagcggcagaagaagcagcagaccgucacgcugcuccccgccgccgaccuggacgacuucuccaagcagcugcagcagagcauguccagcgcggacuccacccaggccuga

SEQ ID NO: 17385 - RNA, 1260 nt, Artificial Sequence
  SARS-CoV-2__MT759844.1__nucleocapsid protein (N) CDS gc
augagcgacaacggcccccagaaccagcgcaacgccccgcggaucaccuucgggggccccuccgacagcaccggguccaaccagaacggccagcgcagcggggcccgguccaagcagcgccggccccagggccugcccaacaacacggcgagcugguucaccgcccucacccagcacggcaaggaggaccugaaguucccgcgcgggcagggcgugcccaucaacaccaacuccagccccgacgaccagaucggguacuaccggcgcgccacgcggcgcauccggggcggggacggcaagaugaaggaccugagcccccgcugguacuucuacuaccucggcaccgggccggaggccggccugcccuacggggccaacaaggacggcaucaucugggucgcgaccgagggcgcccugaacacccccaaggaccacaucgggacgcggaaccccgccaacaacgccgcgaucgugcuccagcugccgcagggcaccacccugcccaagggguucuacgccgagggcucccgcgggggcucccaggccagcucccggagcuccagccgcucccggaacagcucccgcaacagcacccccggcagcucccgggggacgagccccgcccgcauggccggcaacgggggcgacgcggcccucgcccugcugcuccuggaccggcugaaccagcucgaguccaagaugagcgggaagggccagcagcagcagggccagaccgugaccaagaaguccgccgccgaggcgagcaagaagccgcgccagaagcgcaccgccacgaaggccuacaacgucacccaggccuucgggcggcgcggccccgagcagacccaggggaacuucggcgaccaggagcugauccggcaggggaccgacuacaagcacuggccccagaucgcccaguucgcgcccuccgccagcgccuucuucggcaugucccgcaucggcauggaggugacgccgagcgggaccuggcugaccuacaccggcgccaucaagcucgacgacaaggaccccaacuucaaggaccaggugauccugcugaacaagcacaucgacgccuacaagacguucccgcccaccgagcccaagaaggacaagaagaagaaggcggacgagacccaggcccucccccagcggcagaagaagcagcagaccgucacgcugcugcccgccgccgaccucgacgacuucuccaagcagcugcagcagagcauguccagcgcggacuccacccaggccuga

SEQ ID NO: 17386 - RNA, 1260 nt, Artificial Sequence
  SARS-CoV-2__MT764180.1__nucleocapsid protein (N) CDS gc
augagcgacaacggcccccagaaccagcgcaacgccccgcggaucaccuucgggggccccuccgacagcaccggguccaaccagaacggcgagcgcagcggggcccgguccaagcagcgccggccccagggccugcccaacaacacggcgagcugguucaccgcccucacccagcacggcaaggaggaccugaaguucccgcgcgggcagggcgugcccaucaacaccaacuccagccccgacgaccagaucggguacuaccggcgcgccacgcggcgcauccggggcggggacggcaagaugaaggaccugagcccccgcugguacuucuacuaccucggcaccgggccggaggccggccugcccuacggggccaacaaggacggcaucaucugggucgcgaccgagggcgcccugaacacccccaaggaccacaucgggacgcggaaccccgccaacaacgccgcgaucgugcuccagcugccgcagggcaccacccugcccaagggguucuacgccgagggcagccgcgggggcucccaggccagcucccggagcuccagccgcggccggaacuccagccgcaacuccacccccgggagcagccggggcacgucccccgcccgcauggccgggaacggcggggacgcggcccucgcccugcugcuccuggaccggcugaaccagcucgagagcaagauguccggcaagggccagcagcagcaggggcagaccgugaccaagaaguccgccgccgaggcguccaagaagccgcgccagaagcgcaccgccacgaaggccuacaacgucacccaggccuucggccggcgcgggcccgagcagacccagggcaacuucggggaccaggagcugauccggcagggcaccgacuacaagcacuggccccagaucgcccaguucgcgcccagcgccuccgccuucuucggcaugagccgcaucgggauggaggugacgccguccggcaccuggcugaccuacaccggggccaucaagcucgacgacaaggaccccaacuucaaggaccaggugauccugcugaacaagcacaucgacgccuacaagacguucccgcccaccgagcccaagaaggacaagaagaagaaggcggacgagacccaggcccucccccagcggcagaagaagcagcagaccgucacgcugcugcccgccgccgaccucgacgacuucagcaagcagcugcagcaguccaugagcuccgcggacagcacccaggccuga

SEQ ID NO: 17387 - RNA, 1260 nt, Artificial Sequence
  SARS-CoV-2__MT755891.1__nucleocapsid protein (N) CDS gc
augagcgacaacggcccccagaaccagcgcaacgccccgcggaucaccuucgggggccccuccgacagcaccggguccaaccagaacggcgagcgcagcggggcccgguccaagcagcgccggccccagggccugcccaacaacacggcgagcugguucaccgcccucacccagcacggcaaggaggaccugaaguucccgcgcgggcagggcgugcccaucaacaccaacuccagccccgacgaccagaucggguacuaccggcgcgccacgcggcgcauccggggcggggacggcaagaugaaggaccugagcccccgcugguacuucuacuaccucggcaccgggccggaggccggccugcccuacggggccaacaaggacggcaucaucugggucgcgaccgagggcgcccugaacacccccaaggaccacaucgggacgcggaaccccgccaacaacgccgcgaucgugcuccagcugccgcagggcaccacccugcccaagggguucuacgccgagggcagccgcgggggcucccaggccagcucccggagcuccagccgcucccggaacagccuccgcaacuccacccccggcagcagccgggggacgucccccgcccgcauggccggcaacgggggcgacgcggcccuggcccugcuccugcuggaccggcucaaccagcuggagagcaagauguccgggaagggccagcagcagcagggccagaccgugaccaagaaguccgccgccgaggcguccaagaagccgcgccagaagcgcaccgccacgaaggccuacaacgucacccaggccuucgggcggcgcggccccgagcagacccaggggaacuucggcgaccaggagcugauccggcaggggaccgacuacaagcacuggccccagaucgcccaguucgcgcccagcgccuccgccuucuucggcaugagccgcaucggcauggaggugacgccguccgggaccuggcucaccuacaccggcgccaucaagcuggacgacaaggaccccaacuucaaggaccaggugauccugcucaacaagcacaucgacgccuacaagacguucccgcccaccgagcccaagaaggacaagaagaagaaggcggacgagacccaggcccugcugcagcggcagaagaagcagcagaccgucacgcuccugcccgccgccgaccuggacgacuucagcaagcagcuccagcaguccaugagcuccgcggacagcacccaggccuga

SEQ ID NO: 17388 - RNA, 1260 nt, Artificial Sequence
  SARS-CoV-2__MT757020.1__nucleocapsid protein (N) CDS gc
augagcgacaacggcccccagaaccagcgcaacgccccgcggaucaccuucgggggccccuccgacagcaccggguccaaccagaacggcgagcgcagcggggcccgguccaagcagcgccggccccagggccugcccaacaacacggcgagcugguucaccgcccucacccagcacggcaaggaggaccugaaguucccgcgcgggcagggcgugcccaucaacaccaacuccagccccgacgaccagaucggguacuaccggcgcgccacgcggcgcauccggggcggggacggcaagaugaaggaccugagcccccgcugguacuucuacuaccucggcaccgggccggaggccggccugcccuacggggccaacaaggacggcaucaucugggucgcgaccgagggcgcccugaacacccccaaggaccacaucgggacgcggaaccccgccaacaacgccgcgaucgugcuccagcugccgcagggcaccacccugcccaagggguucuacgccgagggcucccgcgggggcucccaggccagcucccggagcuccagccgcucccggaacagcucccgcaacagcacccccggcagcucccgggggacgagccccgcccgcauggccggcaacgggggcgacgcggcccucgcccugcugcuccuggaccggcugaaccagcucgaguccaagaugagcgggaagggccagcagcagcagggccagaccgugaccaagaaguccgccgccgaggcgagcaagaagccgcgccagaagcgcaccgccacgaaggccuacaacgucacccaggccuucgggcggcgcggccccgagcagacccaggggaacuucggcgaccaggagcugauccggcaggggaccgacuacaagcacuggccccagaucgcccaguucgcgcccuccgccagcgccuucuucggcaugucccgcaucggcauggaggugacgccgagcgggaccuggcugaccuacaccggcgccaucaagcucgacgacaaggaccccaacuucaaggaccaggugauccugcugaacaagcacaucgacgccuacaagacguucccgcccaccgagcccaagaaggacaagaagaagaaggcggacgagacccaggcccucccccaccggcagaagaagcagcagaccgucacgcugcugcccgccgccgaccucgacgacuucuccaagcagcugcagcagagcauguccagcgcggacuccacccaggccuga

SEQ ID NO: 17389 - RNA, 1260 nt, Artificial Sequence
  SARS-CoV-2__MT757085.1__nucleocapsid protein (N) CDS gc
augagcgacaacggcccccagaaccagcgcaacgccccgcggaucaccuucgggggccccuccgacagcaccggguccaaccagaacggcgagcgcagcggggcccgguccaagcagcgccggccccagggccugcccaacaacacggcgagcugguucaccgcccucacccagcacggcaaggaggaccugaaguucccgcgcgggcagggcgugcccaucaacaccaacuccagccccgacgaccagaucggguacuaccggcgcgccacgcggcgcauccggggcggggacggcaagaugaaggaccugagcccccgcugguacuucuacuaccucggcaccgggccggaggccggccugcccuacggggccaacaaggacggcaucaucugggucgcgaccgagggcgcccugaacacccccaaggaccacaucgggacgcggaaccccgccaacaacgccgcgaucgugcuccagcugccgcagggcaccacccugcccaagggguucuacgccgagggcucccgcgggggcucccaggccagcucccggagcuccagccgcucccggaacagcucccgcaacagcacccccggcagcucccgggggacgagccccgcccgcauggccggcaacgggggcgacgcggcccucgcccugcugcuccuggaccggcugaaccagcucgaguccaagaugagcgggaagggccagcagcagcagggccagaccgugaccaagaaguccgccgccgaggcgagcaagaagccgcgccagaagcgcaccgccacgaaggccuacaacgucacccaggccuucgggcggcgcggccccgagcagacccaggggaacuucggcgaccaggagcugauccggcaggggaccgacuacaagcacuggccccagaucgcccaguucgcgcccuccgccagcgccuucuucggcaugucccgcaucggcauggaggugacgccgagcgggaccuggcugaccuacaccggcgccaucaagcucgacgacaaggaccccaacuucaaggaccaggugauccugcugaacaagcacaucgacgccuacaagacguucccgcccaccgagcccaagaaggacaagaagaagaaggcggacgagacccaggcccucccccagcggcagaagaagcagcagaccgucacgcugcugcccgccgccgaccucgacgacuucuccaagcagcugcagcagagcauguccagcgcggaccugacccaggccuga

SEQ ID NO: 17390 - RNA, 1260 nt, Artificial Sequence
  SARS-CoV-2__MT757121.1__nucleocapsid protein (N) CDS gc
augagcgacaacggcccccagaaccagcgcaacgccccgcggaucaccuucgggggccccuccgacagcaccggguccaaccagaacggcgagcgcagcggggcccgguccaagcagcgccggccccagggccugcccaacaacacggcgagcugguucaccgcccucacccagcacggcaaggaggaccugaaguucccgcgcgggcagggcgugcccaucaacaccaacuccagccccgacgaccagaucggguacuaccggcgcgccacgcggcgcauccggggcggggacggcaagaugaaggaccugagcccccgcugguacuucuacuaccucggcaccgggccggaggccggccugcccuacggggccaacaaggacggcaucaucugggucgcgaccgagggcgcccugaacacccccaaggaccacaucgggacgcggaaccccgccaacaacgccgcgaucgugcuccagcugccgcagggcaccacccugcccaagggguucuacgccgagggcucccgcgggggcucccaggccagcucccggagcuccagccgcucccggaacagcucccgcaacagcacccccggcagcuccaagcggacgagccccgcccgcauggccgggaacggcggggacgcggcccucgcccugcugcuccuggaccggcugaaccagcucgaguccaagaugagcggcaaggggcagcagcagcagggccagaccgugaccaagaaguccgccgccgaggcgagcaagaagccgcgccagaagcgcaccgccacgaaggccuacaacgucacccaggccuucggccggcgcgggcccgagcagacccagggcaacuucggggaccaggagcugacccggcagggcacggacuacaagcacuggccccagaucgcccaguucgcgcccuccgccagcgccuucuucgggaugucccgcaucggcauggaggugaccccgagcggcaccuggcugaccuacacgggggccaucaagcucgacgacaaggaccccaacuucaaggaccaggugauccugcugaacaagcacaucgacgccuacaagaccuucccgcccaccgagcccaagaaggacaagaagaagaaggcggacgagacccaggcccucccccagauccagaagaagcagcagacggucacccugcugcccgccgccgaccucgacgacuucuccaagcagcugcagcagagcauguccagcgcggacuccacccaggccuga

SEQ ID NO: 17391 - RNA, 1260 nt, Artificial Sequence
  SARS-CoV-2__MT745605.1__nucleocapsid protein (N) CDS gc
augagcgacaacggcccccagaaccagcgcaacgccccgcggaucaccuucgggggccccuccgacagcaccggguccaaccagaacggcgagcgcagcggggcccgguccaagcagcgccggccccagggccugcccaacaacacggcgagcugguucaccgcccucacccagcacggcaaggaggaccugaaguucccgcgcgggcagggcgugcccaucaacaccaacuccagccccgacgaccagaucggguacuaccggcgcgccacgcggcgcauccggggcggggacggcaagaugaaggaccugagcccccgcugguacuucuacuaccucggcaccgggccggaggccggccugcccuacggggccaacaaggacggcaucaucugggucgcgaccgagggcgcccugaacacccccaaggaccacaucgggacgcggaaccccgccaacaacgccgcgaucgugcuccagcugccgcagggcaccacccugcccaagggguucuacgccgagggcucccgcgggggcucccaggccagcucccggagcuccagccgcucccggaacagcucccgcaacagcacccccggcagcucccgggggacgagccccgcccgcauggccggcaacgggggcgacgcggcccucgcccugcugcuccuggaccggcugaaccagcucgaguccaagaugagcgggaagggccagcagcagcagggccagaccgugaccaagaaguccgccgccgaggcgagcaagaagccgcgccagaagcgcaccgccacgaaggccuacaacgucacccaggccuucgggcggcgcggccccgagcagacccaggggaacuucggcgaccaggagcugauccggcaggggaccgacuacaagcacuggccccagaucgcccaguucgcgcccuccgccagcgccuucuucggcaugucccgcaucggcauggaggugacgagcuccgggaccuggcugaccuacaccggcgccaucaagcucgacgacaaggacccgaacuucaaggaccaggugauccugcugaacaagcacaucgacgccuacaagacguucccgcccaccgagcccaagaaggacaagaagaagaaggcggacgagacccaggcccucccccagcggcagaagaagcagcagaccgucacgcugcugcccgccgccgaccucgacgacuucagcaagcagcugcagcaguccaugagcuccgcggacagcacccaggccuga

SEQ ID NO: 17392 - RNA, 1260 nt, Artificial Sequence
  SARS-CoV-2__MT745658.1__nucleocapsid protein (N) CDS gc
augagcgacaacggcccccagaaccagcgcaacgccccgcggaucaccuucgggggccccuccgacagcaccggguccaaccagaacggcgagcgcagcggggcccgguccaagcagcgccggccccagggccugcccaacaacacggcgagcugguucaccgcccucacccagcacggcaaggaggaccugaaguucccgcgcgggcagggcgugcccaucaacaccaacuccagccccgacgaccagaucggguacuaccggcgcgccacgcggcgcauccggggcggggacggcaagaugaaggaccugagcccccgcugguacuucuacuaccucggcaccgggccggaggccggccugcccuacggggccaacaaggacggcaucaucugggucgcgaccgagggcgcccugaacacccccaaggaccacaucgggacgcggaaccccgccaacaacgccgcgaucgugcuccagcugccgcagggcaccacccugcccaagggguucuacgccgagggcucccgcgggggcucccaggccagcucccggagcuccagccgcucccggaacagcucccgcaacagcacccccggcagcucccgggggacgagccccgcccgcauggccggcaacgggggcgacgcggcccucgcccugcugcuccuggaccggcugaaccagcucgaguccaagaucagcgggaagggccagcagcagcagggccagaccgugaccaagaaguccgccgccgaggcgagcaagaagccgcgccagaagcgcaccgccacgaaggccuacaacgucacccaggccuucgggcggcgcggccccgagcagacccaggggaacuucggcgaccaggagcugauccggcaggggaccgacuacaagcacuggccccagaucgcccaguucgcgcccuccgccagcgccuucuucggcaugucccgcaucggcauggaggugacgccgagcgggaccuggcugaccuacaucggcgccaucaagcucgacgacaaggaccccaacuucaaggaccaggugauccugcugaacaagcacaucgacgccuacaagaccuucccgcccacggagcccaagaaggacaagaagaagaaggcggacgagacccaggcccucccccagcggcagaagaagcagcagaccgucacccugcugcccgccgccgaccucgacgacuucuccaagcagcugcagcagagcauguccagcgcggacuccacgcaggccuga

SEQ ID NO: 17393 - RNA, 1260 nt, Artificial Sequence
  SARS-CoV-2__MT745664.1__nucleocapsid protein (N) CDS gc
augagcgacaacggcccccagaaccagcgcaacgccccgcggaucaccuucgggggccccuccgacagcaccggguccaaccagaacggcgagcgcagcggggcccgguccaagcagcgccggccccagggccugcccaacaacacggcgagcugguucaccgcccucacccagcacggcaaggaggaccugaaguucccgcgcgggcagggcgugcccaucaacaccaacuccagccccgacgaccagaucggguacuaccggcgcgccacgcggcgcauccggggcggggacggcaagaugaaggaccugagcccccgcugguacuucuacuaccucggcaccgggccggaggccggccugcccuacggggccaacaaggacggcaucaucugggucgcgaccgagggcgcccugaacacccccaaggaccacaucgggacgcggaaccccgccaacaacgccgcgaucgugcuccagcugccgcagggcaccacccugcccaagggguucuacgccgagggcucccgcgggggcucccaggccagcucccggagcuccagccgcucccggaacagcucccgcaacagcacccccggcagcuccaagcggacgagccccgcccgcauggccgggaacggcggggacgcggcccucgcccugcugcuccuggaccggcugaaccagcucgaguccaagaugagcggcaaggggcagcagcagcagggccagaccgugaccaagaaguccgccgccgaggcgagcaagaagccgcgccagaagcgcaccgccacgaaggccuacaacgucacccaggccuucggccggcgcgggcccgagcagacccagggcaacuucggggaccaggagcugauccggcagggcaccgacuacaagcacuggccccagaucgcccaguucgcgcccuccgccagcgccuucuucgggaugucccgcaucggcguggaggugacgccgagcggcaccuggcugaccuacaccggggccaucaagcucgacgacaaggaccccaacuucaaggaccaggucauccugcugaacaagcacaucgacgccuacaagacguucccgcccaccgagcccaagaaggacaagaagaagaaggcggacgagacccaggcccucccccagcggcagaagaagcagcagaccgugacgcugcugcccgccgccgaccucgacgacuucuccaagcagcugcagcagagcauguccagcgcggacuccacccaggccuga

SEQ ID NO: 17394 - RNA, 1260 nt, Artificial Sequence
  SARS-CoV-2__MT745668.1__nucleocapsid protein (N) CDS gc
augagcgacaacggcccccagaaccagcgcaacgcccugcggaucaccuucgggggcccguccgacagcaccggguccaaccagaacggcgagcgcagcggggcccgguccaagcagcgccggccccagggccuccccaacaacacggcgagcugguucaccgcccugacccagcacggcaaggaggaccugaaguucccccgcgggcagggcgugccgaucaacaccaacuccagccccgacgaccagaucggguacuaccggcgcgccacgcggcgcauccggggcggggacggcaagaugaaggaccucagcccccgcugguacuucuacuaccugggcaccgggcccgaggccggccugccguacggggccaacaaggacggcaucaucugggucgcgaccgagggcgcccucaacacccccaaggaccacaucgggacgcggaaccccgccaacaacgccgcgaucgugcugcagcugccccagggcaccacccucccgaagggguucuacgccgagggcagccgcgggggcucccaggccagcucccggagcuccagccgcucccggaacagcucccgcaaccugacccccggcagcagccgggggacgucccccgcccgcauggccggcaacgggggcgacgcggcccuggcccuccugcugcucgaccggcugaaccagcuggagagcaagauguccgggaagggccagcagcagcagggccagaccgugaccaagaaguccgccgccgaggcguccaagaagccccgccagaagcgcaccgccacgaaggccuacaacgucacccaggccuucgggcggcgcggcccggagcagacccaggggaacuucggcgaccaggagcucauccggcaggggaccgacuacaagcacuggccccagaucgcccaguucgcgcccagcgccuccgccuucuucggcaugagccgcaucggcauggaggugacgcccuccgggaccuggcugaccuacaccggcgccaucaagcuggacgacaaggacccgaacuucaaggaccaggugauccuccugaacaagcacaucgacgccuacaagacguucccgcccaccgagcccaagaaggacaagaagaagaaggcggacgagacccaggcccugccccagcggcagaagaagcagcagaccgucacgcuccugcccgccgccgaccuggacgacuucagcaagcagcuccagcaguccaugagcuccgcggacagcacccaggccuga

SEQ ID NO: 17395 - RNA, 1260 nt, Artificial Sequence
  SARS-CoV-2__MT745678.1__nucleocapsid protein (N) CDS gc
augagcgacaacggccugcagaaccagcgcaacgcgccccggaucaccuucgggggcccguccgacagcaccggguccaaccagaacggcgagcgcagcggggcccgguccaagcagcgccggccccagggccuccccaacaacacggccagcugguucaccgcccugacccagcacggcaaggaggaccugaaguucccccgcgggcagggcgugccgaucaacaccaacuccagccccgacgaccagaucggguacuaccggcgcgccacgcggcgcauccggggcggggacggcaagaugaaggaccucagcccccgcugguacuucuacuaccugggcaccgggcccgaggccggccugccguacggggccaacaaggacggcaucaucugggucgcgaccgagggcgcccucaacacccccaaggaccacaucgggacgcggaaccccgccaacaacgccgcgaucgugcugcagcugccccagggcaccacccucccgaagggguucuacgccgagggcagccgcgggggcucccaggccagcucccggagcuccagccgcucccggaacagcucccgcaacagcacccccggcagcucccgggggacgagccccgcccgcauggccggcaacgggggcgacgcggcccuggcccugcuccugcuggaccggcucaaccagcuggagcgcaagauguccgggaagggccagcagcagcagggccagaccgugaccaagaaguccgccgccgaggcguccaagaagccccgccagaagcggaccgccacgaaggccuacaacgucacccaggccuucgggcgccggggcccggagcagacccaggggaacuucggcgaccaggagcugauccgccaggggaccgacuacaagcacuggccccagaucgcccaguucgcgcccagcgccuccgccuucuucggcaugagccggaucggcauggaggugacgcccuccgggaccuggcucaccuacaccggcgccaucaagcuggacgacaaggacccgaacuucaaggaccaggugauccugcucaacaagcacaucgacgccuacaagacguucccgcccaccgagcccaagaaggacaagaagaagaaggcggacgagacccaggcccugccccagcgccagaagaagcagcagaccgucacgcugcuccccgccgccgaccuggacgacuucagcaagcagcugcagcaguccaugagcuccgcggacagcacccaggccuga

SEQ ID NO: 17396 - RNA, 1260 nt, Artificial Sequence
  SARS-CoV-2__MT745697.1__nucleocapsid protein (N) CDS gc
augagcgacaacggcccccagaaccagcgcaacgccccgcggaucaccuucgggggccccuccgacagcaccggguccaaccagaacggcgagcgcagcggggcccgguccaagcagcgccggccccagggccugcccaacaacacggcgagcugguucaccgcccucacccagcacggcaaggaggaccugaaguucccgcgcgggcacggcgugcccaucaacaccaacuccagccccgacgaccagaucggguacuaccggcgcgccacgcggcgcauccggggcggggacggcaagaugaaggaccugagcccccgcugguacuucuacuaccucggcaccgggccggaggccggccugcccuacggggccaacaaggacggcaucaucugggucgcgaccgagggcgcccugaacacccccaaggaccacaucgggacgcggaaccccgccaacaacgccgcgaucgugcuccagcugccgcagggcaccacccugcccaagggguucuacgccgagggcucccgcgggggcucccaggccagcucccggagcuccagccgcucccggaacagcucccgcaacagcacccccggcagcuccaagcggacgagccccgcccgcauggccgggaacggcggggacgcggcccucgcccugcugcuccuggaccggcugaaccagcucgaguccaagaugagcggcaaggggcagcagcagcagggccagaccgugaccaagaaguccgccgccgaggcgagcaagaagccgcgccagaagcgcaccgccacgaaggccuacaacgucacccaggccuucggccggcgcgggcccgagcagacccagggcaacuucggggaccaggagcugauccggcagggcaccgacuacaagcacuggccccagaucgcccaguucgcgcccuccgccagcgccuucuucgggaugucccgcaucggcauggaggugacgccgagcggcaccuggcugaccuacaccggggccaucaagcucgacgacaaggaccccaacuucaaggaccaggugauccugcugaacaagcacaucgacgccuacaagacguucccgcccaccgagcccaagaaggacaagaagaagaaggcggacgagacccaggcccucccccagcggcagaagaagcagcagaccgucacgcugcugcccgccgccgaccucgacgacuucuccaagcagcugcagcagagcauguccagcgcggacuccacccaggccuga

SEQ ID NO: 17397 - RNA, 1260 nt, Artificial Sequence
  SARS-CoV-2__MT745698.1__nucleocapsid protein (N) CDS gc
augagcgacaacggcccccagaaccagcgcaacgccccgcggaucaccuucgggggccccuccgacagcaccggguccaaccagaacggcgagcgcagcggggcccgguccaagcagcgccggccccagggccugcccaacaacacggcgagcugguucaccgcccucacccagcacggcaaggaggaccugaaguucccgcgcgggcagggcgugcccaucaacaccaacuccagccccgacgaccagaucggguacuaccggcgcgccacgcggcgcauccggggcggggacggcaagaugaaggaccugagcccccgcugguacuucuacuaccucggcaccgggccggaggccggccugcccuacggggccaacaaggacggcaucaucugggucgcgaccgagggcgcccugaacacccccaaggaccacaucgggacgcggaaccccgccaacaacgccgcgaucgugcuccagcugccgcagggcaccacccugcccaagggguucuacgccgagggcagccgcgggggcucccaggccagcucccgguucagcucccgcagccggaacuccagccgcaacuccacccccggcagcagccgggggacgucccccgcccgcauggccggcaacgggggcgacgcggcccucgcccugcugcuccuggaccggcugaaccagcucgagagcaagauguccgggaagggccagcagcagcagggccagaccgugaccaagaaguccgccgccgaggcguccaagaagccgcgccagaagcgcaccgccacgaaggccuacaacgucacccaggccuucgggcggcgcggccccgagcagacccaggggaacuucggcgaccaggagcugauccggcaggggaccgacuacaagcacuggccccagaucgcccaguucgcgcccagcgccuccgccuucuucggcaugagccgcaucggcauggaggugacgccguccgggaccuggcugaccuacaccggcgccaucaagcucgacgacaaggaccccaacuucaaggaccaggugauccugcugaacaagcacaucgacgccuacaagacguucccgcccaccgagcccaagaaggacaagaagaagaaggcggacgagacccaggcccucccccagcggcagaagaagcagcagaccgucacgcugcugcccgccgccgaccucgacgacuucagcaagcagcugcagcaguccaugagcuccgcggacagcacccaggccuga

SEQ ID NO: 17398 - RNA, 1260 nt, Artificial Sequence
  SARS-CoV-2__MT750025.1__nucleocapsid protein (N) CDS gc
augagcgacaacggcccccagaaccagcgcaacgccccgcggaucaccuucgggggccccuccgacagcaccggguccaaccagaacggcgagcgcagcggggcccgguccaagcagcgccggccccagggccugcccaacaacacggcgagcugguucaccgcccucacccagcacggcaaggaggaccugaaguucccgcgcgggcagggcgugcccaucaacaccaacuccagccccgacgaccagaucggguacuaccggcgcgccacgcggcgcauccggggcggggacggcaagaugaaggaccugagcccccgcugguacuucuacuaccucggcaccgggccggaggccggccugcccuacggggccaacaaggacggcaucaucugggucgcgaccgagggcgcccugaacacccccaaggaccacaucgggacgcggaaccccgccaacaacguggccaucgugcuccagcugccgcagggcaccacccugcccaagggguucuacgcggagggcucccgcgggggcucccaggccagcucccggagcuccagccgcucccggaacagcucccgcaacagcacccccggcagcucccgggggacgagccccgcccgcauggccggcaacgggggcgacgccgcgcucgcccugcugcuccuggaccggcugaaccagcucgaguccaagaugagcgggaagggccagcagcagcagggccagaccgucaccaagaaguccgccgccgaggccagcaagaagccgcgccagaagcgcaccgcgacgaaggccuacaacgugacccaggccuucgggcggcgcggccccgagcagacccaggggaacuucggcgaccaggagcugauccggcaggggaccgacuacaagcacuggccccagaucgcccaguucgcccccuccgcgagcgccuucuucggcaugucccgcaucggcauggaggugacgccgagcgggaccuggcugaccuacaccggcgccaucaagcucgacgacaaggaccccaacuucaaggaccaggucauccugcugaacaagcacaucgacgccuacaagacguucccgcccaccgagcccaagaaggacaagaagaagaaggccgacgagacccaggcgcucccccagcggcagaagaagcagcagaccgugacgcugcugcccgccgccgaccucgacgacuucuccaagcagcugcagcagagcauguccagcgccgacuccacccaggcguga

SEQ ID NO: 17399 - RNA, 1260 nt, Artificial Sequence
  SARS-CoV-2__MT750335.1__nucleocapsid protein (N) CDS gc
augagcgacaacggcccccagaaccagcgcaacgccccgcggaucaccuucgggggccccuccgacagcaccggguccaaccagaacggcgagcgcagcggggcccgguccaagcagcgccggccccagggccugcccaacaacacggcgagcugguucaccgcccucacccagcacggcaaggaggaccugaaguucccgcgcgggcagggcgugcccaucaacaccaacuccagccccgacgaccagaucggguacuaccggcgcgccacgcggcgcauccggggcggggacggcaagaugaaggaccugagcccccgcugguacuucuacuaccucggcaccgggccggaggccggccugcccuacggggccaacaaggacggcaucaucugggucgcgaccgagggcgcccugaacacccccaaggaccacaucgggacgcggaaccccgccaacaacgccgcgaucgugcuccagcugccgcagggcaccacccugcccaagggguucuacgccgagggcucccgcgggggcucccaggccagcucccggagcuccagccgcucccggaacagcucccgcaacagcacccccggcagcuccaagcggacgagccccgggcgcauggccggcaacgggggcgacgccgcgcucgcccugcugcuccuggaccggcugaaccagcucgaguccaagaugagcgggaagggccagcagcagcagggccagaccgugaccaagaaguccgccgccgaggccagcaagaagccgcgccagaagcgcaccgcgacgaaggccuacaacgucacccaggccuucgggcggcgcggccccgagcagacccaggggaacuucggcgaccaggagcugauccggcaggggaccgacuacaagcacuggccccagaucgcccaguucgcccccuccgcgagcgccuucuucggcaugucccgcaucggcauggaggugacgccgagcgggaccuggcugaccuacaccggcgccaucaagcucgacgacaaggaccccaacuucaaggaccaggugauccugcugaacaagcacaucgacgccuacaagacguucccgcccaccgagcccaagaaggacaagaagaagaaggccgacgagacccaggcgcucccccagcggcagaagaagcagcagaccgucacgcugcugcccgccgccgaccucgacgacuucuccaagcagcugcagcagagcauguccagcgccgacuccacccaggcguga

SEQ ID NO: 17400 - RNA, 1260 nt, Artificial Sequence
  SARS-CoV-2__MT750358.1__nucleocapsid protein (N) CDS gc
augagcgacaacggcccccagaaccagcgcaacgccccgcggaucaccuucgggggccccuccgacagcaccggguccaaccagaacggcgagcgcagcggggcccgguccaagcagcgccggccccagggccugcccaacaacacggcgagcugguucaccgcccucacccagcacggcaaggaggaccugaaguucccgcgcgggcagggcgugcccaucaacaccaacuccagccccgacgaccagaucggguacuaccggcgcgccacgcggcgcauccggggcggggacggcaagaugaaggaccugagcccccgcugguacuucuacuaccucggcaccgggccggaggccggccugcccuacggggccaacaaggacggcaucaucugggucgcgaccgagggcgcccugaacacccccaaguaccacaucgggacgcggaaccccgccaacaacgccgcgaucgugcuccagcugccgcagggcaccacccugcccaagggguucuacgccgagggcucccgcgggggcucccaggccagcucccggagcuccagccgcucccggaacagcucccgcaacagcacccccggcagcucccgggggacgagccccgcccgcauggccggcaacgggggcgacgcggcccucgcccugcugcuccuggaccggcugaaccagcucgaguccaagaugagcgggaagggccagcagcagcagggccagaccgugaccaagaaguccgccgccgaggcgagcaagaagccgcgccagaagcgcaccgccacgaaggccuacaacgucacccaggccuucgggcggcgcggccccgagcagacccaggggaacuucggcgaccaggagcugauccggcaggggaccgacuacaagcacuggccccagaucgcccaguucgcgcccuccgccagcgccuucuucggcaugucccgcaucggcauggaggugacgccgagcgggaccuggcugaccuacaccggcgccaucaagcucgacgacaaggaccccaacuucaaggaccaggugauccugcugaacaagcacaucgacgccuacaagacguucccgcccaccgagcccaagaaggacaagaagaagaaggcggacgagacccaggcccucccccagcggcagaagaagcagcagaccgucacgcugcugcccgccgccgaccucgacgacuucuccaagcagcugcagcagagcauguccagcgcggacuccacccaggccuga

SEQ ID NO: 17401 - RNA, 1260 nt, Artificial Sequence
  SARS-CoV-2__MT750385.1__nucleocapsid protein (N) CDS gc
augagcgacaacggcccccagaaccagcgcaacgccccgcggaucaccuucgggggccccuccgacagcaccggguccaaccagaacggcgagcgcagcggggcccgguccaagcagcgccggccccagggccugcccaacaacacggcgagcugguucaccgcccucacccagcacggcaaggaggaccugaaguucccgcgcgggcagggcgugcccaucaacaccaacuccagccccgacgaccagaucggguacuaccggcgcgccacgcggcgcauccggggcggggacggcaagaugaaggaccugagcccccgcugguacuucuacuaccucggcaccgggccggaggccggccugcccuacggggccaacaaggacggcaucaucugggucgcgaccgagggcgcccugaacacccccaaggaccacaucgggacgcggaaccccgccaacaacgccgcgaucgugcuccagcugccgcagggcaccacccugcccaagggguucuacgccgagggcucccgcgggggcucccaggccagcucccggagcuccagccgcucccggaacagcucccgcaacagcacccccggcagcucccgggggacgagccccgcccgcauggccggcaacgggggcgacgcggcccucgcccugcugcuccuggaccggcugaaccagcucgaguccaagaugagcgggaagggccagcagcagcagggccagaccgugaccaagaaguccgccgccgaggcgagcaagaagccgcgccagaagcgcaccgccacgaaggccuacaacgucacccaggccuucgggcggcgcggccccgagcagacccaggggaacuucggcgaccaggagcugauccggcaggggaccgacuacaagcacuggccccagaucgcccaguucgcgcccuccgccagcgccuucuucggcaugucccgcaucggcauggaggugacgccgagcgggaccuggcugaccuacaccggcgccaucaagcucgacgacaaggaccccaacuucaaggaccaggugauccugcugaacaagcacaucgacgccuacaagacguucccgcccaccgagcccaagaaguacaagaagaagaaggcggacgagacccaggcccucccccagcggcagaagaagcagcagaccgucacgcugcugcccgccgccgaccucgacgacuucuccaagcagcugcagcagagcauguccagcgcggacuccacccaggccuga

SEQ ID NO: 17402 - RNA, 1260 nt, Artificial Sequence
  SARS-CoV-2__MT750413.1__nucleocapsid protein (N) CDS gc
augagcgacaacggcccccagaaccagcgcaacgccccgcggaucaccuucgggggccccuccgacagcaccggguccaaccagaacggcgagcgcagcggggcccgguccaagcagcgccggccccagggccugcccaacaacacggcgagcugguucaccgcccucacccagcacggcaaggaggaccugaaguucccgcgcgggcagggcgugcccaucaacaccaacuccagccccgacgaccagaucggguacuaccggcgcgccacgcggcgcauccggggcggggacggcaagaugaaggaccugagcccccgcugguacuucuacuaccucggcaccgggccggaggccggccugcccuacggggccaacaaggacggcaucaucugggucgcgaccgagggcgcccugaacacccccaaggaccacaucgggacgcggaaccccgccaacaacgccagcaucgugcuccagcugccgcagggcaccacccugcccaagggguucuacgcggagggcucccgcgggggcagccaggccuccagccgguccagcucccgcagccggaacuccagccgcaacagcacccccggcuccagcaagcggacgucccccgcccgcauggccgggaacggcggggacgccgcgcucgcccugcugcuccuggaccggcugaaccagcucgagagcaagauguccggcaaggggcagcagcagcagggccagaccgugaccaagaaguccgccgccgaggccuccaagaagccgcgccagaagcgcaccgcgacgaaggccuacaacgucacccaggccuucggccggcgcgggcccgagcagacccagggcaacuucggggaccaggagcugauccggcagggcaccgacuacaagcacuggccccagaucgcccaguucgcccccagcgcguccgccuucuucgggaugagccgcaucggcauggaggugacgccguccggcaccuggcugaccuacaccggggccaucaagcucgacgacaaggaccccaacuucaaggaccaggugauccugcugaacaagcacaucgacgccuacaagacguucccgcccaccgagcccaagaaggacaagaagaagaaggccgacgagacccaggcgcucccccagcggcagaagaagcagcagaccgucacgcugcugcccgccgccgaccucgacgacuucagcaagcagcugcagcaguccaugagcuccgccgacagcacccaggcguga

SEQ ID NO: 17403 - RNA, 1260 nt, Artificial Sequence
  SARS-CoV-2__MT750418.1__nucleocapsid protein (N) CDS gc
augagcgacaacggcccccagaaccagcgcaacgccccgcggaucaccuucgggggccccuccgacagcaccggguccaaccagaacggcgagcgcagcggggcccgguccaagcagcgccggccccagggccugcccaacaacacggcgagcugguucaccgcccucacccagcacggcaaggagaaccugaaguucccgcgcgggcagggcgugcccaucaacaccaacuccagccccgacgaccagaucggguacuaccggcgcgccacgcggcgcauccggggcggggacggcaagaugaaggaccugagcccccgcugguacuucuacuaccucggcaccgggccggaggccggccugcccuacggggccaacaaggacggcaucaucugggucgcgaccgagggcgcccugaacacccccaaggaccacaucgggacgcggaaccccgccaacaacgccgcgaucgugcuccagcugccgcagggcaccacccugcccaagggguucuacgccgagggcagccgcgggggcucccaggccagcucccggagcuccagccgcucccggaacagcucccgcagcagcacccccggcuccagccgggggacgucccccgcccgcauggccggcaacgggggcgacgcggcccucgcccugcugcuccuggaccggcugaaccagcucgagagcaagauguccgggaagggccagcagcagcagggccagaccgugaccaagaaguccgccgccgaggcguccaagaagccgcgccagaagcgcaccgccacgaaggccuacaacgucacccaggccuucgggcggcgcggccccgagcagacccaggggaacuucggcgaccaggagcugauccggcaggggaccgacuacaagcacuggccccagaucgcccaguucgcgcccagcgccuccgccuucuucggcaugagccgcaucggcauggaggugacgccguccgggaccuggcugaccuacaccggcgccaucaagcucgacgacaaggaccccaacuucaaggaccaggugauccugcugaacaagcacaucgacgccuacaagacguucccgcccaccgagcccaagaaguacaagaagaagaaggcggacgagacccaggcccucccccagcggcagaagaagcagcagaccgucacgcugcugcccgccgccgaccucgacgacuucagcaagcagcugcagcaguccaugagcuccgcggacagcacccaggccuga

SEQ ID NO: 17404 - RNA, 1260 nt, Artificial Sequence
  SARS-CoV-2__MT740401.1__nucleocapsid protein (N) CDS gc
augagcgacaacggcccccagaaccagcgcuccgccccgcggaucaccuucgggggccccagcgacuccaccgggagcaaccagaacggcgagcgcuccggggcccggagcaagcagcgccggccccagggccugcccaacaacacggcguccugguucaccgcccucacccagcacggcaaggaggaccugaaguucccgcgcgggcagggcgugcccaucaacaccaacagcucccccgacgaccagaucggguacuaccggcgcgccacgcggcgcauccggggcggggacggcaagaugaaggaccugagcccccgcugguacuucuacuaccucggcaccgggccggaggccggccugcccuacggggccaacaaggacggcaucaucugggucgcgaccgagggcgcccugaacacccccaaggaccacaucgggacgcggaaccccgccaacaacgccgcgaucgugcuccagcugccgcagggcaccacccugcccaagggguucuacgccgagggcucccgcgggggcagccaggccuccagccgguccagcucccgcagccggaacuccagccgcaacagcacccccggcuccagcaagcggacgucccccgcccgcauggccgggaacggcggggacgcggcccucgcccugcugcuccuggaccggcugaaccagcucgagagcaagauguccggcaaggggcagcagcagcagggccagaccgugaccaagaaguccgccgccgaggcgagcaagaagccgcgccagaagcgcaccgccacgaaggccuacaacgucacccaggccuucggccggcgcgggcccgagcagacccagggcaacuucggggaccaggagcugauccggcagggcaccgacuacaagcacuggccccagaucgcccaguucgcgcccagcgccuccgccuucuucgggaugagccgcaucggcauggaggugacgccguccggcaccuggcugaccuacaccggggccaucaagcucgacgacaaggaccccaacuucaaggaccaggugauccugcugaacaagcacaucgacgccuacaagacguucccgcccaccgagcccaagaaggacaagaagaagaaggcggacgagacccaggcccucccccagcggcagaagaagcagcagaccgucacgcugcugcccgccgccgaccucgacgacuucagcaagcagcugcagcaguccaugagcuccgcggacagcacccaggccuga

SEQ ID NO: 17405 - RNA, 1260 nt, Artificial Sequence
  SARS-CoV-2__MT740431.1__nucleocapsid protein (N) CDS gc
augagcuacaacggcccccagaaccagcgcaacgccccgcggaucaccuucgggggccccuccgacagcaccggguccaaccagaacggcgagcgcagcggggcccgguccaagcagcgccggccccagggccugcccaacaacacggcgagcugguucaccgcccucacccagcacggcaaggaggaccugaaguucccgcgcgggcagggcgugcccaucaacaccaacuccagccccgacgaccagaucggguacuaccggcgcgccacgcggcgcauccggggcggggacggcaagaugaaggaccugagcccccgcugguacuucuacuaccucggcaccgggccggaggccggccugcccuacggggccaacaaggacggcaucaucugggucgcgaccgagggcgcccugaacacccccaaggaccacaucgggacgcggaaccccgccaacaacgccgcgaucgugcuccagcugccgcagggcaccacccugcccaagggguucuacgccgagggcucccgcgggggcucccaggccagcucccggagcuccagccgcucccggaacagcucccgcaacagcacccccggcagcuccaagcggacgagccccgcccgcauggccgggaacggcggggacgcggcccucgcccugcugcuccuggaccggcugaaccagcucgaguccaagaugagcggcaaggggcagcagcagcagggccagaccgugaccaagaaguccgccgccgaggcgagcaagaagccgcgccagaagcgcaccgccacgaaggccuacaacgucacccaggccuucggccggcgcgggcccgagcagacccagggcaacuucggggaccaggagcugauccggcagggcaccgacuacaagcacuggccccagaucgcccaguucgcgcccuccgccagcgccuucuucgggaugucccgcaucggcauggaggugacgccgagcggcaccuggcugaccuacaccggggccaucaagcucgacgacaaggaccccaacuucaaggaccaggugauccugcugaacaagcacaucgacgccuacaagacguucccgcccaccgagcccaagaaggacaagaagaagaaggcggacgagacccaggcccucccccagcggcagaagaagcagcagaccgucacgcugcugcccgccgccgaccucgacgacuucuccaagcagcugcagcagagcauguccagcgcggacuccacccaggccuga

SEQ ID NO: 17406 - RNA, 1260 nt, Artificial Sequence
  SARS-CoV-2__MT740438.1__nucleocapsid protein (N) CDS gc
augagcgacaacggcccccagaaccagcgcaacgccccgcggaucaccuucgggggccccuccgacagcaccggguccaaccagaacggcgagcgcagcugggcccgguccaagcagcgccggccccaggggcugcccaacaacacggcgagcugguucaccgcccucacccagcacggcaaggaggaccugaaguucccgcgcggccagggggugcccaucaacaccaacuccagccccgacgaccagaucggcuacuaccggcgcgccacgcggcgcauccgcgggggcgacgggaagaugaaggaccugagcccccggugguacuucuacuaccucggcaccggcccggaggccgggcugcccuacggcgccaacaaggacgggaucaucugggucgcgaccgagggcgcccugaacacccccaaggaccacaucggcacgcggaaccccgccaacaacgccgcgaucgugcuccagcugccgcaggggaccacccugcccaagggcuucuacgccgaggggucccgcggcgggucccaggccagcucccggagcuccagccgcucccggaacagcucccgcaacagcacccccggcagcucccggggcacgagccccgcccgcauggccgggaacggcggggacgcggcccucgcccugcugcuccuggaccggcugaaccagcucgaguccaagaugagcggcaaggggcagcagcagcagggccagaccgugaccaagaaguccgccgccgaggcgagcaagaagccgcgccagaagcgcaccgccacgaaggccuacaacgucacccaggccuucggccggcgcgggcccgagcagacccagggcaacuucggggaccaggagcugauccggcagggcaccgacuacaagcacuggccccagaucgcccaguucgcgcccuccgccagcgccuucuucgggaugucccgcaucggcauggaggugacgccgagcggcaccuggcugaccuacaccggggccaucaagcucgacgacaaggaccccaacuucaaggaccaggugauccugcugaacaagcacaucgacgccuacaagacguucccgcccaccgagcccaagaaggacaagaagaagaaggcggacgagacccaggcccucccccagcggcagaagaagcagcagaccgucacgcugcugcccgccgccgaccucgacgacuucuccaagcagcugcagcagagcauguccagcgcggacuccacccaggccuga

SEQ ID NO: 17407 - RNA, 1260 nt, Artificial Sequence
  SARS-CoV-2__MT740444.1__nucleocapsid protein (N) CDS gc
augagcgacaacggcccccagaaccagcgcaacgccccgcggaucaccuucgggggccccuccgacagcaccggguccaaccagaacggcgagcgcagcggggcccgguccaagcagcgccggccccagggccugcccaacaacacggcgagcugguucaccgcccucacccagcacggcaaggaggaccugaaguucccgcgcgggcagggcgugcccaucaacaccaacuccagccccgacgaccagaucggguacuaccggcgcgccacgcggcgcauccggggcggggacggcaagaugaaggaccugagcccccgcugguacuucuacuaccucggcaccgggccggaggccggccugcccuacggggccaacaaggacggcaucaucugggucgcgaccgagggcgcccugaacacccccaaggaccacaucgggacgcggaaccccgccaacaacgccuccaucgugcuccagcugccgcagggcaccacccugcccaagggguucuacgcggagggcucccgcgggggcagccaggccuccagccgguccagcucccgcagccggaacucccuccgcaacagcacccccggcagcucccgggggacgagccccgcccgcauggccggcaacgggggcgacgccgcgcuggcccugcuccugcuggaccggcucaaccagcuggaguccaagaugagcgggaagggccagcagcagcagggccagaccgugaccaagaaguccgccgccgaggccagcaagaagccgcgccagaagcgcaccgcgacgaaggccuacaacgucacccaggccuucgggcggcgcggccccgagcagacccaggggaacuucggcgaccaggagcugauccggcaggggaccgacuacaagcacuggccccagaucgcccaguucgcccccuccgcgagcgccuucuucggcaugucccgcaucggcauggaggugacgccgagcgggaccuggcucaccuacaccggcgccaucaagcuggacgacaaggaccccaacuucaaggaccaggugauccugcucaacaagcacaucgacgccuacaagacguucccgcccaccgagcccaagaaggacaagaagaagaaggccgacgagacccaggcgcugccccagcggcagaagaagcagcagaccgucacgcugcuccccgccgccgaccuggacgacuucuccaagcagcugcagcagagcauguccagcgccgacuccacccaggcguga

SEQ ID NO: 17408 - RNA, 1260 nt, Artificial Sequence
  SARS-CoV-2__MT731669.1__nucleocapsid protein (N) CDS gc
augagcgacaacggcccccagaaccagcgcaacgccccgcggaucaccuucgggggccccuccgacagcaccggguccaaccagaacggcgagcgcagcggggcccgguccaagcagcgccggccccagggccugcccaacaacacggcgagcugguucaccgcccucacccagcacggcaaggaggaccugaaguucccgcgcgggcagggcgugcccaucaacaccaacuccagccccgacgaccagaucggguacuaccggcgcgccacgcggcgcauccggggcggggacggcaagaugaaggaccugagcccccgcugguacuucuacuaccucggcaccgggccggaggccggccugcccuacggggccaacaaggacggcaucaucugggucgcgaccgagggcgcccugaacacccccaaggaccacaucgggacgcggaaccccuccaacaacgccgccaucgugcuccagcugccgcagggcaccacccugcccaagggguucuacgcggagggcucccgcgggggcagccaggccuccagccgguccagcucccgcagccggaacucccuccgcaacagcacccccggcagcucccgggggacgagccccgcccgcauggccggcaacgggggcgacgccgcgcuggcccugcuccugcuggaccggcucaaccagcuggaguccaagaugagcgggaagggccagcagcagcagggccagaccgugaccaagaaguccgccgccgaggccagcaagaagccgcgccagaagcgcaccgcgacgaaggccuacaacgucacccaggccuucgggcggcgcggccccgagcagacccaggggaacuucggcgaccaggagcugauccggcaggggaccgacuacaagcacuggccccagaucgcccaguucgcccccuccgcgagcgccuucuucggcaugucccgcaucggcauggaggugacgccgagcgggaccuggcucaccuacaccggcgccaucaagcuggacgacaaggaccccaacuucaaggaccaggugauccugcucaacaagcacaucgacgccuacaagacguucccgcccaccgagcccaagaaggacaagaagaagaaggccgacgagacccaggcgcugccccagcggcagaagaagcagcagaccgucacgcugcuccccgccgccgaccuggacgacuucuccaagcagcugcagcagagcauguccagcgccgacuccacccaggcguga

SEQ ID NO: 17409 - RNA, 1260 nt, Artificial Sequence
  SARS-CoV-2__MT712859.1__nucleocapsid protein (N) CDS gc
augagcgacaacggcccccagaaccagcgcaacgccccgcggaucaccuucgggggccccuccgacagcaccggguccaaccagaacggcgagcgcagcggggcccgguccaagcagcgccggccccagggccugcccaacaacacggcgagcugguucaccgcccucacccagcacggcaaggaggaccugaaguucccgcgcgggcagggcgugcccaucaacaccaacuccagccccgacgaccagaucggguacuaccggcgcgccacgcggcgcauccggggcggggacggcaagaugaaggaccugagcccccgcugguacuucuacuaccucggcaccgggccggaggccggccugcccuacggggccaacaaggacggcaucaucugggucgcgaccgagggcgcccugaacacccccaaggaccacaucgggacgcggaaccccgccaacaacgccgcgaucgugcuccagcugccgcagggcaccacccugcccaagggguucuacgccgagggcucccgcgggggcucccaggccagcucccggagcuccagccgcucccggaacagcucccgcaacagcacccccggcagcucccgggggacgagccccgcccgcauggccggcaacgggggcgacgcggcccucgcccugcugcuccuggaccggcugaaccagcucgaguccaagaugagcgggaagggccagcagcagcagggccagaccgugaccaagaaguccgccgccgaggcgagcaagaagccgcgccagaagcgcaccgccacgaaggccuacaacgucacccaggccuucgggcggcgcggccccgagcagacccaggggaacuucggcgaccaggagcugauccggcaggggaccgacuacaagcacuggccccagaucgcccaguucgcgcccuccgccagcgccuucuucggcaugucccgcaucggcauggaggugacgccgagcgggaccuggcugaccuacaccggcgccaucaagcucgacgacaaggaccccaacuucaaggaccaggugauccugcugaacaagcacaucgacgccuacaagacguucccgcccaccgagcccaagaaggaccggaagaagaaggcggacgagacccaggcccucccccagcgccagaagaagcagcagaccgucacgcugcugcccgccgccgaccucgacgacuucuccaagcagcugcagcagagcauguccagcgcggacuccacccaggccuga

SEQ ID NO: 17410 - RNA, 1260 nt, Artificial Sequence
  SARS-CoV-2__MT706136.1__nucleocapsid protein (N) CDS gc
augagcgacaacggcccccagaaccagcgcaacgccccgcggaucaccuucgggggccccuccgacagcaccggguccaaccagaacggcgagcgcagcggggcccgguccaagcagcgccggccccagggccugcccaacaacacggcgagcugguucaccgcccucacccagcacggcaaggaggaccugaaguucccgcgcgggcagggcgugcccaucaacaccaacuccagccccgacgaccagaucggguacuaccggcgcgccacgcggcgcauccggggcggggacggcaagaugaaggaccugagcccccgcugguacuucuacuaccucggcaccgggccggaggccggccugcccuacggggccaacaaggacggcaucaucugggucgcgaccgagggcgcccugaacacccccaaggaccacaucgggacgcggaaccccgccaacaacgccgcgaucgugcuccagcugccgcagggcaccacccugcccaagggguucuacgccgagggcagccgcgggggcucccaggccagcucccggagcuccagccgcucccggaacagcucccgcaacagcacccccagcuccagccggggcacgucccccgcccgcauggccgggaacggcggggacgcggcccucgcccugcugcuccuggaccggcugaaccagcucgagagcaagauguccggcaaggggcagcagcagcagggccagaccgugaccaagaaguccgccgccgaggcguccaagaagccgcgccagaagcgcaccgccacgaaggccuacaacgucacccaggccuucggccggcgcgggcccgagcagacccagggcaacuucggggaccaggagcugauccggcagggcaccgacuacaagcacuggccccagaucgcccaguucgcgcccagcgccuccgccuucuucgggaugagccgcaucggcauggaggugacgccguccggcaccuggcugaccuacaccggggccaucaagcucgacgacaaggaccccaacuucaaggaccaggugauccugcugaacaagcacaucgacgccuacaagacguucccgcccaccgagcccaagaaggacaagaagaagaaggcggacgagacccaggcccucccccagcggcagaagaagcagcagaccgucacgcugcugcccgccgccgaccucgacgacuucagcaagcagcugcagcaguccaugagcuccgcggacagcacccaggccuga

SEQ ID NO: 17411 - RNA, 1260 nt, Artificial Sequence
  SARS-CoV-2__MT706164.1__nucleocapsid protein (N) CDS gc
augagcgacaacggcccccagaaccagcgcaacgccccgcggaucaccuucgggggccccuccgacagcaccggguccaaccagaacggcgagcgcagcggggcccgguccaagcagcgccggccccagggccugcccaacaacacggcgagcugguucaccgcccucacccagcacggcaaggaggaccugaaguucccgcgcgggcagggcgugcccaucaacaccaacuccagccccgacgaccagaucggguacuaccggcgcgccacgcggcgcauccggggcggggacggcaagaugaaggaccugagcccccgcugguacuucuacuaccucggcaccgggccggaggccggccugcccuacggggccaacaaggacggcaucaucugggucgcgaccgagggcgcccugaacacccccaaggaccacaucgggacgcggaaccccgccaacaacgccgcgaucgugcuccagcugccgcagggcaccacccugcccaagggguucuacgccgagggcucccgcgggggcucccaggccagcucccggagcuccagccgcucccggaacagcucccgcaacagcacccccggcagcucccgggggacgagccccgcccgcauggccggcaacgggggcgacgcggcccucgcccugcugcuccuggaccggcugaaccagcucgaguccaagaugagcgggaagggccagcagcagcagggccagaccgugaccaagaaguccgccgccgaggcgagcaagaagccgcgccagaagcgcaccgccacgaaggccuacaacgucacccaggccuucgggcggcgcggccccgagcagacccaggggaacuucggcgaccaggagcugauccggcaggggaccgacuacaagcacuggccccagaucgcccaguucgcgcccuccgccagcgccuucuucggcaugucccgcaucggcauggaggugacgccgagcgggacccugcucaccuacaccggcgccaucaagcuggacgacaaggaccccaacuucaaggaccaggugauccugcucaacaagcacaucgacgccuacaagacguucccgcccaccgagcccaagaaggacaagaagaagaaggcggacgagacccaggcccugccccagcggcagaagaagcagcagaccgucacgcugcuccccgccgccgaccuggacgacuucuccaagcagcugcagcagagcauguccagcgcggacuccacccaggccuga

SEQ ID NO: 17412 - RNA, 1260 nt, Artificial Sequence
  SARS-CoV-2__MT706232.1__nucleocapsid protein (N) CDS gc
augagcgacaacggcccccagaaccagcgcaacgccccgcggaucaccuucgggggccccuccgacagcaccggguccaaccagaacggcgagcgcagcggggcccgguccaagcagcgccggccccagggccugcccaacaacacggcgagcugguucaccgcccucacccagcacggcaaggaggaccugaaguucccgcgcgggcagggcgugcccaucaacaccaacuccagccccgacgaccagaucggguacuaccggaucgccacgcgccggauccgcggcggggacggcaagaugaaggaccugagcccccggugguacuucuacuaccucggcaccgggccggaggccggccugcccuacggggccaacaaggacggcaucaucugggucgcgaccgagggcgcccugaacacccccaaggaccacaucgggacgcgcaaccccgccaacaacgccgcgaucgugcuccagcugccgcagggcaccacccugcccaagggguucuacgccgagggcucccgcgggggcucccaggccagcucccggagcuccagccggucccgcaacagcucccggaacagcacccccggcagcucccgcgggacgagccccgcccggauggccggcaacgggggcgacgcggcccucgcccugcugcuccuggaccgccugaaccagcucgaguccaagaugagcgggaagggccagcagcagcagggccagaccgugaccaagaaguccgccgccgaggcgagcaagaagccgcggcagaagcgcaccgccacgaaggccuacaacgucacccaggccuucgggcgccggggccccgagcagacccaggggaacuucggcgaccaggagcugauccgccaggggaccgacuacaagcacuggccccagaucgcccaguucgcgcccuccgccagcgccuucuucggcaugucccggaucggcauggaggugacgccgagcgggaccuggcugaccuacaccggcgccaucaagcucgacgacaaggaccccaacuucaaggaccaggugauccugcugaacaagcacaucgacgccuacaagacguucccgcccaccgagcccaagaaggacaagaagaagaaggcggacgagacccaggcccucccccagcgccagaagaagcagcagaccgucacgcugcugcccgccgccgaccucgacgacuucuccaagcagcugcagcagagcauguccagcgcggacuccacccaggccuga

SEQ ID NO: 17413 - RNA, 1260 nt, Artificial Sequence
  SARS-CoV-2__MT706311.1__nucleocapsid protein (N) CDS gc
augagcgacaacggcccccagaaccagcgcaacgccacccggaucaccuucgggggcccguccgacagcacgggguccaaccagaacggcgagcgcagcggggcccgguccaagcagcgccggccccagggccugcccaacaacaccgcgagcugguucaccgcccucacccagcacggcaaggaggaccugaaguucccccgcgggcagggcgugccgaucaacacgaacuccagccccgacgaccagaucggguacuaccggcgcgccacccggcgcauccggggcggggacggcaagaugaaggaccugagcccccgcugguacuucuacuaccucggcaccgggcccgaggccggccugccguacggggccaacaaggacggcaucaucugggucgcgaccgagggcgcccugaacacgcccaaggaccacaucgggacccggaaccccgccaacaacgccgcgaucgugcuccagcugccccagggcaccacccugccgaagggguucuacgccgagggcucccgcgggggcucccaggccagcucccggagcuccagccgcucccggaacagcucccgcaacagcacgcccggcagcucccgggggaccagccccgcccgcauggccggcaacgggggcgacgcggcccucgcccugcugcuccuggaccggcugaaccagcucgaguccaagaugagcgggaagggccagcagcagcagggccagaccgugaccaagaaguccgccgccgaggcgagcaagaagccccgccagaagcgcacggccaccaaggccuacaacgucacccaggccuucgggcggcgcggcccggagcagacccaggggaacuucggcgaccaggagcugauccggcaggggacggacuacaagcacuggccccagaucgcccaguucgcgcccuccgccagcgccuucuucggcaugucccgcaucggcauggaggugacccccagcgggaccuggcugaccuacacgggcgccaucaagcucgacgacaaggacccgaacuucaaggaccaggugauccugcugaacaagcacaucgacgccuacaagaccuucccgcccaccgagcccaagaaggacaagaagaagaaggcggacgagacccaggcccucccccagcggcagaagaagcagcagacggucacccugcugcccgccgccgaccucgacgacuucuccaagcagcugcagcagagcauguccagcgcggacuccacccaggccuga

SEQ ID NO: 17414 - RNA, 1260 nt, Artificial Sequence
  SARS-CoV-2__MT706312.1__nucleocapsid protein (N) CDS gc
augagcgacaacggcccccagaaccagcgcaacgccccgcggaucaccuucgggggccccuccgacagcaccggguccaaccagaacggcgagcgcagcggggcccgguccaagcagcgccggccccagggccugcccaacaacacggcgagcugguucaccgcccucacccagcacggcaaggaggaccugaaguucccgcgcgggcagggcgugcccaucaacaccaacuccagccccgacgaccagaucggguacuaccggcgcgccacgcggcgcauccggggcggggacggcaagaugaaggaccugagcccccgcugguacuucuacuaccucggcaccgggccggaggccggccugcccuacggggccaacaaggacggcaucaucugggucgcgaccgagggcgcccugaacacccccaaggaccacaucgggacgcggaaccccgccaacaacgccgcgaucgugcuccagcugccgcagggcaccacccugcccaagggguucuacgccgagggcucccgcgggggcucccaggccagcucccggagcuccagccgcucccggaacagcucccgcaacagcacccccggcagcucccgggggacgagccccggccgcauggccgggaacggcggggacgccgcgcucgcccugcugcuccuggaccggcugaaccagcucgaguccaagaugagcggcaagggccagcagcagcaggggcagaccgugaccaagaaguccgccgccgaggccagcaagaagccgcgccagaagcgcaccgcgacgaaggccuacaacgucacccaggccuucggccggcgcgggcccgagcagacccagggcaacuucggggaccaggagcugauccggcagggcaccgacuacaagcacuggccccagaucgcccaguucgcccccuccgcgagcgccuucuucggcaugucccgcaucgggauggaggugacgccgagcggcaccuggcugaccuacaccggggccaucaagcucgacgacaaggaccccaacuucaaguaccaggugauccugcugaacaagcacaucgacgccuacaagacguucccgcccaccgagcccaagaaggacaagaagaagaaggccgacgagacccaggcgcucccccagcggcagaagaagcagcagaccgucacgcugcugcccgccgccgaccucgacgacuucuccaagcagcugcagcagagcauguccagcgccgacuccacccaggcguga

SEQ ID NO: 17415 - RNA, 1260 nt, Artificial Sequence
  SARS-CoV-2__MT706334.1__nucleocapsid protein (N) CDS gc
augagcgacaacggcccccagaaccagcgcaacgccccgcggaucaccuucgggggccccuccgacagcaccggguccaaccagaacggcgagcgcagcggggcccgguccaagcagcgccggccccagggccugcccaacaacacggcgagcugguucaccgcccucacccagcacggcaaggaggaccugaaguucccgcgcgggcagggcgugcccaucaacaccaacuccagccccgacgaccagaucggguacuaccggcgcgccacgcggcgcauccggggcggggacggcaagaugaaggaccugagcccccgcugguacuucuacuaccucggcaccgggccggaggccggccugcccuacggggccaacaaggacggcaucaucugggucgcgaccgagggcgcccugaacacccccaaggaccacaucgggacgcggaaccccgccaacaacgccgcgaucgugcuccagcugccgcagggcaccacccugcccaagggguucuacgccgagggcucccgcgggggcucccaggccagcucccggagcuccagccgcucccggaacagcucccgcaacagcacccccggcagcucccgggggacgagccccgcccgcauggccggcaacgggggcgacgcggcccucgcccugcugcuccuggaccggcugaaccagcucgaguccaagaugagcgggaagggccagcagcagcagggccagaccgugaucaagaaguccgccgccgaggcgagcaagaagccgcgccagaagcgcaccgccaccaaggccuacaacgucacgcaggccuucgggcggcgcggccccgagcagacccaggggaacuucggcgaccaggagcugauccggcaggggaccgacuacaagcacuggccccagaucgcccaguucgcgcccuccgccagcgccuucuucggcaugucccgcaucggcauggaggugaccccgagcgggacguggcugaccuacaccggcgccaucaagcucgacgacaaggaccccaacuucaaggaccaggugauccugcugaacaagcacaucgacgccuacaagaccuucccgcccacggagcccaagaaggacaagaagaagaaggcggacgagacccaggcccucccccagcggcagaagaagcagcagaccgucacccugcugcccgccgccgaccucgacgacuucuccaagcagcugcagcagagcauguccagcgcggacuccacgcaggccuga

SEQ ID NO: 17416 - RNA, 1260 nt, Artificial Sequence
  SARS-CoV-2__MT706337.1__nucleocapsid protein (N) CDS gc
augagcgacaacggcccccagaaccagcgcaacgccccgcggaucaccuucgggggccccuccgacagcaccggguccaaccagaacggcgagcgcagcggggcccgguccaagcagcgccggccccagggccugcccaacaacacggcgagcugguucaccgcccucacccagcacggcaaggaggaccugaaguucccgcgcgggcagggcgugcccaucaacaccaacuccagccccgacgaccagaucggguacuaccggcgcgccacgcggcgcauccggggcggggacggcaagaugaaggaccugagcccccgcugguacuucuacuaccucggcaccgggccggaggccggccugcccuacggggccaacaaggacggcaucaucugggucgcgaccgagggcgcccugaacacccccaaggaccacaucgggacgcggaaccccgccaacaacgccgcgaucgugcuccagcugccgcagggcaccacccugcccaagggguucuacgccgagggcucccgcgggggcucccaggccagcucccggagcuccagccgcucccggaacagcucccgcaacagcacccccggcagcucccgggggacgagccccgcccgcauggccggcaacgggggcgacgcggcccucgcccugcugcuccuggaccggcugaaccagcucgaguccaagaugagcgggaagggccagcagcagcagggccagaccgugaccaagaaguccgccgccgaggcgagcaagaagccgcgccagaagcgcaccgccacgaaggccuacaacgucacccaggccuucgggcggcgcggccccgagcagacccaggggaacuucggcgaccaggagcugauccggcaggggaccgacuacaagcacuggccccagaucgcccaguucgcgcccuccgccagcgccuucuucggcaugucccgcaucggcauggaggugacgccgagcgggaccuggcugaccuacaccggcgccaucaagcucgacgacaaggaccccaacuucaaggaccaggugauccugcugaacaagcacaucgacgccuacaagacguucccgcccaccgagcccaagaaggacaagaagaagaaggcggacgagacccagguccucccccagcggcagaagaagcagcagaccgugacgcugcugcccgccgccgaccucgacgacuucuccaagcagcugcagcagagcauguccagcgccgacuccacccaggcguga

SEQ ID NO: 17417 - RNA, 1260 nt, Artificial Sequence
  SARS-CoV-2__MT706363.1__nucleocapsid protein (N) CDS gc
augagcgacaacggcccccagaaccagcgcaacgccccgcggaucaccuucgggggccccuccgacagcaccggguccaaccagaacggcgagcgcagcggggcccgguccaagcagcgccggccccagggccugcccaacaacacggcgagcugguucaccgcccucacccagcacggcaaggaggaccugaaguucccgcgcgggcagggcgugcccaucaacaccaacuccagccccgacgaccagaucggguacuaccggcgcgccacgcggcgcauccggggcggggacggcaagaugaaggaccugagcccccgcugguacuucuacuaccucggcaccgggccggaggccggccugcccuacggggccaacaaggacggcaucaucugggucgcgaccgagggcgcccugaacacccccaaggaccacaucgggacgcggaaccccgccaacaacgccgcgaucgugcuccagcugccgcagggcaccacccugcccaagggguucuacgccgagggcucccgcgggggcucccaggccagcucccggagcuccagccgcucccggaacagcucccgcaacagcacccccggcagcucccgggggacgagccccgcccgcauggccggcaacgggggcgacgcggcccucgcccugcugcuccuggaccggcugaaccagcucgaguccaagaugagcgggaagggccagcagcagcagggccagaccgugaccaagaaguccgccgccgaggcgagcaagaagccgcgccagaagcgcaccgccacgaaggccuacaacgucacccaggccuucgggcggcgcggccccgagcagacccaggggaacuucggcgaccaggagcugauccggcaggggaccgacuacaagcacuggccccagaucgcccaguucgcgcccuccgccagcgccuucuucggcaugucccgcaucggcauggaggugacgccgagcgggaccuggcugaccuacaccggcgccuucaagcucgacgacaaggaccccaacuucaaggaccaggugauccugcugaacaagcacaucgacgccuacaagacguucccgcccaccgagcccaagaaggacaagaagaagaaggcggacgagacccaggcccucccccagcggcagaagaagcagcagaccgucacgcugcugcccgccgccgaccucgacgacuucuccaagcagcugcagcagagcauguccagcgcggacuccacccaggccuga

SEQ ID NO: 17418 - RNA, 1260 nt, Artificial Sequence
  SARS-CoV-2__MT706376.1__nucleocapsid protein (N) CDS gc
augagcgacaacggcccccagaaccagcgcaacgccccgcggaucaccuucgggggccccuccgacagcaccggguccaaccagaacggcgagcgcagcggggcccgguccaagcagcgccggccccagggccugcccaacaacacggcgagcugguucaccgcccucacccagcacggcaaggaggaccugaaguucccgcgcgggcagggcgugcccaucaacaccaacuccagccccgacgaccagaucggguacuaccggcgcgccacgcggcgcauccggggcggggacggcaagaugaaggaccugagcccccgcugguacuucuacuaccucggcaccgggccggaggccggccugcccuacggggccaacaaggacggcaucaucugggucgcgaccgagggcgcccugaacacccccaaggaccacaucgggacgcggaaccccgccaacaacgccgcgaucgugcuccagcugccgcagggcaccacccugcccaagggguucuacgccgagggcucccgcgggggcucccaggccagcucccggagcuccagccgcucccggaacagcucccgcaacagcacccccggcagcucccgggggacgagccccgcccgcaucgccggcaacgggggcgacgcggcccucgcccugcugcuccuggaccggcugaaccagcucgaguccaagaugagcgggaagggccagcagcagcagggccagaccgugaccaagaaguccgccgccgaggcgagcaagaagccgcgccagaagcgcaccgccacgaaggccuacaacgucacccaggccuucgggcggcgcggccccgagcagacccaggggaacuucggcgaccaggagcugauccggcaggggaccgacuacaagcacuggccccagaucgcccaguucgcgcccuccgccagcgccuucuucggcaugucccgcaucggcauggaggugacgccgagcgggaccuggcugaccuacaccggcgccaucaagcucgacgacaaggaccccaacuucaaggaccaggugauccugcugaacaagcacaucgacgccuacaagacguucccgcccaccgagcccaagaaggacaagaagaagaaggcggacgagacccaggcccucccccagcggcagaagaagcagcagaccgucacgcugcugcccgccgccgaccucgacgacuucuccaagcagcugcagcagagcauguccagcgcggacuccacccaggccuga

SEQ ID NO: 17419 - RNA, 1260 nt, Artificial Sequence
  SARS-CoV-2__MT706398.1__nucleocapsid protein (N) CDS gc
augagcgacaacggcccccagaaccagcgcaacgccccgcggaucaccuucgggggccccuccgacagcaccggguccaaccagaacggcgagcgcagcggggcccgguccaagcagcgccggccccagggccugcccaacaacacggcgagcugguucaccgcccucacccagcacggcaaggaggaccugaaguucccgcgcgggcagggcgugcccaucaacaccaacuccagccccgacgaccagaucggguacuaccggcgcgccacgcggcgcauccggggcggggacggcaagaugaaggaccugagcccccgcugguacuucuacuaccucggcaccgggccggaggccggccugcccuacggggccaacaaggacggcaucaucugggucgcgaccgagggcgcccugaacacccccaagcaccacaucgggacgcggaaccccgccaacaacgccgcgaucgugcuccagcugccgcagggcaccacccugcccaagggguucuacgccgagggcucccgcgggggcucccaggccagcucccggagcuccagccgcucccggaacagcucccgcaacagcacccccggcagcucccgggggacgagccccgcccgcauggccggcaacgggggcgacgcggcccucgcccugcugcuccuggaccggcugaaccagcucgaguccaagaugagcgggaagggccagcagcagcagggccagaccgugaccaagaaguccgccgccgaggcgagcaagaagccgcgccagaagcgcaccgccacgaaggccuacaacgucacccaggccuucgggcggcgcggccccgagcagacccaggggaacuucggcgaccaggagcugauccggcaggggaccgacuacaagcacuggccccagaucgcccaguucgcgcccuccgccagcgccuucuucggcaugucccgcaucggcauggaggugacgccgagcgggaccuggcugaccuacaccggcgccaucaagcucgacgacaaggaccccaacuucaaggaccaggugauccugcugaacaagcacaucgacgccuacaagacguucccgcccaccgagcccaagaaggacaagaagaagaaggcggacgagacccaggcccucccccagcggcagaagaagcagcagaccgucacgcugcugcccgccgccgaccucgacgacuucuccaagcagcugcagcagagcauguccagcgcggacuccacccaggccuga

SEQ ID NO: 17420 - RNA, 1260 nt, Artificial Sequence
  SARS-CoV-2__MT704017.1__nucleocapsid protein (N) CDS gc
augagcgacaacggcccccagaaccagcgcaacgccccgcggaucaccuucgggggccccuccgacagcaccggguccaaccagaacggcgagcgcagcggggcccgguccaagcagcgccggccccagggccugcccaacaacacggcgagcugguucaccgcccucacccagcacggcaaggaggaccugaaguucccgcgcgggcagggcgugcccaucaacaccaacuccagccccgacgaccagaucggguacuaccggcgcgccacgcggcgcauccggggcggggacggcaagaugaaggaccugagcccccgcugguacuucuacuaccucggcaccgggccggaggucggccugcccuacggggccaacaaggacggcaucaucuggguggccaccgagggcgcgcugaacacccccaaggaccacaucgggacgcggaaccccgccaacaacgccgccaucgugcuccagcugccgcagggcaccacccugcccaagggguucuacgcggagggcucccgcgggggcucccaggccagcucccggagcuccagccgcucccggaacagcucccgcaacagcacccccggcagcucccgggggacgagccccgcccgcauggccggcaacgggggcgacgccgcgcucgcccugcugcuccuggaccggcugaaccagcucgaguccaagaugagcgggaagggccagcagcagcagggccagaccgucaccaagaaguccgccgccgaggccagcaagaagccgcgccagaagcgcaccgcgacgaaggccuacaacgugacccaggccuucgggcggcgcggccccgagcagacccaggggaacuucggcgaccaggagcugauccggcaggggaccgacuacaagcacuggccccagaucgcccaguucgcccccuccgcgagcgccuucuucggcaugucccgcaucggcauggaggugacgccgagcgggaccuggcugaccuacaccggcgccaucaagcucgacgacaaggaccccaacuucaaggaccaggucauccugcugaacaagcacaucgacgccuacaagacguucccgcccaccgagcccaagaaggacaagaagaagaaggccgacgagacccaggcgcucccccagcggcagaagaagcagcagaccgugacgcugcugcccgccgccgaccucgacgacuucuccaagcagcugcagcagagcauguccagcgccgacuccacccaggcguga

SEQ ID NO: 17421 - RNA, 1260 nt, Artificial Sequence
  SARS-CoV-2__MT704066.1__nucleocapsid protein (N) CDS gc
augagcgacaacggcccccagaaccagcgcaacgccccgcggaucaccuucgggggccccuccgacagcaccggguccaaccagaacggcgagcgcagcggggcccgguccaagcagcgccggccccagggccugcccaacaacacggcgagcugguucaccgcccucacccagcacggcaaggaggaccugaaguucccgcgcgggcagggcgugcccaucaacaccaacuccagccccgacgaccagaucggguacuaccggcgcgccacgcggcgcauccggggcggggacggcaagaugaaggaccugagcccccgcugguacuucuacuaccucggcaccgggccggaggccggccugcccuacggggccaacaaggacggcaucaucugggucgcgaccgagggcgcccugaacacccccaaggaccacaucgggacgcggaacagcgccaacaacgccgcgaucgugcuccagcugccccagggcaccacccugccgaagggguucuacgccgagggcucccgcgggggcagccaggccuccagccgguccagcucccgcagccggaacuccagccgcaacagcacccccggcuccagccgggggacgucccccgcccgcauggccggcaacgggggcgacgcggcccucgcccugcugcuccuggaccggcugaaccagcucgagagcaagauguccgggaagggccagcagcagcagggccagaccgugaccaagaaguccgccgccgaggcguccaagaagccccgccagaagcgcaccgccacgaaggccuacaacgucacccaggccuucgggcggcgcggcccggagcagacccaggggaacuucggcgaccaggagcugauccggcaggggaccgacuacaagcacuggccccagaucgcccaguucgcgcccagcgccuccgccuucuucggcaugagccgcaucggcauggaggugacgcccuccgggaccuggcugaccuacaccggcgccaucaagcucgacgacaaggacccgaacuucaaggaccaggugauccugcugaacaagcacaucgacgccuacaagacguucccgcccaccgagcccaagaaggacaagaagaagaaggcggacgagacccaggcccucccccagcggcagaagaagcagcagaccgucacgcugcugcccgccgccgaccucgacgacuucagcaagcagcugcagcaguccaugagcuccgcggacagcacccaggccuga

SEQ ID NO: 17422 - RNA, 1260 nt, Artificial Sequence
  SARS-CoV-2__MT704068.1__nucleocapsid protein (N) CDS gc
augagcgacaacggcccccagaaccagcgcaacgccccgcggaucaccuucgggggccccuccgacagcaccggguccaaccagaacggcgagcgcagcggggcccgguccaagcagcgccggccccagggccugcccaacaacacggcgagcugguucaccgcccucacccagcacggcaaggaggaccugaaguucccgcgcgggcagggcgugcccaucaacaccaacuccagccccgacgaccagaucggguacuaccggcgcgccacgcggcgcauccggggcggggacggcaagaugaaggaccugagcccccgcugguacuucuacuaccucggcaccgggccggaggccggccugcccuacggggccaacaaggacggcaucaucugggucgcgaccgagggcgcccugaacacccccaaggaccacaucgggacgcggaaccccgccaacaacgccgcgaucgugcuccagcugccgcagggcaccacccugcccaagggguucuacgccgagggcucccgcgggggcucccaggccagcucccggagcuccagccgcucccggaacagcucccgcaacagcacccccggcagcucccgggggacgagccccgcccgcauggccggcaacgggggcgacgcggcccucgcccugcugcuccuggaccggcugaaccagcucgaguccaagaugagcgggaagggccagcagcagcagggccagaccgugaccaagaaguccgccgccgaggcgagcaagaagccgcgccagaagcgcaccgccacgaaggccuacaacgucacccaggccuucgggcggcgcggccccgagcagacccaggggaacuucggcgaccuggagcugauccggcaggggaccgacuacaagcacuggccccagaucgcccaguucgcgcccuccgccagcgccuucuucggcaugucccgcaucggcauggaggugacgccgagcgggaccuggcucaccuacaccggcgccaucaagcuggacgacaaggaccccaacuucaaggaccaggugauccugcucaacaagcacaucgacgccuacaagacguucccgcccaccgagcccaagaaggacaagaagaagaaggcggacgagacccaggcccugccccagcggcagaagaagcagcagaccgucacgcugcuccccgccgccgaccuggacgacuucuccaagcagcugcagcagagcauguccagcgcggacuccacccaggccuga

SEQ ID NO: 17423 - RNA, 1260 nt, Artificial Sequence
  SARS-CoV-2__MT704112.1__nucleocapsid protein (N) CDS gc
augagcgacaacggcccccagaaccagcgcaacgccccgcggaucaccuucgggggccccuccgacagcaccggguccaaccagaacggcgagcgcagcggggcccgguccaagcagcgccggccccagggccugcccaacaacacggcgagcugguucaccgcccucacccagcacggcaaggaggaccugaaguucccgcgcgggcagggcgugcccaucaacaccaacuccagccccgacgaccagaucggguacuaccggcgcgccacgcggcgcauccggggcggggacggcaagaugaaggaccugagcccccgcugguacuucuacuaccucggcaccgggccggaggccggccugcccuacggggccaacaaggacggcaucaucugggucgcgaccgagggcgcccugaacacccccaaggaccacaucgggacgcggaaccccgccaacaacgccgcgaucgugcuccagcugccgcagggcaccacccugcccaagggguucuacgccgagggcagccgcgggggcucccaggccagcucccggagcuccagccgcucccggaacaacagccgcaacuccacccccggcagcagccgggggacgucccccgcccgcauggccggcaacgggggcgacgcggcccucgcccugcugcuccuggaccggcugaaccagcucgagagcaagauguccgggaagggccagcagcagcagggccagaccgugaccaagaaguccgccgccgaggcguccaagaagccgcgccagaagcgcaccgccacgaaggccuacaacgucacccaggccuucgggcggcgcggccccgagcagacccaggggaacuucggcgaccaggagcugauccggcaggggaccgacuacaagcacuggccccagaucgcccaguucgcgcccagcgccuccgccuucuucggcaugagccgcaucggcauggaggugacgccguccgggaccuggcugaccuacaccggcgccaucaagcucgacgacaaggaccccaacuucaaggaccaggugauccugcugaacaagcacaucgacgccuacaagacguucccgcccaccgagcccaagaaggacaagaagaagaaggcggacgagacccaggcccucccccagcggcagaagaagcagcagaccgucacgcugcugcccgccgccgaccucgacgacuucagcaagcagcugcagcaguccaugagcuccgcggacagcacccaggccuga

SEQ ID NO: 17424 - RNA, 1260 nt, Artificial Sequence
  SARS-CoV-2__MT683418.1__nucleocapsid protein (N) CDS gc
augagcgacaacggcccccagaaccagcgcaacgccccgcggaucaccuucgggggccccuccgacagcaccggguccaaccagaacggcgagcgcagcgggucccggagcaagcagcgccggccccagggccugcccaacaacacggccuccugguucaccgcgcucacccagcacggcaaggaggaccugaaguucccgcgcgggcagggcgugcccaucaacaccaacagcucccccgacgaccagaucggguacuaccggcgcgccacgcggcgcauccggggcggggacggcaagaugaaggaccugagcccccgcugguacuucuacuaccucggcaccgggccggaggccggccugcccuacggggccaacaaggacggcaucaucugggucgccaccgagggcgcgcugaacacccccaaggaccacaucgggacgcggaaccccgccaacaacgccgccaucgugcuccagcugccgcagggcaccacccugcccaagggguucuacgcggagggcucccgcgggggcagccaggccuccagccgguccagcucccgcagccggaacuccagccgcaacagcacccccggcuccagccgggggacgucccccgcccgcauggccggcaacgggggcgacgccgcgcucgcccugcugcuccuggaccggcugaaccagcucgagagcaagauguccgggaagggccagcagcagcagggccagaccgugaccaagaaguccgccgccgaggccagcaagaagccgcgccagaagcgcaccgcgacgaaggccuacaacgucacccaggccuucgggcggcgcggccccgagcagacccaggggaacuucggcgaccaggagcugauccggcaggggaccgacuacaagcacuggccccagaucgcccaguucgcccccagcgcguccgccuucuucggcaugagccgcaucggcauggaggugacgccguccgggaccuggcugaccuacaccggcgccaucaagcucgacgacaacgaccccaacuucaaggaccaggugauccugcugaacaagcacaucgacgccuacaagacguucccgcccaccgagcccaagaaggacaagaagaagaaggccgacgagacccaggcgcucccccagcggcagaagaagcagcagaccgucacgcugcugcccgccgccgaccucgacgacuucagcaagcagcugcagcaguccaugagcuccgccgacagcacccaggcguga

SEQ ID NO: 17425 - RNA, 1260 nt, Artificial Sequence
  SARS-CoV-2__MT678839.1__nucleocapsid protein (N) CDS gc
augagcgacaacggcccccagaaccagcgcaacgccccgcggaucaccuucgggggccccuccgacagcaccggguccaaccagaacggcgagcgcagcggggcccgguccaagcagcgccggccccagggccugcccaacaacacggcgagcugguucaccgcccucacccagcacggcaaggaggaccugaaguucccgcgcgggcagggcgugcccaucaacaccaacuccagccccgacgaccagaucggguacuaccggcgcgccacgcggcgcauccggggcggggacggcaagaugaaggaccugagcccccgcugguacuucuacuaccucggcaccgggccggaggccggccugcccuacggggccaacaaggacggcaucaucugggucgcgaccgagggcgcccugaacacccccaaggaccacaucgggacgcggaaccccgccaacaacgccgcgaucgugcuccagcugccgcagggcaccacccugcccaagggguucuacgccgagggcucccgcgggggcucccaggccagcucccggagcuccagccgcucccggaacagcucccgcaacagcacccccggcagcucccgggggacgagccccgcccgcauggccggcaacgggggcgacgcggcccucgcccugcugcuccuggaccggcugaaccagcucgaguccaagaugagcgggaagggccagcagcagcagggccagaccgugaccaagaaguccgccgccgaggcgagcaagaagccgcgccagaagcgcaccgccacgaaggccuacaacgucacccaggccuucgggcggcgcggccccgagcagacccaggggaacuucggcgaccaggagcugauccggcaggggaccgacuacaagcacuggccccagaucgcccaguucgcgcccuccgccagcgccuucuucggcaugucccgcaucggcauggaggugacgccgagcgggaccuggcugaccuacaccggcgccaucaagcucgacgacaaggaccccaacuucaaggaccaggugauccugcugaacaagcacaucgacgccuacaucacguucccgcccaccgagcccaagaaggacaagaagaagaaggcggacgagacccaggcccucccccagcggcagaagaagcagcagaccgucacgcugcugcccgccgccgaccucgacgacuucuccaagcagcugcagcagagcauguccagcgcggacuccacccaggccuga

SEQ ID NO: 17426 - RNA, 1260 nt, Artificial Sequence
  SARS-CoV-2__MT611442.1__nucleocapsid protein (N) CDS gc
augagcgacaacggcccccagaaccagcgcaacgccccgcggaucaccuucgggggccccuccgacagcaccggguccaaccagaacggcgagcgcagcggggcccgguccaagcagcgccggccccagggccugcccaacaacacggcgagcugguucaccgcccucacccagcacggcaaggaggaccugaaguucccgcgcgggcagggcgugcccaucaacaccaacuccagccccgacgaccagaucggguacuaccggcgcgccacgcggcgcauccggggcggggacggcaagaugaaggaccugagcccccgcugguacuucuacuaccucggcaccgggccggaggccggccugcccuacggggccaacaaggacggcaucaucugggucgcgaccgagggcgcccugaacacccccaaggaccacaucgggacgcggaaccccgccaacaacgccgcgaucgugcuccagcugccgcagggcaccacccugcccaagggguucuacgccgagggcucccgcgggggcucccaggccagcucccggagcuccagccgcucccggaacagcucccgcaacagcacccccggcagcucccgggggacgagccccgcccgcauggccggcaacgggggcgacgcggcccucgcccugcugcuccuggaccggcugaaccagcucgaguccaagaugagcgggaagggccagcagcagcagggccagaccgugaccaagaaguccgccgccgaggcgagcaagaagccgcgccagaagcgcaccgccacgaaggccuacaacgucacccaggccuucgggcggcgcggccccgagcagauccaggggaacuucggcgaccaggagcugauccggcaggggaccgacuacaagcacuggccccagaucgcccaguucgcgcccuccgccagcgccuucuucggcaugucccgcaucggcauggaggugaccccgagcgggacguggcugaccuacaccggcgccaucaagcucgacgacaaggaccccaacuucaaggaccaggugauccugcugaacaagcacaucgacgccuacaagaccuucccgcccacggagcccaagaaggacaagaagaagaaggcggacgagacccaggcccucccccagcggcagaagaagcagcagaccgucacccugcugcccgccgccgaccucgacgacuucuccaagcagcugcagcagagcauguccagcgcggacuccacgcaggccuga

SEQ ID NO: 17427 - RNA, 1260 nt, Artificial Sequence
  SARS-CoV-2__MT676368.1__nucleocapsid protein (N) CDS gc
augagcgacaacggcccccagaaccagcgcaacgccccgcggaucaccuucgggggccccuccgacagcaccggguccaaccagaacggcgagcgcagcggggcccgguccaagcagcgccggccccagggccugcccaacaacacggcgagcugguucaccgcccucacccagcacggcaaggaggaccugaaguucccgcgcgggcagggcgugcccaucaacaccaacuccagccccgacgaccagaucggguacuaccggcgcgccacgcggcgcauccggggcggggacggcaagaugaaggaccugagcccccgcugguacuucuacuaccucggcaccgggccggaggccggccugcccuacggggccaacaaggacggcaucaucugggucgcgaccgagggcgcccugaacacccccaaggaccacaucgggacgcggaaccccgccaacaacgccgcgaucgugcuccagcugccgcagggcaccacccugcccaagggguucuacgccgagggcagccgcgggggcucccaggccagcucccggagcuccagccgcucccggaacagccuccgcaacuccacccccggcagcagccgggggacgucccccgcccgcauggccggcaacgggggcgacgcggugcuggcccugcuccugcuggaccggcucaaccagcuggagagcaagauguccgggaagggccagcagcagcagggccagaccgucaccaagaaguccgccgccgaggccuccaagaagccgcgccagaagcgcaccgcgacgaaggccuacaacgugacccaggccuucgggcggcgcggccccgagcagacccaggggaacuucggcgaccaggagcugauccggcaggggaccgacuacaagcacuggccccagaucgcccaguucgcccccagcgcguccgccuucuucggcaugagccgcaucggcauggaggugacgccguccgggaccuggcucaccuacaccggcgccaucaagcuggacgacaaggaccccaacuucaaggaccaggucauccugcucaacaagcacaucgacgccuacaagacguucccgcccaccgagcccaagaaggacaagaagaagaaggccgacgagacccaggcgcugccccagcggcagaagaagcagcagaccgugacgcugcuccccgccgccgaccuggacgacuucagcaagcagcugcagcaguccaugagcuccgccgacagcacccaggcguga

SEQ ID NO: 17428 - RNA, 1260 nt, Artificial Sequence
  SARS-CoV-2__MT669322.1__nucleocapsid protein (N) CDS gc
augagcgacaacggcccccagaaccagcgcaacgccccgcggaucaccuucgggggccccuccgacagcaccggguccaaccagaacggcgagcgcagcggggcccgguccaagcagcgccggccccagggccugcccaacaacacggcgagcugguucaccgcccucacccagcacggcaaggaggaccugaaguucccgcgcgggcagggcgugcccaucaacaccaacuccagccccgacgaccagaucggguacuaccggcgcgccacgcggcgcauccggggcggggacggcaagaugaaggaccugagcccccgcugguacuucuacuaccucggcaccgggccggaggccggccugcccuacggggccaacaaggacggcaucaucugggucgcgaccgagggcgcccugaacacccccaaggaccacaucgggacgcggaaccccgccaacaacgccgcgaucgugcuccagcugccgcagggcaccacccugcccaagggguucuacgccgagggcagccgcgggggcucccaggccagcucccggagcuccagccgcucccggaacagccuccgcaacuccacccccggcagcagcgggcggacgucccccgcccgcauggccggcaacgggggcgacgcggcccuggcccugcuccugcuggaccggcucaaccagcuggagagcaagauguccgggaagggccagcagcagcagggccagaccgugaccaagaaguccgccgccgaggcguccaagaagccgcgccagaagcgcaccgccacgaaggccuacaacgucacccaggccuucgggcggcgcggccccgagcagacccaggggaacuucggcgaccaggagcugauccggcaggggaccgacuacaagcacuggccccagaucgcccaguucgcgcccagcgccuccgccuucuucggcaugagccgcaucggcauggaggugacgccguccgggaccuggcucaccuacaccggcgccaucaagcuggacgacaaggaccccaacuucaaggaccaggugauccugcucaacaagcacaucgacgccuacaagacguucccgcccaccgagcccaagaaggacaagaagaagaaggcggacgagacccaggcccugccccagcggcagaagaagcagcagaccgucacgcugcuccccgccgccgaccuggacgacuucagcaagcagcugcagcaguccaugagcuccgcggacagcacccaggccuga

SEQ ID NO: 17429 - RNA, 1260 nt, Artificial Sequence
  SARS-CoV-2__MT671828.1__nucleocapsid protein (N) CDS gc
augagcgacaacggcccccagaaccagcgcaacgccccgcggaucaccuucgggggccccuccgacagcaccggguccaaccagaacggcgagcgcagcggggcccgguccaagcagcgccggccccagggccugcccaacaacacggcgagcugguucaccgcccucacccagcacggcaaggaggaccugaaguucccgcgcgggcagggcgugcccaucaacaccaacuccagccccgacgaccagaucggguacuaccggcgcgccacgcggcgcauccggggcggggacggcaagaugaaggaccugagcccccgcugguacuucuacuaccucggcaccgggccggaggccggccugcccuacggggccaacaaggacggcaucaucugggucgcgaccgagggcgcccugaacacccccaagcaccacaucgggacgcggaaccccgccaacaacgccgcgaucgugcuccagcugccgcagggcaccacccugcccaagggguucuacgccgagggcucccgcgggggcucccaggccagcucccggagcuccagccgcucccggaacagcucccgcaacagcacccccggcagcuccaagcggacgagccccgcccgcauggccgggaacggcggggacgcggcccucgcccugcugcuccuggaccggcugaaccagcucgaguccaagaugagcggcaaggggcagcagcagcagggccagaccgugaccaagaaguccgccgccgaggcgagcaagaagccgcgccagaagcgcaccgccacgaaggccuacaacgucacccaggccuucggccggcgcgggcccgagcagacccagggcaacuucggggaccaggagcugauccggcagggcaccgacuacaagcacuggccccagaucgcccaguucgcgcccuccgccagcgccuucuucgggaugucccgcaucggcauggaggugacgccgagcggcaccuggcugaccuacaccggggccaucaagcucgacgacaaggaccccaacuucaaggaccaggugauccugcugaacaagcacaucgacgccuacaagacguucccgcccaccgagcccaagaaggacaagaagaagaaggcggacgagacccaggcccucccccagcggcagaagaagcagcagaccgucacgcugcugcccgccgccgaccucgacgacuucuccaagcagcugcagcagagcauguccagcgcggacuccacccaggccuga

SEQ ID NO: 17430 - RNA, 1260 nt, Artificial Sequence
  SARS-CoV-2__MT664107.1__nucleocapsid protein (N) CDS gc
augagcgacaacggcccccagaaccagcgcaacgccccgcggaucaccuucgggggccccuccgacagcaccggguccaaccagaacggcgagcgcagcggggcccgguccaagcagcgccggccccagggccugcccaacaacacggcgagcugguucaccgcccucacccagcacggcaaggaggaccugaaguucccgcgcgggcagggcgugcccaucaacaccaacuccagccccgacgaccagaucggguacuaccggcgcgccacgcggcgcauccggggcggggacggcaagaugaaggaccugagcccccgcugguacuucuacuaccucggcaccgggccggaggccggccugcccuacggggccaacaaggacggcaucaucugggucgcgaccgagggcgcccugaacacccccaaggaccacaucgggacgcggaaccccgccaacaacgccgcgaucgugcuccagcugccgcagggcaccacccugcccaagggguucuacgccgagggcagccgcgggggcucccaggccagcucccggagcuccagccgcucccggaacagccuccgcaacuccacccccggcagcagccgggggacgucccccgcccgcauggccggcaacgggggcgacgcggcccuggcccugcuccugcuggaccggcucaaccagcuggagagcaagauguccgggaagggccagcagcagcagggccagaccgugaccaagaaguccgccgccgaggcguccaagaagccgcgccagaagcgcaccgccacgaaggccuacaaccugauccaggccuucgggcggcgcggccccgagcagacccaggggaacuucggcgaccaggagcucauccggcaggggaccgacuacaagcacuggccccagaucgcccaguucgcgcccagcgccuccgccuucuucggcaugagccgcaucggcauggaggucaccccguccgggacguggcugaccuacaccggcgccaucaagcuggacgacaaggaccccaacuucaaggaccaggugauccuccugaacaagcacaucgacgccuacaagaccuucccgcccacggagcccaagaaggacaagaagaagaaggcggacgagacccaggcccugccccagcggcagaagaagcagcagaccgugacccuccugcccgccgccgaccuggacgacuucagcaagcagcuccagcaguccaugagcuccgcggacagcacgcaggccuga

SEQ ID NO: 17431 - RNA, 1260 nt, Artificial Sequence
  SARS-CoV-2__MT664203.1__nucleocapsid protein (N) CDS gc
augagcgacaacggcccccagaaccagcgcaacgccccgcggaucaccuucgggggccccuccaacagcaccggguccaaccagaacggcgagcgcagcggggcccgguccaagcagcgccggccccagggccugcccaacaacacggcgagcugguucaccgcccucacccagcacggcaaggaggaccugaaguucccgcgcgggcagggcgugcccaucaacaccaacuccagccccgacgaccagaucggguacuaccggcgcgccacgcggcgcauccggggcggggacggcaagaugaaggaccugagcccccgcugguacuucuacuaccucggcaccgggccggaggccggccugcccuacggggccaacaaggacggcaucaucugggucgcgaccgagggcgcccugaacacccccaaggaccacaucgggacgcggaaccccgccaacaacgccgcgaucgugcuccagcugccgcagggcaccacccugcccaagggguucuacgccgagggcagccgcgggggcucccaggccagcucccggagcuccagccgcucccggaacagccuccgcaacuccacccccggcagcagccgggggacgucccccgcccgcauggccggcaacgggggcgacgcggcccuggcccugcuccugcuggaccggcucaaccagcuggagagcaagauguccgggaagggccagcagcagcagggccagaccgugaccaagaaguccgccgccgaggcguccaagaagccgcgccagaagcgcaccgccacgaaggccuacaacgucacccaggccuucgggcggcgcggccccgagcagacccaggggaacuucggcgaccaggagcugauccggcaggggaccgacuacaagcacuggccccagaucgcccaguucgcgcccagcgccuccgccuucuucggcaugagccgcaucggcauggaggugacgccguccgggaccuggcucaccuacaccggcgccaucaagcuggacgacaaggaccccaacuucaaggaccaggugauccugcucaacaagcacaucgacgccuacaagacguucccgcccaccgagcccaagaaggacaagaagaagaaggcggacgagacccaggcccugccccagcggcagaagaagcagcagaccgucacgcugcuccccgccgccgaccuggacgacuucagcaagcagcugcagcaguccaugagcuccgcggacagcacccaggccuga

SEQ ID NO: 17432 - RNA, 1260 nt, Artificial Sequence
  SARS-CoV-2__MT667351.1__nucleocapsid protein (N) CDS gc
augagcgacaacggcccccagaaccagcgcaacgccccgcggaucaccuucgggggccccuccgacagcaccggguccaaccagaacggcgagcgcagcggggcccgguccaagcagcgccggccccagggccugcccaacaacacggcgagcugguucaccgcccucacccagcacggcaaggaggaccugaaguucccgcgcgggcagggcgugcccaucaacaccaacuccagccccgacgaccggaucggguacuaccgccgggccacgcgccggauccgcggcggggacggcaagaugaaggaccugagcccccggugguacuucuacuaccucggcaccgggccggaggccggccugcccuacggggccaacaaggacggcaucaucugggucgcgaccgagggcgcccugaacacccccaaggaccacaucgggacgcgcaaccccgccaacaacgccgcgaucgugcuccagcugccgcagggcaccacccugcccaagggguucuacgccgagggcucccgcgggggcucccaggccagcucccggagcuccagccggucccgcaacagcucccggaacagcacccccggcagcuccaagcgcacgagccccgcccggauggccgggaacggcggggacgcggcccucgcccugcugcuccuggaccgccugaaccagcucgaguccaagaugagcggcaaggggcagcagcagcagggccagaccgugaccaagaaguccgccgccgaggcgagcaagaagccgcgccagaagcggaccgccacgaaggccuacaacgucacccaggccuucggccgccgggggcccgagcagacccagggcaacuucggggaccaggagcugauccgccagggcaccgacuacaagcacuggccccagaucgcccaguucgcgcccuccgccagcgccuucuucgggaugucccggaucggcauggaggugacgccgagcggcaccuggcugaccuacaccggggccaucaagcucgacgacaaggaccccaacuucaaggaccaggugauccugcugaacaagcacaucgacgccuacaagacguucccgcccaccgagcccaagaaggacaagaagaagaaggcggacgagacccaggcccucccccagcgccagaagaagcagcagaccgucacgcugcugcccgccgccgaccucgacgacuucuccaagcagcugcagcagagcauguccagcgcggacuccacccaggccuga

SEQ ID NO: 17433 - RNA, 1260 nt, Artificial Sequence
  SARS-CoV-2__MT646074.1__nucleocapsid protein (N) CDS gc
augagcgacaacggcccccagaaccagcgcaacgccccgcggaucaccuucgggggccccuccgacagcaccggguccaaccagaacggcgagcgcagcggggcccgguccaagcagcgccggccccagggccugcccaacaacacggcgagcugguucaccgcccucacccagcacggcaaggaggaccugaaguucccgcgcgggcagggcgugcccaucaacaccaacuccagccccgacgaccagaucggguacuaccggcgcgccacgcggcgcauccggggcggggacggcaagaugaaggaccugagcccccgcugguacuucuacuaccucggcaccgggccggaggccggccugcccuacggggccaacaaggacggcaucaucugggucgcgaccgagggcgcccugaacacccccaaggaccacaucgggacgcggaaccccgccaacaacgccgcgaucgugcuccagcugccgcagggcaccacccugcccaagggguucuacgccgagggcagccgcgggggcucccaggccagcucccggagccucucccgcagccggaacuccagccgcaacuccacccccggcagcagcaagcggacgucccccgcccgcauggccgggaacggcggggacgcggcccuggcccugcuccugcuggaccggcucaaccagcuggagagcaagauguccggcaaggggcagcagcagcagggccagaccgugaccaagaaguccgccgccgaggcguccaagaagccgcgccagaagcgcaccgccacgaaggccuacaacgucacccaggccuucggccggcgcgggcccgagcagacccagggcaacuucggggaccaggagcugauccggcagggcaccgacuacaagcacuggccccagaucgcccaguucgcgcccagcgccuccgccuucuucgggaugagccgcaucggcauggaggugacgccguccggcaccuggcucaccuacaccggggccaucaagcuggacgacaaggaccccaacuucaaggaccaggugauccugcucaacaagcacaucgacgccuacaagacguucccgcccaccgagcccaagaaggacaagaagaagaaggcggacgagacccaggcccugccccagcggcagaagaagcagcagaccgucacgcugcuccccgccgccgaccuggacgacuucagcaagcagcugcagcaguccaugagcuccgcggacagcacccaggccuga

SEQ ID NO: 17434 - RNA, 1260 nt, Artificial Sequence
  SARS-CoV-2__MT641507.1__nucleocapsid protein (N) CDS gc
augagcgacaacggcccccagaaccagcgcaacgccccgcggaucaccuucgggggccccuccgacagcaccggguccaaccagaacggcgagcgcagcggggcccgguccaagcagcgccggccccagggccugcccaacaacacggcgagcugguucaccgcccucacccagcacggcaaggaggaccugaaguucccgcgcgggcagggcgugcccaucaacaccaacuccagccccgacgaccagaucggguacuaccggcgcgccacgcggcgcauccggggcggggacggcaagaugaaggaccugagcccccgcugguacuucuacuaccucggcaccgggccggaggccggccugcccuacggggccaacaaggacggcaucaucugggucgcgaccgagggcgcccugaacacccccaaggaccacaucgggacgcggaaccccgccaacaacgccgcgaucgugcuccagcugccgcagggcaccacccugcccaagggguucuacgccgagggcucccgcgggggcucccaggccagcucccggagcuccagccgcucccggaacagcucccgcaacagcacccccggcagcucccgggggacgagccccgcccgcauggccggcaacgggggcgacgcggcccucgcccugcugcuccuggaccggcugaaccagcucgaguccaagaugagcgggaagggccagcagcagcagggccagaccgugaccaagaaguccgccgccgaggcgagcaagaagccgcgccagaagcgcaccgccacgaaggccuacaacgucacccaggccuucgggcggcgcggccccgagcagacccaggagaacuucggggaccaggagcugauccggcagggcaccgacuacaagcacuggccccagaucgcccaguucgcgcccuccgccagcgccuucuucgggaugucccgcaucggcauggaggugacgccgagcggcaccuggcugaccuacaccggggccaucaagcucgacgacaaggaccccaacuucaaggaccaggugauccugcugaacaagcacaucgacgccuacaagacguucccgcccaccgagcccaagaaggacaagaagaagaaggcggacgagacccaggcccucccccagcggcagaagaagcagcagaccgucacgcugcugcccgccgccgaccucgacgacuucuccaagcagcugcagcagagcauguccagcgcggacuccacccaggccuga

SEQ ID NO: 17435 - RNA, 1260 nt, Artificial Sequence
  SARS-CoV-2__MT641510.1__nucleocapsid protein (N) CDS gc
augagcgacaacggcccccagaaccagcgcaacgccccgcggaucaccuucgggggccccuccgacagcaccggguccaaccagaacggcgagcgcagcggggcccgguccaagcagcgccggccccagggccugcccaacaacacggcgagcugguucaccgcccucacccagcacggcaaggaggaccugaaguucccgcgcgggcagggcgugcccaucaacaccaacuccagccccgacgaccagaucggguacuaccggcgcgccacgcggcgcauccggggcggggacggcaagaugaaggaccugagcccccgcugguacuucuacuaccucggcaccgggccggaggccggccugcccuacggggccaacaaggacggcaucaucugggucgcgaccgagggcgcccugaacacccccaaggaccacaucgggacgcggaaccccgccaacaacgccgcgaucgugcuccagcugccgcgcggcaccacccugcccaagggguucuacgccgagggcucccgcgggggcucccaggccagcucccggagcuccagccggucccgcaacagcucccggaacagcacccccggcagcucccgcgggacgagccccgcccggauggccggcaacgggggcgacgcggcccucgcccugcugcuccuggaccgccugaaccagcucgaguccaagaugagcgggaagggccagcagcagcagggccagaccgugaccaagaaguccgccgccgaggcgagcaagaagccgcgccagaagcggaccgccacgaaggccuacaacgucacccaggccuucgggcgccggggccccgagcagacccaggggaacuucggcgaccaggagcugauccgccaggggaccgacuacaagcacuggccccagaucgcccaguucgcgcccuccgccagcgccuucuucggcaugucccggaucggcauggaggugacgccgagcgggaccuggcugaccuacaccggcgccaucaagcucgacgacaaggaccccaacuucaaggaccaggugauccugcugaacaagcacaucgacgccuacaagacguucccgcccaccgagcccaagaaggacaagaagaagaaggcggacgagacccaggcccucccccagcgccagaagaagcagcagaccgucacgcugcugcccgccgccgaccucgacgacuucuccaagcagcugcagcagagcauguccagcgcggacuccacccaggccuga

SEQ ID NO: 17436 - RNA, 1260 nt, Artificial Sequence
  SARS-CoV-2__MT641567.1__nucleocapsid protein (N) CDS gc
augagcgacaacggcccccagaaccagcgcaacgccccgcggaucaccuucgggggccccuccgacagcaccggguccaaccagaacggcgagcgcagcggggcccgguccaagcagcgccggccccagggccugcccaacaacacggcgagcugguucaccgcccucacccagcacggcaaggaggaccugaaguucccgcgcgggcagggcgugcccaucaacaccaacuccagccccgacgaccagaucggguacuaccggcgcgccacgcggcgcauccggggcggggacggcaagaugaaggaccugagcccccgcugguacuucuacuaccucggcaccgggccggaggccggccugcccuacggggccaacaaggacggcaucaucugggucgcgaccgagggcgcccugaacacccccaaggaccacaucgggacgcggaaccccgccaacuacgccgcgaucgugcuccagcugccgcagggcaccacccugcccaagggguucuacgccgagggcucccgcgggggcucccaggccagcucccggagcuccagccgcucccggaacagcucccgcaacagcacccccggcagcucccgggggacgagccccgcccgcauggccggcaacgggggcgacgcggcccucgcccugcugcuccuggaccggcugaaccagcucgaguccaagaugagcgggaagggccagcagcagcagggccagaccgugaccaagaaguccgccgccgaggcgagcaagaagccgcgccagaagcgcaccgccacgaaggccuacaacgucacccaggccuucgggcggcgcggccccgagcagacccaggggaacuucggcgaccaggagcugauccggcaggggaccgacuacaagcacuggccccagaucgcccaguucgcgcccuccgccagcgccuucuucggcaugucccgcaucggcauggaggugacgccgagcgggaccuggcugaccuacaccggcgccaucaagcucgacgacaaggaccccaacuucaaggaccaggugauccugcugaacaagcacaucgacgccuacaagacguucccgcccaccgagcccaagaaggacaagaagaagaaggcggacgagacccaggcccucccccagcggcagaagaagcagcagaccgucacgcugcugcccgccgccgaccucgacgacuucuccaagcagcugcagcagagcauguccagcgcggacuccacccaggccuga

SEQ ID NO: 17437 - RNA, 1260 nt, Artificial Sequence
  SARS-CoV-2__MT641667.1__nucleocapsid protein (N) CDS gc
augagcgacaacggcccccagaaccagcgcaacgccccgcggaucaccuucgggggccccuccgacagcaccggguccaaccagaacggcgagcgcagcggggcccgguccaagcagcgccggccccagggccugcccaacaacacggcgagcugguucaccgcccucacccagcacggcaaggaggaccugaaguucccgcgcgggcagggcgugcccaucaacaccaacuccagccccgacgaccagaucggguacuaccggcgcgccacgcggcgcauccugggcggggacggcaagaugaaggaccucagcccccggugguacuucuacuaccugggcaccgggccggaggccggccugcccuacggggccaacaaggacggcaucaucugggucgcgaccgagggcgcccucaacacccccaaggaccacaucgggacgcgcaaccccgccaacaacgccgcgaucgugcugcagcugccgcagggcaccacccuccccaagggguucuacgccgagggcucccgcgggggcucccaggccagcucccggagcuccagccggucccgcaacagcucccggaacagcacccccggcagcuccaagcgcacgagccccgcccggauggccgggaacggcggggacgcggcccuggcccugcuccugcuggaccgccucaaccagcuggaguccaagaugagcggcaaggggcagcagcagcagggccagaccgugaccaagaaguccgccgccgaggcgagcaagaagccgcggcagaagcgcaccgccacgaaggccuacaacgucacccaggccuucggccgccgggggcccgagcagacccagggcaacuucggggaccaggagcugauccgccagggcaccgacuacaagcacuggccccagaucgcccaguucgcgcccuccgccagcgccuucuucgggaugucccggaucggcauggaggugacgccgagcggcaccuggcucaccuacaccggggccaucaagcuggacgacaaggaccccaacuucaaggaccaggugauccugcucaacaagcacaucgacgccuacaagacguucccgcccaccgagcccaagaaggacaagaagaagaaggcggacgagacccaggcccugccccagcgccagaagaagcagcagaccgucacgcugcuccccgccgccgaccuggacgacuucuccaagcagcugcagcagagcauguccagcgcggacuccacccaggccuga

SEQ ID NO: 17438 - RNA, 1260 nt, Artificial Sequence
  SARS-CoV-2__MT641708.1__nucleocapsid protein (N) CDS gc
augagcgacaacggcccccagaaccagcgcaacgccccgcggaucaccuucgggggccccuccgacagcaccggguccaaccagaacggcgagcgcagcggggcccgguccaagcagcgccggccccagggccugcccaacaacacggcgagcugguucaccgcccucacccagcacggcaaggaggaccugaaguucccgcgcgggcagggcgugcccaucaacaccaacuccagccccgacgaccagaucggguacuaccggcgcgccacgcggcgcauccggggcggggacggcaagaugaaggaccugagcccccgcugguacuucuacuaccucggcaccgggccggaggccggccugcccuacggggccaacaaggacggcaucaucugggucgcgaccgagggcgcccugaacacccccaaggaccacaucgggacgcggaaccccgccaacaacgccgcgaucgugcuccagcugccgcagggcaccacccugcccaagggguucuacgccgagggcucccgcgggggcucccaggccagcucccggagcuccagccgcucccggaacagcucccgcaacagcacccccggcagcucccgggggacgagccccgcccgcauggccggcaacgggggcgacgcggcccucgcccugcugcuccuggaccggcugaaccagcucgaguccaagaugagcgggaagggccagcagcagcagggccagaccgugaccaagaaguccgccgccgaggcguucaagaagccgcgccagaagcgcaccgccacgaaggccuacaacgucacccaggccuucgggcggcgcggccccgagcagacccaggggaacuucggcgaccaggagcugauccggcaggggaccgacuacaagcacuggccccagaucgcccaguucgcgcccagcgccuccgccuucuucggcaugagccgcaucggcauggaggugacgccguccgggaccuggcugaccuacaccggcgccaucaagcucgacgacaaggaccccaacuucaaggaccaggugauccugcugaacaagcacaucgacgccuacaagacguucccgcccaccgagcccaagaaggacaagaagaagaaggcggacgagacccaggcccucccccagcggcagaagaagcagcagaccgucacgcugcugcccgccgccgaccucgacgacuucagcaagcagcugcagcaguccaugagcuccgcggacagcacccaggccuga

SEQ ID NO: 17439 - RNA, 1260 nt, Artificial Sequence
  SARS-CoV-2__MT641710.1__nucleocapsid protein (N) CDS gc
augagcgacaacggcccccagaaccagcgcaacgccccgcggaucaccuucgggggccccuccgacagcaccggguccaaccagaacggcgagcgcagcggggcccgguccaagcagcgccggccccagggccugcccaacaacacggcgagcugguucaccgcccucacccagcacggcaaggaggaccugaaguucccgcgcgggcagggcgugcccaucaacaccaacuccagccccgacgaccagaucggguacuaccggcgcgccacgcggcgcauccggggcggggacggcaagaugaaggaccugagcccccgcugguacuucuacuaccucggcaccgggccggaggccggccugcccuacggggccaacaaggacggcaucaucugggucgcgaccgagggcgcccugaacacccccaaggaccacaucgggacgcggaaccccgccaacaacgccgcgaucgugcuccagcugccgcagggcaccacccugcccaagggguucuacgccgagggcucccgcgggggcucccaggccagcucccggagcuccagccgcucccggaacagcucccgcaacagcacccccggcagcucccgggggacgagccccgcccgcauggccggcaacgggggcgacgcggcccucgcccugcugcuccuggaccggcugaaccagcucgaguccaagaugagcgggaagggccagcagcagcagggccagaccgugaccaagaaguccgccgccgaggcgagcaagaagccgcgccagaagcgcaccgccacgaaggccuacaacgucacccaggccuucgggcggcgcggccccgagcagacccaggggaacuucggcgaccaggagcugauccggcaggggaccgacuacaagcacuggccccagaucgcccaguucgcgcccuccgccagcgccuucuucggcaugucccgcaucggcauggaggugacgccgagcgggaccuggcugaccuacaccggcgccaucaagcucgacgacaaggaccccaacuucaaggaccaggugauccugcugaacaagcacaucgacgccuacaagacguucccgcccaccgagcccaagaaggacaagaagaagaaggcggacgagacccaggcccucucccagcggcagaagaagcagcagaccgucacgcugcugcccgccgccgaccucgacgacuucagcaagcagcugcagcaguccaugagcuccgcggacagcacccaggccuga

SEQ ID NO: 17440 - RNA, 1260 nt, Artificial Sequence
  SARS-CoV-2__MT641738.1__nucleocapsid protein (N) CDS gc
augagcgacaacggcccccagaaccagcgcaacgccccgcggaucaccuucgggggccccuccgacagcaccggguccaaccagaacggcgagcgcagcggggcccgguccaagcagcgccggccccagggccugcccaacaacacggcgagcugguucaccgcccucacccagcacggcaaggaggaccugaaguucccgcgcgggcagggcgugcccaucaacaccaacuccagccccgacgaccagaucggguacuaccggcgcgccacgcggcgcauccggggcggggacggcaagaugaaggaccugagcccccgcugguacuucuacuaccucggcaccgggccggaggccggccugcccuacggggccaacaaggacggcaucaucugggucgcgaccgagggcgcccugaacacccccaaggaccacaucgggacgcggaaccccgccaacaacgccgcgaucgugcuccagcugccgcagggcaccacccugcccaagggguucuacgccgagggcucccgcgggggcucccaggccagcucccggagcuccagccgcucccggaacagcucccgcaacagcacccccggcagcucccgggggacgagccccgcccgcauggccggcaacgggggcgacgcggcccucgcccugcugcuccuggaccggcugaaccagcucgaguccaagaugagcgggaagggccagcagcagcagggccagaccgugaccaagaaguccgccgccgaggcgagcaagaagccgcgccagaagcgcaccgccacgaaggccuacaacgucacccaggccuucgggcggcgcggccccgagcagacccaggggaacuucggcgaccaggagcugauccggcaggggaccgacuacaagcacugcccccagaucgcccaguucgcgcccuccgccagcgccuucuucggcaugucccgcaucggcauggaggugacgccgagcgggaccuggcugaccuacaccggcgccaucaagcucgacgacaaggaccccaacuucaaggaccaggugauccugcugaacaagcacaucgacgccuacaagacguucccgcccaccgagcccaagaaggacaagaagaagaaggcggacgagacccaggcccucucccagcggcagaagaagcagcagaccgucacgcugcugcccgccgccgaccucgacgacuucagcaagcagcugcagcaguccaugagcuccgcggacagcacccaggccuga

SEQ ID NO: 17441 - RNA, 1260 nt, Artificial Sequence
  SARS-CoV-2__MT642069.1__nucleocapsid protein (N) CDS gc
augagcgacaacggcccccagaaccagcgcaacgccccgcggaucaccuucgggggccccuccgacagcaccggguccaaccagaacggcgagcgcagcggggcccgguccaagcagcgccggccccagggccugcccaacaacacggcgagcugguucaccgcccucacccagcacggcaagguggaccugaaguucccgcgcgggcagggcguccccaucaacaccaacuccagccccgacgaccagaucggguacuaccggcgcgccacgcggcgcauccggggcggggacggcaagaugaaggaccugagcccccgcugguacuucuacuaccucggcaccgggccggaggccggccugcccuacggggccaacaaggacggcaucaucuggguggcgaccgagggcgcccugaacacccccaaggaccacaucgggacgcggaaccccgccaacaacgccgcgaucgugcuccagcugccgcagggcaccacccugcccaagggguucuacgccgagggcucccgcgggggcucccaggccagcucccggagcuccagccgcucccggaacagcucccgcaacagcacccccggcagcucccgggggacgagccccgcccgcauggccggcaacgggggcgacgcggcccucgcccugcugcuccuggaccggcugaaccagcucgaguccaagaugagcgggaagggccagcagcagcagggccagaccgucaccaagaaguccgccgccgaggcgagcaagaagccgcgccagaagcgcaccgccacgaaggccuacaacgugacccaggccuucgggcggcgcggccccgagcagacccaggggaacuucggcgaccaggagcugauccggcaggggaccgacuacaagcacuggccccagaucgcccaguucgcgcccuccgccagcgccuucuucggcaugucccgcaucggcauggaggugacgccgagcgggaccuggcugaccuacaccggcgccaucaagcucgacgacaaggaccccaacuucaaggaccaggucauccugcugaacaagcacaucgacgccuacaagacguucccgcccaccgagcccaagaaggacaagaagaagaaggcggacgagacccaggcccucccccagcggcagaagaagcagcagaccgugacgcugcugcccgccgccgaccucgacgacuucuccaagcagcugcagcagagcauguccagcgcggacuccacccaggccuga

SEQ ID NO: 17442 - RNA, 1260 nt, Artificial Sequence
  SARS-CoV-2__MT642080.1__nucleocapsid protein (N) CDS gc
augagcgacaacggcccccagaaccagcgcaacgccccgcggaucaccuucgggggccccuccgacagcaccggguccaaccagaacggcgagcgcagcggggcccgguccaagcagcgccggccccagggccugcccaacaacacggcgagcugguucaccgcccucacccagcacggcaagguggaccugaaguucccgcgcgggcagggcguccccaucaacaccaacuccagccccgacgaccagaucggguacuaccggcgcgccacgcggcgcauccggggcggggacggcaagaugaaggaccugagcccccgcugguacuucuacuaccucggcaccgggccggaggccggccugcccuacggggccaacaaggacggcaucaucuggguggcgaccgagggcgcccugaacacccccaaggaccacaucgggacgcggaaccccgccaacaacgccgcgaucgugcuccagcugccgcagggcaccacccugcccaagggguucuacgccgagggcagccgcgggggcucccaggccagcucccggagcuccagccgcucccggaacagccuccgcaacuccacccccggcagcagccgggggacgucccccgcccgcauggccggcaacgggggcgacgcggcccuggcccugcuccugcuggaccggcucaaccagcuggagagcaagauguccgggaagggccagcagcagcagggccagaccgucaccaagaaguccgccgccgaggcguccaagaagccgcgccagaagcgcaccgccacgaaggccuacaacgugacccaggccuucgggcggcgcggccccgagcagacccaggggaacuucggcgaccaggagcugauccggcaggggaccgacuacaagcacuggccccagaucgcccaguucgcgcccagcgccuccgccuucuucggcaugagccgcaucggcauggaggugacgccguccgggaccuggcucaccuacaccggcgccaucaagcuggacgacaaggaccccaacuucaaggaccaggucauccugcucaacaagcacaucgacgccuacaagacguucccgcccaccgagcccaagaaggacaagaagaagaaggcggacgagacccaggcccugccccagcggcagaagaagcagcagaccgugacgcugcuccccgccgccgaccuggacgacuucagcaagcagcugcagcaguccaugagcuccgcggacagcacccaggccuga

SEQ ID NO: 17443 - RNA, 1260 nt, Artificial Sequence
  SARS-CoV-2__MT642120.1__nucleocapsid protein (N) CDS gc
augagcgacaacggcccccagaaccagcgcaacgccccgcggaucaccuucgggggccccuccgacagcaccggguccaaccagaacggcgagcgcagcggggcccgguccaagcagcgccggccccagggccugcccaacaacacggcgagcugguucaccgcccucacccagcacggcaaggaggaccugaaguucccgcgcgggcagggcgugcccaucaacaccaacuccagccccgacgaccagaucggguacuaccggcgcgccacgcggcgcauccggggcggggacggcaagaugaaggaccugagcccccgcugguacuucuacuaccucggcaccgggccggaggccggccugcccuacggggccaacaaggacggcaucaucugggucgcgaccgagggcgcccugaacacccccaaggaccacaucgggacgcggaaccccgccaacaacgccgcgaucgugcuccagcugccgcagggcaccacccugcccaagggguucuacgccgagggcucccgcgggggcucccaggccagcucccggagcuccagccgcucccggaacagcucccgcaacagcacccccggcagcucccgggggacgagccccgcccgcauggccggcaacgggggcgacgcggcccucgcccugcugcuccuggaccggcugaaccagcucgaguccaagaugagcgggaagggccagcagcagcagggccagaccgugaccaagaaguccgccgccgaggcgagcaagaagccgcgccagaagcgcaccgccacgaaggccuacaacgucacccaggccuucgggcggcgcggccccgagcagacccaggggaacuucggcgaccaggagcugauccggcaggggaccgacuacaagcacuggccccagaucgcccaguucgcgcccuccgccagcgccuucuucggcaugucccgcaucggcauggaggugacgccgagcgggaccuggcugaccuacaccggcgccaucaagcucgacgacaaggaccccaacuucaaggaccaggugauccugcugaacaagcacaucgacgccuacaagacguucccgcccaccgagcccaagaaggacaagaagaagaaggcggacgagacccaggcccucccccagcggcagaagaagcagcagaccgucacgcugcugcccgccguggaccucgacgacuucuccaagcagcugcagcagagcauguccagcgccgacuccacccaggcguga

SEQ ID NO: 17444 - RNA, 1260 nt, Artificial Sequence
  SARS-CoV-2__MT642181.1__nucleocapsid protein (N) CDS gc
augagcgacaacggcccccagaaccagcgcaacgccccgcggaucaccuucgggggccccuccgacagcaccggguccaaccagaacggcgagcgcagcggggcccgguccaagcagcgccggccccagggccugcccaacaacacggcgagcugguucaccgcccucacccagcacggcaaggaggaccugaaguucccgcgcgggcagggcgugcccaucaacaccaacuccagccccgacgaccagaucggguacuaccggcgcgccacgcggcgcauccggggcggggacggcaagaugaaggaccugagcccccgcugguacuucuacuaccucggcaccgggccggaggccggccugcccuacggggccaacaaggacggcaucaucugggucgcgaccgagggcgcccugaacacccccaaggaccacaucgggacgcggaaccccgccaacaacgccgcgaucgugcuccagcugccgcagggcaccacccugcccaagggguucuacgccgagggcucccgcgggggcucccaggccagcucccggagcuccagccgcucccggaacagcucccgcaacagcacccccggcagcucccgggggacgagccccgcccgcauggccggcaacgggggcgacgcggcccucgcccugcugcuccuggaccggcugaaccagcucgaguccaagaugagcgggaagggccagcagcagcagggccagaccgugaccaagaaguccgccgccgaggcgagcaagaagccgcgccagaagcgcaccgccacgaaggccuacaacgucacccaggccuucgggcggcgcggccccgagcagacccaggggaacuucggcgaccaggagcugauccggcaggggaccgacuacaagcacuggccccagaucgcccaguucgcgcccuccgccagcgccuucuucggcaugucccgcaucggcauggaggugacgccgagcgggaccuggcugaccuacaccggcgccaucaagcucgacgacaaggaccccaacuucaaguaccaggugauccugcugaacaagcacaucgacgccuacaagacguucccgcccaccgagcccaagaaggacaagaagaagaaggcggacgagacccaggcccucccccagcggcagaagaagcagcagaccgucacgcugcugcccgccgccgaccucgacgacuucuccaagcagcugcagcagagcauguccagcgcggacuccacccaggccuga

SEQ ID NO: 17445 - RNA, 1260 nt, Artificial Sequence
  SARS-CoV-2__MT642410.1__nucleocapsid protein (N) CDS gc
augagcgacaacggcccccagaaccagcgcaacgccccgcggaucaccuucgggggccccuccgacagcaccggguccaaccagaacgccgagcgcagcggcgcgcgguccaagcagcgccggccccaggggcugcccaacaacacggccagcugguucaccgcccucacccagcacggcaaggaggaccugaaguucccgcgcggccagggggugcccaucaacaccaacuccagccccgacgaccagaucggcuacuaccggcgcgccacgcggcgcauccgcgggggcgacgggaagaugaaggaccugagcccccggugguacuucuacuaccucggcaccggcccggaggccgggcugcccuacggcgcgaacaaggacgggaucaucugggucgccaccgagggcgcccugaacacccccaaggaccacaucggcacgcggaaccccgccaacaacgcggccaucgugcuccagcugccgcaggggaccacccugcccaagggcuucuacgccgaggggucccgcggcgggucccaggccagcucccggagcuccagccgcucccggaacagcucccgcaacagcacccccggcagcucccggggcacgagccccgcccgcauggcggggaacggcggggacgccgcccucgcccugcugcuccuggaccggcugaaccagcucgaguccaagaugagcggcaaggggcagcagcagcagggccagaccgugaccaagaaguccgccgcggaggccagcaagaagccgcgccagaagcgcaccgccacgaaggccuacaacgucacccaggccuucggccggcgcgggcccgagcagacccagggcaacuucggggaccaggagcugauccggcagggcaccgacuacaagcacuggccccagaucgcgcaguucgcccccuccgccagcgccuucuucgggaugucccgcaucggcauggaggugacgccgagcggcaccuggcugaccuacaccggggccaucaagcucgacgacaaggaccccaacuucaaggaccaggugauccugcugaacaagcacaucgacgcguacaagacguucccgcccaccgagcccaagaaggacaagaagaagaaggccgacgagacccaggcccucccccagcggcagaagaagcagcagaccgucacgcugcugcccgccgcggaccucgacgacuucuccaagcagcugcagcagagcauguccagcgccgacuccacccaggccuga

SEQ ID NO: 17446 - RNA, 1260 nt, Artificial Sequence
  SARS-CoV-2__MT635408.1__nucleocapsid protein (N) CDS gc
augagcgacaacggcccccagaaccagcgcaacgccccgcggaucaccuucgggggccccuccgacagcaccggguccaaccagaacggcgagcgcagcggggcccgguccaagcagcgccggccccagggccugcccaacaacacggcgagcugguucaccgcccucacccagcacggcaaggaggaccugaaguucccgcgcgggcagggcgugcccaucaacaccaacuccagccccgacgaccagaucggguacuaccggcgcgccacgcggcgcauccggggcggggacggcaagaugaaggaccugagcccccgcugguacuucuacuaccucggcaccgggccggaggccggccugcccuacggggccaacaaggacggcaucaucugggucgugaccgagggcgcgcugaacacccccaaggaccacaucgggacgcggaaccccgccaacaacgccgccaucgugcuccagcugccgcagggcaccacccugcccaagggguucuacgcggagggcucccgcgggggcucccaggccagcucccggagcuccagccgcucccggaacagcucccgcaacagcacccccggcagcucccgggggacgagccccgcccgcauggccggcaacgggggcgacgccgcgcucgcccugcugcuccuggaccggcugaaccagcucgaguccaagaugagcgggaagggccagcagcagcagggccagaccgucaccaagaaguccgccgccgaggccagcaagaagccgcgccagaagcgcaccgcgacgaaggccuacaacgugacccaggccuucgggcggcgcggccccgagcagacccaggggaacuucggcgaccaggagcugauccggcaggggaccgacuacaagcacuggccccagaucgcccaguucgcccccuccgcgagcgccuucuucggcaugucccgcaucggcauggaggugacgccgagcgggaccuggcugaccuacaccggcgccaucaagcucgacgacaaggaccccaacuucaaggaccaggucauccugcugaacaagcacaucgacgccuacaagacguucccgcccaccgagcccaagaaggacaagaagaagaaggccgacgagacccaggcgcucccccagcggcagaagaagcagcagaccgugacgcugcugcccgccgccgaccucgacgacuucuccaagcagcugcagcagagcauguccagcgccgacuccacccaggcguga

SEQ ID NO: 17447 - RNA, 1260 nt, Artificial Sequence
  SARS-CoV-2__MT635672.1__nucleocapsid protein (N) CDS gc
augagcgacaacggcccccagaaccagcgcaacgccccgcggaucaccuucgggggccccuccgacagcaccggguccaaccagaacggcgagcgcagcggggcccgguccaagcagcgccggccccagggccugcccaacaacacggcgagcugguucaccgcccucacccagcacggcaaggaggaccugaaguucccgcgcgggcagggcgugcccaucaacaccaacuccagccccgacgaccagaucggguacuaccggcgcgccacgcggcgcauccggggcggggacggcaagaugaaggaccugagcccccgcugguacuucuacuaccucggcaccgggccggaggccggccugcccuacggggccaacaaggacggcaucaucugggucgcgaccgagggcgcccugaacacccccaaggaccacaucgggacgcggaaccccgccaacaacgccgcgaucgugcuccagcugccgcagggcaccacccugcccaagggguucuacgccgagggcucccgcgggggcucccaggccagcucccggagcuccagccgcucccggaacagcucccgcaacagcacccccggcagcuccaagcggacgagccccgcccgcauggccgggaacggcggggacgcggcccucgcccugcugcuccuggaccggcugaaccagcucgaguccaagaugagcggcaaggggcagcagcagcagggccagaccgugaccaagaaguccgccgccgaggcgagcaagaagccgcgccagaagcgcaccgccacgaaggccuacaacgucacccaggccuucggccggcgcgggcccgagcagacccagggcaacuucggggaccaggagcugauccggcagggcaccgacuacaagcacuggccccagaucgcccaguucgcgcccuccgccagcgccuucuucgggaugucccgcaucggcauggaggugacgccgagcggcaccuggcugaccuacaccggggccaucaagcucgacgacaaggaccccaacuucaaguaccaggugauccugcugaacaagcacaucgacgccuacaagacguucccgcccaccgagcccaagaaggacaagaacaagaaggcggacgagacccaggcccucccccagcggcagaagaagcagcagaccgucacgcugcugcccgccgccgaccucgacgacuucuccaagcagcugcagcagagcauguccagcgcggacuccacccaggccuga

SEQ ID NO: 17448 - RNA, 1260 nt, Artificial Sequence
  SARS-CoV-2__MT627240.1__nucleocapsid protein (N) CDS gc
augagcgacaacggcccccagaaccagcgcaacgccccgcggaucaccuucgggggccccuccgacagcaccggguccaaccagaacggcgagcgcagcggggcccgguccaagcagcgccggccccagggccugcccaacaacacggcgagcugguucaccgcccucacccagcacggcaaggaggaccugaaguucccgcgcgggcagggcgugcccaucaacaccaacuccagccccgacgaccagaucggguacuaccggcgcgccacgcggcgcauccggggcggggacggcaagaugaaggaccugagcccccgcugguacuucuacuaccucggcaccgggccggaggccggccugcccuacggggccaacaaggacggcaucaucugggucgcgaccgagggcgcccugaacacccccaaggaccacuucgggacgcggaaccccgccaacaacgccgcgaucgugcuccagcugccgcagggcaccacccugcccaagggguucuacgccgagggcucccgcgggggcucccaggccagcucccggagcuccagccgcucccggaacagcucccgcaacagcacccccggcagcucccgggggacgagccccgcccgcauggccggcaacgggggcgacgcggcccucgcccugcugcuccuggaccggcugaaccagcucgaguccaagaugagcgggaagggccagcagcagcagggccagaccgugaccaagaaguccgccgccgaggcgagcaagaagccgcgccagaagcgcaccgccacgaaggccuacaacgucacccaggccuucgggcggcgcggccccgagcagacccaggggaacuucggcgaccaggagcugauccggcaggggaccgacuacaagcacuggccccagaucgcccaguucgcgcccuccgccagcgccuucuucggcaugucccgcaucggcauggaggugacgccgagcgggaccuggcugaccuacaccggcgccaucaagcucgacgacaaggaccccaacuucaaggaccaggugauccugcugaacaagcacaucgacgccuacaagacguucccgcccaccgagcccaagaaggacaagaagaagaaggcggacgagacccaggcccucccccagcggcagaagaagcagcagaccgucacgcugcugcccgccgccgaccucgacgacuucuccaagcagcugcagcagagcauguccagcgcggacuccacccaggccuga

SEQ ID NO: 17449 - RNA, 1260 nt, Artificial Sequence
  SARS-CoV-2__MT627244.1__nucleocapsid protein (N) CDS gc
augagcgacaacggcccccagaaccagcgcaacgccccgcggaucaccuucgggggccccuccgacagcaccggguccaaccagaacggcgagcgcagcggggcccgguccaagcagcgccggccccagggccugcccaacaacacggcgagcugguucaccgcccucacccagcacggcaaggaggaccugaaguucccgcgcgggcagggcgugcccaucaacaccaacuccagccccgacgaccagaucggguacuaccggcgcgccacgcggcgcauccggggcggggacggcaagaugaaggaccugagcccccgcugguacuucuacuaccucggcaccgggccggaggccggccugcccuacggggccaacaaggacggcaucaucugggucgcgaccgagggcgcccugaacacccccaaggaccacaucgggacgcggaaccccgccaacaacgccgcgaucgugcuccagcugccgcagggcaccacccugcccaagggguucuacgccgagggcagccgcgggggcucccaggccagcucccggagcuccagccgcucccggaacagcucccgcaacagcacccccggcagcucccgggggacgagccccgcccgcauggccggcaacgggggcgacgcggcccucgcccugcugcuccuggaccggcugaaccagcucgaguccaagaugccggggaagggccagcagcagcagggccagaccgugaccaagaaguccgccgccgaggcguccaagaagccccgccagaagcgcaccgccacgaaggccuacaacgucacccaggccuucgggcggcgcggccccgagcagacccaggggaacuucggcgaccaggagcugauccggcaggggaccgacuacaagcacuggccccagaucgcccaguucgcgccgagcgccuccgccuucuucggcaugagccgcaucggcauggaggugacgcccuccgggaccuggcugaccuacaccggcgccaucaagcucgacgacaaggaccccaacuucaaggaccaggugauccugcugaacaagcacaucgacgccuacaagacguucccgcccaccgagcccaagaaggacaagaagaagaaggcggacgagacccaggcccucccccagcggcagaagaagcagcagaccgucacgcugcugcccgccgccgaccucgacgacuucagcaagcagcugcagcaguccaugagcuccgcggacagcacccaggccuga

SEQ ID NO: 17450 - RNA, 1260 nt, Artificial Sequence
  SARS-CoV-2__MT627415.1__nucleocapsid protein (N) CDS gc
augagcgacaacggcccccagaaccagcgcaacgccccgcggaucaccuucgggggccccuccgacagcaccggguccaaccagaacggcgagcgcagcggggcccgguccaagcagcgccggccccagggccugcccaacaacacggcgagcugguucaccgcccucacccagcacggcaaggaggaccugaaguucccgcgcgggcagggcgugcccaucaacaccaacuccagccccgacgaccagaucggguacuaccggcgcgccacgcggcgcauccggggcggggacggcaagaugaaggaccugagcccccgcugguacuucuacuaccucggcaccgggccggaggccggccugcccuacggggccaacaaggacggcaucaucugggucgcgaccgagggcgcccugaacacccccaaggaccacaucgggacgcggaaccccgccaacaacgccgcgaucgugcuccagcugccgcagggcaccacccugcccaagggguucuacgccgagggcucccgcgggggcucccaggccagcuccugcagcuccagccggucccgcaacagcucccggaacagcacccccggcagcuccaagcgcacgagccccgcccggauggccgggaacggcggggacgcggcccucgcccugcugcuccuggaccgccugaaccagcucgaguccaagaugagcggcaaggggcagcagcagcagggccagaccgugaccaagaaguccgccgccgaggcgagcaagaagccgcggcagaagcgcaccgccacgaaggccuacaacgucacccaggccuucggccgccgggggcccgagcagacccagggcaacuucggggaccaggagcugauccgccagggcaccgacuacaagcacuggccccagaucgcccaguucgcgcccuccgccagcgccuucuucgggaugucccggaucggcauggaggugacgccgagcggcaccuggcugaccuacaccggggccaucaagcucgacgacaaggaccccaacuucaaggaccaggugauccugcugaacaagcacaucgacgccuacaagacguucccgcccaccgagcccaagaaggacaagaagaagaaggcggacgagacccaggcccucccccagcgccagaagaagcagcagaccgucacgcugcugcccgccgccgaccucgacgacuucuccaagcagcugcagcagagcauguccagcgcggacuccacccaggccuga

SEQ ID NO: 17451 - RNA, 1260 nt, Artificial Sequence
  SARS-CoV-2__MT627424.1__nucleocapsid protein (N) CDS gc
augagcgacaacggcccccagaaccagcgcaacgccccgcggaucaccuucgggggccccuccgacagcaccggguccaaccagaacggcgagcgcagcggggcccgguccaagcagcgccggccccagggccugcccaacaacacggcgagcugguucaccgcccucacccagcacggcaaggaggaccugaaguucccgcgcgggcagggcgugcccaucaacaccaacuccagccccgacgaccagaucggguacuaccggcgcgccacgcggcgcauccggggcggggacggcaagaugaaggaccugagcccccgcugguacuucuacuaccucggcaccgggccggaggccggccugcccuacggggccaacaaggacggcaucaucugggucgcgaccgagggcgcccugaacacccccaaggaccacaucgggacgcggaaccccgccaacaacgccgcgaucgugcuccagcugccgcagggcaccacccugcccaagggguucuacgccgagggcucccgcgggggcucccaggccagcucccggagcuccagccgcucccggaacagcucccgcaacagcacccccggcagcucccgggggacgagccccgcccgcauggccggcaacgggggcgacgcggcccucgcccugcugcuccuggaccggcugaaccagcucgaguccaagaugagcgggaagggccagcagcagcagggccagaccgugaccaagaaguccgccgccgaggcgagcaagaagccgcgccagaagcgcaccgccacgaaggccuacaacgucacccaggccuucgggcggcgcggccccgagcagacccaggggaacuucggcgaccaggagcugauccggcaggggaccgacuacaagcacuggccccagaucgcccaguucgcgcccuccgccagcgccuucuucggcaugucccgcaucggcauggaggugacgccgagcgggaccuggcugaccuacaccggcgccaucaagcucgacgacaaggaccccaacuucaaggaccaggugauccugcugaacaagcacaucgacgccuacaagacguuccuccccaccgagcccaagaaggacaagaagaagaaggcggacgagacccaggcccugccgcagcggcagaagaagcagcagaccgucacgcugcuccccgccgccgaccuggacgacuucuccaagcagcugcagcagagcauguccagcgcggacuccacccaggccuga

SEQ ID NO: 17452 - RNA, 1260 nt, Artificial Sequence
  SARS-CoV-2__MT627607.1__nucleocapsid protein (N) CDS gc
augagcgacaacggcccccagaaccagcgcaacgccccgcggaucaccuucgggggccccuccgacagcaccggguccaaccagaacggcgagcgcagcggggcccgguccaagcagcgccggccccagggccugcccaacaacacggcgagcugguucaccgcccucacccagcacggcaaggaggaccugaaguucccgcgcgggcagggcgugcccaucaacaccaacuccagccccgacgaccagaucggguacuaccggcgcgccacgcggcgcauccggggcggggacggcaagaugaaggaccugagcccccgcugguacuucuacuaccucggcaccgggccggaggccggccugcccuacgggaccaacaaggacggcaucaucugggucgccaccgagggcgcgcugaacacgcccaaggaccacaucgggacccggaaccccgccaacaacgccgccaucgugcuccagcugccgcagggcaccacccugcccaagggguucuacgcggagggcucccgcgggggcucccaggccagcucccggagcuccagccgcucccggaacagcucccgcaacagcacgcccggcagcucccgggggaccagccccgcccgcauggccggcaacgggggcgacgccgcgcucgcccugcugcuccuggaccggcugaaccagcucgaguccaagaugagcgggaagggccagcagcagcagggccagaccgugaccaagaaguccgccgccgaggccagcaagaagccgcgccagaagcgcacggcgaccaaggccuacaacgucacccaggccuucgggcggcgcggccccgagcagacccaggggaacuucggcgaccaggagcugauccggcaggggacggacuacaagcacuggccccagaucgcccaguucgcccccuccgcgagcgccuucuucggcaugucccgcaucggcauggaggugaccccgagcgggaccuggcugaccuacacgggcgccaucaagcucgacgacaaggaccccaacuucaaggaccaggugauccugcugaacaagcacaucgacgccuacaagaccuucccgcccaccgagcccaagaaggacaagaagaagaaggccgacgagacccaggcgcucccccagcggcagaagaagcagcagacggucacccugcugcccgccgccgaccucgacgacuucuccaagcagcugcagcagagcauguccagcgccgacuccacccaggcguga

SEQ ID NO: 17453 - RNA, 1260 nt, Artificial Sequence
  SARS-CoV-2__MT627920.1__nucleocapsid protein (N) CDS gc
augagcgacaacggcccccagaaccagcgcaacgccccgcggaucaccuucgggggccccuccgacagcaccggguccaaccagaacggcgagcgcagcggggcccgguccaagcagcgccggccccagggccugcccaacaacacggcgagcugguucaccgcccucacccagcacggcaaggaggaccugaaguucccgcgcgggcagggcgugcccaucaacaccaacuccagccccgacgaccagaucggguacuaccggcgcgccacgcggcgcauccggggcggggacggcaagaugaaggaccugagcccccgcugguacuucuacuaccucggcaccgggccggaggccggccugcccuacggggccaacaaggacggcaucaucugggucgcgaccgagggcgcccugaacacccccaaggaccacaucgggacgcggaaccccgccaacaacgccgcgaucgugcuccagcugccgcagggcaccacccugcccaagggguucuacgccgagggcucccgcgggggcucccaggccagcucccggagcuccagccgcucccggaacagcucccgcaacagcacccccggcagcucccgggggacgagccccgcccgcauggccggcaacgggggcgacgcggcccucgcccugcugcuccuggaccggcugaaccagcucgaguccaagaugagcgggaagggccagcagcagcagggccagaccgugaccaagaaguucgccgccgaggcguccaagaagccgcgccagaagcgcaccgccacgaaggccuacaaccugacccaggccuucgggcggcgcggccccgagcagacccaggggaacuucggcgaccaggagcugauccggcaggggaccgacuacaagcacuggccccagaucgcccaguucgcgcccagcgccuccgccuucuucggcaugagccgcaucggcauggaggucacgccguccgggaccuggcucaccuacaccggcgccaucaagcuggacgacaaggaccccaacuucaaggaccaggugauccugcucaacaagcacaucgacgccuacaagacguucccgcccaccgagcccaagaaggacaagaagaagaaggcggacgagacccaggcccugccccagcggcagaagaagcagcagaccgugacgcugcuccccgccgccgaccuggacgacuucagcaagcagcugcagcaguccaugagcuccgcggacagcacccaggccuga

SEQ ID NO: 17454 - RNA, 1260 nt, Artificial Sequence
  SARS-CoV-2__MT627921.1__nucleocapsid protein (N) CDS gc
augagcgacaacggcccccagaaccagcgcaacgccccgcggaucaccuucgggggccccuccgacagcaccggguccaaccagaacggcgagcgcagcggggcccgguccaagcagcgccggccccagggccugcccaacaacacggcgagcugguucaccgcccucacccagcacggcaaggaggaccugaaguucccgcgcgggcagggcgugcccaucaacaccaacuccagccccgacgaccagaucggguacuaccggcgcgccacgcggcgcauccggggcggggacggcaagaugaaggaccugagcccccgcugguacuucuacuaccucggcaccgggccggaggccggccugcccuacggggccaacaaggacggcaucaucugggucgcgaccgagggcgcccugaacacccccaaggaccacaucgggacgcggaaccccgccaacaacgccgcgaucgugcuccagcugccgcagggcaccacccugcccaagggguucuacgccgagggcagccgcgggggcucccaggccagcucccggagccucucccgcagccggaacuccagccgcaacuccacccccggcagcagccgggggacgucccccgcccgcauggccggcaacgggggcgacgcggcccuggcccugcuccugcuggaccggcucaaccagcuggagagcaagauguccgggaagggccagcagcagcagggccagaccgugaccaagaaguccgccgccgaggcguccaagaagccgcgccagaagcgcaccgccacgaaggccuacaacgucacccaggccuucgggcggcgcggccccgagcagacccaggggaacuucggcgaccaggagcugauccggcaggggaccgacuacaagcacuggccccagaucgcccaguucgcgcccagcgccuccgccuucuucggcaugagccgcaucggcauggaggugacgccguccgggaccuggcucaccuacaccggcgccaucaagcuggacgacaaggaccccaacuucaaggaccaggugauccugcucaacaagcacaucgacgccuacaagacguucccgcccaccgagcccaagaaggacaagaagaagaaggcggacgagacccaggcccugccccagcggcagaagaagcagcagaccgucacgcugcuccccgccgccgaccuggacgacuucagcaagcagcugcagcaguccaugagcuccgcggacagcacccaggccuga

SEQ ID NO: 17455 - RNA, 1260 nt, Artificial Sequence
  SARS-CoV-2__MT628091.1__nucleocapsid protein (N) CDS gc
augagcgacaacggcccccagaaccagcgcaacgccccgcggaucaccuucgggggccccuccgacagcaccggguccaaccagaacggcgagcgcagcggggcccgguccaagcagcgccggccccagggccugcccaacaacacggcgagcugguucaccgcccucacccagcacggcaaggaggaccugaaguucccgcgcgggcagggcgugcccaucaacaccaacuccagccccgacgaccagaucggguacuaccggcgcgccacgcggcgcauccggggcggggacggcaagaugaaggaccugagcccccgcugguacuucuacuaccucggcaccgggccggaggccggccugcccuacggggccaacaaggacggcaucaucugggucgcgaccgagggcgcccugaacacccccaaggaccacaucgggacgcggaaccccgccaacaacgccgcgaucgugcuccagcugccgcagggcaccacccugcccaagggguucuacgccgagggcucccgcgggggcucccaggccagcucccucagcuccagccggucccgcaacagcucccggaacagcacccccggcagcucccgcgggacgagccccgcccggauggccggcaacgggggcgacgcggcccuggcccugcuccugcuggaccgccucaaccagcuggaguccaagaugagcgggaagggccagcagcagcagggccagaccgugaccaagaaguccgccgccgaggcgagcaagaagccgcggcagaagcgcaccgccacgaaggccuacaacgucacccaggccuucgggcgccggggccccgagcagacccaggggaacuucggcgaccaggagcugauccgccaggggaccgacuacaagcacuggccccagaucgcccaguucgcgcccuccgccagcgccuucuucggcaugucccggaucggcauggaggugacgccgagcgggaccuggcucaccuacaccggcgccaucaagcuggacgacaaggaccccaacuucaaggaccaggugauccugcucaacaagcacaucgacgccuacaagacguucccgcccaccgagcccaagaaggacaagaagaagaaggcggacgagacccaggcccugccccagcgccagaagaagcagcagaccgucacgcugcuccccgccgccgaccuggacgacuucuccaagcagcugcagcagagcauguccagcgcggacuccacccaggccuga

SEQ ID NO: 17456 - RNA, 1260 nt, Artificial Sequence
  SARS-CoV-2__MT628156.1__nucleocapsid protein (N) CDS gc
augagcgacaacggcccccagaaccagcgcaacgccccgcggaucaccuucgggcgccccuccgacagcaccggcuccaaccagaacggggagcggagcggcgcccgcuccaagcagcggcgcccccaggggcugcccaacaacacggcgagcugguucaccgcccucacccagcacggcaaggaggaccugaaguucccgcggggccagggggugcccaucaacaccaacuccagccccgacgaccagaucggcuacuaccgccgggccacgcgccggauccgcgggggcgacgggaagaugaaggaccugagcccccggugguacuucuacuaccucggcaccggcccggaggccgggcugcccuacggcgccaacaaggacgggaucaucugggucgcgaccgagggcgcccugaacacccccaaggaccacaucggcacgcgcaaccccgccaacaacgccgcgaucgugcuccagcugccgcaggggaccacccugcccaagggcuucuacgccgaggggucccggggcgggucccaggccagcucccgcagcuccagccggucccgcaacagcucccggaacagcacccccggcagcucccgcggcacgagccccgcccggauggccgggaacggcggggacgcggcccucgcccugcugcuccuggaccgccugaaccagcucgaguccaagaugagcggcaaggggcagcagcagcagggccagaccgugaccaagaaguccgccgccgaggcgagcaagaagccgcgccagaagcggaccgccacgaaggccuacaacgucacccaggccuucggccgccgggggcccgagcagacccagggcaacuucggggaccaggagcugauccgccagggcaccgacuacaagcacuggccccagaucgcccaguucgcgcccuccgccagcgccuucuucgggaugucccggaucggcauggaggugacgccgagcggcaccuggcugaccuacaccggggccaucaagcucgacgacaaggaccccaacuucaaggaccaggugauccugcugaacaagcacaucgacgccuacaagacguucccgcccaccgagcccaagaaggacaagaagaagaaggcggacgagacccaggcccucccccagcgccagaagaagcagcagaccgucacgcugcugcccgccgccgaccucgacgacuucuccaagcagcugcagcagagcauguccagcgcggacuccacccaggccuga

SEQ ID NO: 17457 - RNA, 1260 nt, Artificial Sequence
  SARS-CoV-2__MT628169.1__nucleocapsid protein (N) CDS gc
augagcgacaacggcccccagaaccagcgcaacgccccgcggaucaccuucgggggccccuccgacagcaccggguccaaccagaacggcgagcgcagcggggcccgguccaagcagcgccggccccagggccugcccaacaacacggcgagcugguucaccgcccucacccagcacggcaaggaggaccugaaguucccgcgcgggcagggcgugcccaucaacaccaacuccagccccgacgaccagaucggguacuaccggcgcgccacgcggcgcauccggggcggggacggcaagaugaaggaccugagcccccgcugguacuucuacuaccucggcaccgggccggaggccggccugcccuacggggccaacaaggacggcaucaucugggucgcgaccgagggcgcccugaacacccccaaggaccacaucgggacgcggaaccccgccaacaacgccgcgaucgugcuccagcugccgcagggcaccacccugcccaagggguucuacgccgagggcucccgcgggggcucccaggccagcucccggagcuccagccgcucccggaacagcucccgcaacagcacccccggcagcucccgggggacgagccccgcccgcauggccggcaacgggggcgacgcggugcucgcccugcugcuccuggaccggcugaaccagcucgaguccaagaugagcgggaagggccagcagcagcagggccagaccgucaccaagaaguccgccgccgaggccagcaagaagccgcgccagaagcgcaccgcgacgaaggccuacaacgugacccaggccuucgggcggcgcggccccgagcagacccaggggaacuucggcgaccaggagcugauccggcaggggaccgacuacaagcacuggccccagaucgcccaguucgcccccuccgcgagcgccuucuucggcaugucccgcaucggcauggaggugacgccgagcgggaccuggcugaccuacaccggcgccaucaagcucgacgacaaggaccccaacuucaaggaccaggucauccugcugaacaagcacaucgacgccuacaagacguucccgcccaccgagcccaagaaggacaagaagaagaaggccgacgagacccaggcgcucccccagcggcagaagaagcagcagaccgugacgcugcugcccgccgccgaccucgacgacuucuccaagcagcugcagcagagcauguccagcgccgacuccacccaggcguga

SEQ ID NO: 17458 - RNA, 1260 nt, Artificial Sequence
  SARS-CoV-2__MT628180.1__nucleocapsid protein (N) CDS gc
augagcgacaacggcccccagaaccagcgcaacgccccgcggaucaccuucgggggccuguccgacagcaccggguccaaccagaacggcgagcgcagcggggcccgguccaagcagcgccggccccagggccuccccaacaacacggcgagcugguucaccgcccugacccagcacggcaaggaggaccugaaguucccccgcgggcagggcgugccgaucaacaccaacuccagccccgacgaccagaucggguacuaccggcgcgccacgcggcgcauccggggcggggacggcaagaugaaggaccucagcccccgcugguacuucuacuaccugggcaccgggcccgaggccggccugccguacggggccaacaaggacggcaucaucugggucgcgaccgagggcgcccucaacacccccaaggaccacaucgggacgcggaaccccgccaacaacgccgcgaucgugcugcagcugccccagggcaccacccucccgaagggguucuacgccgagggcucccgcgggggcucccaggccagcucccggagcuccagccgcucccggaacagcucccgcaacagcacccccggcagcucccgggggacgagccccgcccgcauggccggcaacgggggcgacgcggcccuggcccugcuccugcuggaccggcucaaccagcuggaguccaagaugagcgggaagggccagcagcagcagggccagaccgugaccaagaaguccgccgccgaggcgagcaagaagccccgccagaagcgcaccgccacgaaggccuacaacgucacccaggccuucgggcggcgcggcccggagcagacccaggggaacuucggcgaccaggagcugauccggcaggggaccgacuacaagcacuggccccagaucgcccaguucgcgcccuccgccagcgccuucuucggcaugucccgcaucggcauggaggugacgcccagcgggaccuggcucaccuacaccggcgccaucaagcuggacgacaaggacccgaacuucaaggaccaggugauccugcucaacaagcacaucgacgccuacaagacguucccgcccaccgagcccaagaaggacaagaagaagaaggcggacgagacccaggcccugccccagcggcagaagaagcagcagaccgucacgcugcuccccgccgccgaccuggacgacuucuccaagcagcugcagcagagcauguccagcgcggacuccacccaggccuga

SEQ ID NO: 17459 - RNA, 1260 nt, Artificial Sequence
  SARS-CoV-2__MT628202.1__nucleocapsid protein (N) CDS gc
augagcgacaacggcccccagaaccagcgcaacgccccgcggaucaccuucgggggccccuccgacagcaccggguccaaccagaacggcgagcgcagcggggcccgguccaagcagcgccggccccagggccugcccaacaacacggcgagcugguucaccgcccucacccagcacggcaaggaggaccugaaguucccgcgcgggcagggcgugcccaucaacaccaacuccagccccgacgaccagaucggguacuaccggcgcgccacgcggcgcauccggggcggggacggcaagaugaaggaccugagcccccgcugguacuucuacuaccucggcaccgggccggaggccggccugcccuacggggccaacaaggacggcaucaucugggucgcgaccgagggcgcccugaacacccccaaggaccacaucgggacgcggaaccccgccaacaacgccgcgaucgugcuccagcugccgcagggcaccacccugcccaagggguucuacgccgagggcagccgcgggggcucccaggccagcucccggagcuccagccgcucccggaacagccuccgcaacuccacccccggcagcagccgggggacgucccccgcccgcauggccggcaacgggggcgacgcggcccuggcccugcuccugcuggaccggcucaaccagcuggagagcaagauguccgggaagggccagcagcagcagggccagaccgugaccaagaaguccgccgccgaggcguccaagaagccgcgccagaagcgcaccgccacgaaggccuacaacgucacccaggccuucgggcggcgcggccccgagcagacccaggggaacuucggcgaccaggagcugauccggcaggggaccgacuacaagcacuggccccagaucgcccaguucgcgcccagcgccuccgccuucuucggcaugagccgcaucggcauggaggugacgccguccgggaccuggcucaccuacaccggcgccaucaagcuggacgacaaggaccccaacuucaaggaccaggugauccugcucaacaagcacaucgacgccuacaagacguucccgcccaccgagcccaagaaggacaagaagaagaaggcggacgagacccaggcccugccccagcggcagaagaagcagcagaccgucacgcugcuccccgccgccgaccuggacgacuucagcaagcagcugcagcaguccaugagcaucgcggacuccacccaggccuga

SEQ ID NO: 17460 - RNA, 1260 nt, Artificial Sequence
  SARS-CoV-2__MT628209.1__nucleocapsid protein (N) CDS gc
augagcgacaacggcccccagaaccagcgcaacgccccgcggaucaccuucgggggccccuccgacagcaccggguccaaccagaacggcgagcgcagcggggcccgguccaagcagcgccggccccagggccugcccaacaacacggcgagcugguucaccgcccucacccagcacggcaaggaggaccugaaguucccgcgcgggcagggcgugcccaucaacaccaacuccagccccgacgaccagaucggguacuaccggcgcgccacgcggcgcauccggggcggggacggcaagaugaaggaccugagcccccgcugguacuucuacuaccucggcaccgggccggaggccggccugcccuacggggccaacaaggacggcaucaucugggucgcgaccgagggcgcccugaacacccccaaggaccacaucgggacgcggaaccccgccaacaacgccgcgaucgugcuccagcugccgcagggcaccacccugccccgcggguucuacgccgagggcucccgcgggggcucccaggccagcucccggagcuccagccggucccgcaacagcucccggaacagcacccccggcagcuccaagcgcacgagccccgcccggauggccgggaacggcggggacgcggcccucgcccugcugcuccuggaccgccugaaccagcucgaguccaagaugagcggcaaggggcagcagcagcagggccagaccgugaccaagaaguccgccgccgaggcgagcaagaagccgcgccagaagcggaccgccacgaaggccuacaacgucacccaggccuucggccgccgggggcccgagcagacccagggcaacuucggggaccaggagcugauccgccagggcaccgacuacaagcacuggccccagaucgcccaguucgcgcccuccgccagcgccuucuucgggaugucccggaucggcauggaggugacgccgagcggcaccuggcugaccuacaccggggccaucaagcucgacgacaaggaccccaacuucaaggaccaggugauccugcugaacaagcacaucgacgccuacaagacguucccgcccaccgagcccaagaaggacaagaagaagaaggcggacgagacccaggcccucccccagcgccagaagaagcagcagaccgucacgcugcugcccgccgccgaccucgacgacuucuccaagcagcugcagcagagcauguccagcgcggacuccacccaggccuga

SEQ ID NO: 17461 - RNA, 1260 nt, Artificial Sequence
  SARS-CoV-2__MT632624.1__nucleocapsid protein (N) CDS gc
augagcgacaacggcccccagaaccagcgcaacgccccgcggaucaccuucgggggccccuccgacagcaccggguccaaccagaacggcgagcgcagcggggcccgguccaagcagcgccggccccagggccugcccaacaacacggcgagcugguucaccgcccucacccagcacggcaaggaggaccugaaguucccgcgcgggcagggcgugcccaucaacaccaacuccagccccgacgaccagaucggguacuaccggcgcgccacgcggcgcauccggggcggggacggcaagaugaaggaccugagcccccgcugguacuucuacuaccucggcaccgggccggaggccggccugcccuacggggccaacaaggacggcaucaucugggucgcgaccgagggcgcccugaacacccccaaggaccacaucgggacgcggaaccccgccaacaacgccgcgaucgugcuccagcugccgcagggcaccacccugcccaagggguucuacgccgagggcucccgcgggggcucccaggccagcucccggagcuccagccgcucccggaacagcucccgcaacagcacccccggcagcucccgggggacgagccccgcccgcauggccggcaacgggggcgacgcggcccucgcccugcugcuccuggaccggcugaaccagcucgaguccaagaugagcgggaagggccagcagcagcagggccagaccgugaccaagaaguccgccgccgaggcgagcaagaagccgcgccagaagcgcaccgccacgaaggccuacaacgucacccaggccuucgggcggcgcggccccgagcagacccaggggaacuucggcgaccaggagcugauccggcaggggaccgacuacaagcacuggccccagaucgcccaguucgcgcccuccgccagcgccuucuucggcaugucccgcaucggcauggaggugacgccgagcgggaccuggcugaccuacaccggcgccaucaagcucgacgacaaggaccccaacuucaaggaccaggugauccugcugaacaagcacaucgacgccuacaagacguucccgcccaccgagcccaagaaggacaagaagaagaaggcggacgagacccaggcccucccccagcggcagaagaagcagcagaccgucacgcugcugcccuccgccgaccucgacgacuucagcaagcagcugcagcaguccaugagcuccgccgacagcacccaggcguga

SEQ ID NO: 17462 - RNA, 1260 nt, Artificial Sequence
  SARS-CoV-2__MT632797.1__nucleocapsid protein (N) CDS gc
augagcgacaacggcccccagaaccagcgcaacgccccgcggaucaccuucgggggccccuccgacagcaccggguccaaccagaacggcgagcgcagcggggcccgguccaagcagcgccggccccagggccugcccaacaacacggcgagcugguucaccgcccucacccagcacggcaaggaggaccugaaguucccgcgcgggcagggcgugcccaucaacaccaacuccagccccgacgaccagaucggguacuaccggcgcgccacgcggcgcauccggggcggggacggcaagaugaaggaccugagcccccgcugguacuucuacuaccucggcaccgggccggaggccggccugcccuacggggccaacaaggacggcaucaucugggucgcgaccgagggcgcccugaacacccccaaggaccacaucgggacgcggaaccccgccaacaacgccgcgaucgugcuccagcugccgcagggcaccacccugcccaagggguucuacgccgagggcucccgcgggggcucccaggccagcucccggagcuccagccgcucccggaacagcucccgcaacagcacccccggcagcucccgggggacgagccccgcccgcauggccggcaacgggggcgacgcggcccucgcccugcugcuccuggaccggcugaaccagcucgaguccaagaugagcgggaagggccagcagcagcagggccagaccgugaccaagcgcuccgccgccgaggcgagcaagaagccgcgccagaagcggaccgccacgaaggccuacaacgucacccaggccuucgggcgccggggccccgagcagacccaggggaacuucggcgaccaggagcugauccgccaggggaccgacuacaagcacuggccccagaucgcccaguucgcgcccuccgccagcgccuucuucggcaugucccggaucggcauggaggugacgccgagcgggaccuggcugaccuacaccggcgccaucaagcucgacgacaaggaccccaacuucaaggaccaggugauccugcugaacaagcacaucgacgccuacaagacguucccgcccaccgagcccaagaaggacaagaagaagaaggcggacgagacccaggcccucccccagcgccagaagaagcagcagaccgucacgcugcugcccgccgccgaccucgacgacuucuccaagcagcugcagcagagcauguccagcgcggacuccacccaggccuga

SEQ ID NO: 17463 - RNA, 1260 nt, Artificial Sequence
  SARS-CoV-2__MT632800.1__nucleocapsid protein (N) CDS gc
augagcgacaacggcccccagaaccagcgcaacgccccgcggaucaccuucgggggccccuccgacagcaccggguccaaccagaacggcgagcgcagcggggcccgguccaagcagcgccggccccagggccugcccaacaacacggcgagcugguucaccgcccucacccagcacggcaaggaggaccugaaguucccgcgcgggcagggcgugcccaucaacaccaacuccagccccgacgaccagaucggguacuaccggcgcgccacgcggcgcauccggggcggggacggcaagaugaaggaccugagcccccgcugguacuucuacuaccucggcaccgggccggaggccggccugcccuacggggccaacaaggacggcaucaucugggucgcgaccgagggcgcccugaacacccccaaggaccacaucgggacgcggaaccccgccaacaacgccgcgaucgugcuccagcugccgcagggcaccacccugcccaagggguucuacgccgagggcucccgcgggggcucccaggccagcucccggagcuccagccgcucccggaacagcucccgcaacagcacccccggcagcucccgggggacgagccccgcccgcauggccggcaacgggggcgacgcggcccucgcccugcugcuccuggaccggcugaaccagcucgaguccaagaugagcgggaagggccagcagcagcagggccagaccgugaccaagaaguccgccgccgaggcgagcaagaagccgcgccagaagcgcaccgccacgaaggccuacaacgucacccaggccuucgggcggcgcggccccgagcagacccaggggaacuucggcgaccaggagcugauccggcaggggaccgacuacaagcacuggccccagaucgcccaguucgcgcccuccgccagcgccuucuucggcaugucccgcaucggcauggaggugacgccgagcgggaccuggcugaccuacaccggcgccaucaagcucaacgacaaggaccccaacuucaaggaccaggugauccugcugaacaagcacaucgacgccuacaagacguucccgcccaccgagcccaagaaggacaagaagaagaaggcggacgagacccaggcccucccccagcggcagaagaagcagcagaccgucacgcugcugcccgccgccgaccucgacgacuucuccaagcagcugcagcagagcauguccagcgcggacuccacccaggccuga

SEQ ID NO: 17464 - RNA, 1260 nt, Artificial Sequence
  SARS-CoV-2__MT632822.1__nucleocapsid protein (N) CDS gc
augagcgacaacggcccccagaaccagcgcaacgccccgcggaucaccuucgggggccccuccgacagcaccggguccaaccagaacggcgagcgcagcggggcccgguccaagcagcgccggccccagggccugcccaacaacacggcgagcugguucaccgcccucacccagcacggcaaggaggaccugaaguucccgcgcgggcagggcgugcccaucaacaccaacuccagccccgacgaccagaucggguacuaccggcgcgccacgcggcgcauccggggcggggacggcaagaugaaggaccugagcccccgcugguacuucuacuaccucggcaccgggccggaggccggccugcccuacggggccaacaaggacggcaucaucugggucgcgaccgagggcgcccugaacacccccaaggaccacaucgggacgcggaaccccgccaacaacgccgcgaucgugcuccagcugccgcagggcaccacccugcccaagggguucuacgccgagggcucccgcgggggcucccaggccagcucccggagcuccagccgcucccggaacagcucccgcaacagcacccccggcagcucccgggggacgagccccgcccgcauggccugcaacggcggggacgcggcccucgcccugcugcuccuggaccggcugaaccagcucgaguccaagaugagcggcaaggggcagcagcagcagggccagaccgugaccaagaaguccgccgccgaggcgagcaagaagccgcgccagaagcgcaccgccacgaaggccuacaacgucacccaggccuucggccggcgcgggcccgagcagacccagggcaacuucggggaccaggagcugauccggcagggcaccgacuacaagcacuggccccagaucgcccaguucgcgcccuccgccagcgccuucuucgggaugucccgcaucggcauggaggugacgccgagcggcaccuggcugaccuacaccggggccaucaagcucgacgacaaggaccccaacuucaaggaccaggugauccugcugaacaagcacaucgacgccuacaagacguucccgcccaccgagcccaagaaggacaagaagaagaaggcggacgagacccaggcccucccccagcggcagaagaagcagcagaccgucacgcugcugcccgccgccgaccucgacgacuucuccaagcagcugcagcagagcauguccagcgcggacuccacccaggccuga

SEQ ID NO: 17465 - RNA, 1260 nt, Artificial Sequence
  SARS-CoV-2__MT614463.1__nucleocapsid protein (N) CDS gc
augagcgacaacggcccccagaaccagcgcaacgccccgcggaucaccuucgggggccccuccgacagcaccggguccaaccagaacggcgagcgcagcggggcccgguccaagcagcgccggccccagggccugcccaacaacacggcgagcugguucaccgcccucacccagcacggcaaggaggaccugaaguucccgcgcgggcagggcgugcccaucaacaccaacuccagccccgacgaccagaucggguacuaccggcgcgccacgcggcgcauccggggcggggacggcaagaugaaggaccugagcccccgcugguacuucuacuaccucggcaccgggccggaggccggccugcccuacggggccaacaaggacggcaucaucugggucgcgaccgagggcgcccugaacacccccaaggaccacaucgggacgcggaaccccgccaacaacgccgcgaucgugcuccagcugccgcagggcaccacccugcccaagggguucuacgccgagggcucccgcgggggcucccaggccagcucccggagcuccagccgcucccggaacagcucccgcaacagcacccccggcagcucccgggggacgagccccgcccgcauggccggcaacgggggcgacgcggcccucgcccugcugcuccuggaccggcugaaccagcucgaguccaagaugagcgggaagggccagcagcagcagggccagaccgugaccaagaaguccgccgccgaggcgagcaagaagccgcgccagaagcgcaccgccacgaaggccuacaacgucacccaggccuucgggcggcgcggccccgagcagacccaggggaacuucggcgaccaggagcugauccggcaggggaccgacuacaagcacuggccccagaucgcccaguucgcgcccuccgccagcgccuucuucggcaugucccgcaucggcauggaggugacgccgagcgggaccuggcugaccuacaccggcgccaucaagcucgacgacaaggaccccaacuucaaggaccaggugauccugcugaacaagcacaucgacgccuacaagacguucccgcccaccgagcccaagaaggacaagaagaagaaggcggacgagacccaggcccucccccagcggaagaagaagcagcagaccgucacgcugcugcccgccgccgaccucgacgacuucuccaagcagcugcagcagagcauguccagcgcggacuccacccaggccuga

SEQ ID NO: 17466 - RNA, 1260 nt, Artificial Sequence
  SARS-CoV-2__MT614486.1__nucleocapsid protein (N) CDS gc
augagcgacaacggcccccagaaccagcgcaacgccccgcggaucaccuucgggggccccuccgacagcaccggguccaaccagaacggcgagcgcagcggggcccgguccaagcagcgccggccccagggccugcccaacaacacggcgagcugguucaccgcccucacccagcacggcaaggaggaccugaaguucccgcgcgggcagggcgugcccaucaacaccaacuccagccccgacgaccagaucggguacuaccggcgcgccacgcggcgcauccggggcggggacggcaagaugaaggaccugagcccccgcugguacuucuacuaccucggcaccgggccggaggccggccugcccuacggggccaacaaggacggcaucaucugggucgcgaccgagggcgcccugaacacccccaaggaccacaucgggacgcggaaccccgccaacaacgccagcaucgugcuccagcugccgcagggcaccacccugcccaagggguucuacgcggagggcucccgcgggggcagccaggccuccagccgguccagcucccgcagccggaacuccagccgcaacagcacccccggcuccagccgggggacgucccccgcccgcauggccggcaacgggggcgacgccgcgcucgcccugcugcuccuggaccggcugaaccagcucgagagcaagauguccgggaagggccagcagcagcagggccagaccgugaccaagaaguccgccgccgaggccuccaagaagccgcgccagaagcgcaccgcgacgaaggccuacaacgucacccaggccuucgggcggcgcggccccgagcagacccaggggaacuucggcgaccaggagcugauccggcaggggaccgacuacaagcacuggccccagaucgcccaguucgcccccagcgcguccgccuucuucggcaugagccgcaucggcauggaggugacgccguccgggaccuggcugaccuacaccggcgccaucaagcucgacgacaaggaccccaacuucaaggaccaggugauccugcugaacaagcacaucgacgccuacaagacguucccgcccaccgagcccaagaaggacaagaagaagaaggccgacgagacccaggcgcucccccagcggcagaagaagcagcagaccgucacgcugcugcccgccgccgaccucgacgacuucagcaagcagcugcagcaguccaugagcuccgccgacagcacccaggcguga

SEQ ID NO: 17467 - RNA, 1260 nt, Artificial Sequence
  SARS-CoV-2__MT614508.1__nucleocapsid protein (N) CDS gc
augagcgacaacggcccccagaaccagcgcaacgccccgcggaucaccuucgggggccccuccgacagcaccggguccaaccagaacggcgagcgcagcggggcccgguccaagcagcgccggccccagggccugcccaacaacacggcgagcugguucaccgcccucacccagcacggcaaggaggaccugaaguucccgcgcgggcagggcgugcccaucaacaccaacuccagccccgacgaccagaucggguacuaccggcgcgccacgcggcgcauccggggcggggacggcaagaugaaggaccugagcccccgcugguacuucuacuaccucggcaccgggccggaggccggccugcccuacggggccaacaaggacggcaucaucugggucgcgaccgagggcgcccugaacacccccaaggaccacaucgggacgcggaaccccgccaacaacgccgcgaucgugcuccagcugccgcagggcaccacccugcccaagggguucuacgccgagggcucccgcgggggcucccaggccagcucccggagcuccagccgcucccggaacagcucccgcaacagcacccccggcagcucccgggggacgagccccgcccgcauggccggcaacgggggcgacgcggcccucgcccugcugcuccuggaccggcugaaccagcucgaguccaagaugagcgggaagggccagcagcagcagggccagaccgugaccaagaaguccgccgccgaggcgagcaagaagccgcgccagaagcgcaccgccacgaaggccuacaacgucacccaggccuucgggcggcgcggccccgagcagacccaggggaacuucggcgaccacgagcugauccggcaggggaccgacuacaagcacuggccccagaucgcccaguucgcgcccuccgccagcgccuucuucggcaugucccgcaucggcauggaggugacgccgagcgggaccuggcugaccuacaccggcgccaucaagcucgacgacaaggaccccaacuucaaggaccaggugauccugcugaacaagcacaucgacgccuacaagacguucccgcccaccgagcccaagaaggacaagaagaagaaggcggacgagacccaggcccucccccagcggcagaagaagcagcagaccgucacgcugcugcccgccgccgaccucgacgacuucuccaagcagcugcagcagagcauguccagcgcggacuccacccaggccuga

SEQ ID NO: 17468 - RNA, 1260 nt, Artificial Sequence
  SARS-CoV-2__MT614531.1__nucleocapsid protein (N) CDS gc
augagcgacaacggcccccagaaccagcgcaacgccccgcggaucaccuucgggggccccuccgacagcaccggguccaaccagaacggcgagcgcagcggggcccgguccaagcagcgccggccccagggccugcccaacaacacggcgagcugguucaccgcccucacccagcacggcaaggaggaccugaaguucccgcgcgggcagggcgugcccaucaacaccaacuccagccccgacgaccagaucggguacuaccggcgcgccacgcggcgcauccggggcggggacggcaagaugaaggaccugagcccccgcugguacuucuacuaccucggcaccgggccggaggccggccugcccuacggggccaacaaggacggcaucaucugggucgcgaccgagggcgcccugaacacccccaaggaccacaucgggacgcggaaccccgccaacaacgccgcgaucgugcuccagcugccgcagggcaccacccugcccaagggguucuacgccgagggcucccgcgggggcucccaggccagcucccggagcuccagccgcucccggaacagcucccgcaacagcacccccggcagcucccgggggacgagccccgcccgcauggccggcaacgggggcgacgcggcccucgcccugcugcuccuggaccggcugaaccagcucgaguccaagaugagcgggaagggccagcagcagcagggccagaccgugaccaagaaguccgccgccgaggcgagcaagaagccgcgccagaagcgcaccgccacgaaggccuacaacgucacccaggccuucgggcggcgcggccccgagcagacccaggggaacuucggcgaccaggagcugauccggcaggggaccgacuacaagcacuggccccagaucgcccaguucgcgcccuccgccagcgccuucuucggcaugucccgcaucggcauggaggugacgccgagcgggaccuggcugaccuacaccggcgccaucaagcucgacgacaaggaccccaacuucaaggaccaggugauccugcugaacaagcacaucgacgccuacaagacguucccgcccaccgagcccaagaaggacaagaagaagaaggcggacgagacccacgcccucccccagcggcagaagaagcagcagaccgucacgcugcugcccgccgccgaccucgacgacuucuccaagcagcugcagcagagcauguccagcgcggacuccacccaggccuga

SEQ ID NO: 17469 - RNA, 1260 nt, Artificial Sequence
  SARS-CoV-2__MT621560.1__nucleocapsid protein (N) CDS gc
augagcgacaacggcccccagaaccagcgcaacgccccgcggaucaccuucgggggccccuccgacagcaccggguccaaccagaacggcgagcgcagcggggcccgguccaagcagcgccggccccagggccugcccaacaacacggcgagcugguucaccgcccucacccagcacggcaaggaggaccugaaguucccgcgcgggcagggcgugcccaucaacaccaacuccagccccgacgaccagaucggguacuaccggcgcgccacgcggcgcauccggggcggggacggcaagaugaaggaccugagcccccgcugguacuucuacuaccucggcaccgggccggaggccggccugcccuacggggccaacaaggacggcaucaucugggucgcgaccgagggcgcccugaacacccccaaggaccacaucgggacgcggaaccccgccaacaacgccgcgaucgugcuccagcugccgcagggcaccacccugcccaagggguucuacgccgagggcucccgcgggggcucccaggccagcucccggagcuccagccgcucccggaacagcucccgcaacagcacccccggcagcucccgggggacgagccccgcccgcauggccggcaacgggggcgacgcggcccucgcccugcugcuccuggaccggcugaaccagcucgaguccaagaugagcgggaagggccagcagcagcagggccagaccgugaccaagaaguccgccgccgaggcgagcaagaagccgcgcgagaagcgcaccgccacgaaggccuacaacgucacccaggccuucgggcggcgcggccccgagcagacccaggggaacuucggcgaccaggagcugauccggcaggggaccgacuacaagcacuggccccagaucgcccaguucgcgcccuccgccagcgccuucuucggcaugucccgcaucggcauggaggugacgccgagcgggaccuggcugaccuacaccggcgccaucaagcucgacgacaaggaccccaacuucaaggaccaggugauccugcugaacaagcacaucgacgccuacaagacguucccgcccaccgagcccaagaaggacaagaagaagaaggcggacgagacccaggcccucccccagcggcagaagaagcagcagaccgucacgcugcugcccgccgccgaccucgacgacuucuccaagcagcugcagcagagcauguccagcgcggacuccacccaggccuga

SEQ ID NO: 17470 - RNA, 1260 nt, Artificial Sequence
  SARS-CoV-2__MT510701.1__nucleocapsid protein (N) CDS gc
augagcgacaacggcccccagaaccagcgcaacgccccgcggaucaccuucgggggccccuccgacagcaccggguccaaccagaacggcgagcgcagcggggugcgguccaagcagcgccggccccagggccugcccaacaacacggccagcugguucaccgcgcucacccagcacggcaaggaggaccugaaguucccgcgcgggcagggcguccccaucaacaccaacuccagccccgacgaccagaucggguacuaccggcgcgccacgcggcgcauccggggcggggacggcaagaugaaggaccugagcccccgcugguacuucuacuaccucggcaccgggccggaggccggccugcccuacggggccaacaaggacggcaucaucuggguggccaccgagggcgcgcugaacacccccaaggaccacaucgggacgcggaaccccgccaacaacgccgccaucgugcuccagcugccgcagggcaccacccugcccaagggguucuacgcggagggcucccgcgggggcucccaggccagcucccggagcuccagccgcucccggaacagcucccgcaacagcacccccggcagcucccgggggacgagccccgcccgcauggccggcaacgggggcgacgccgcgcucgcccugcugcuccuggaccggcugaaccagcucgaguccaagaugagcgggaagggccagcagcagcagggccagaccgucaccaagaaguccgccgccgaggccagcaagaagccgcgccagaagcgcaccgcgacgaaggccuacaacgugacccaggccuucgggcggcgcggccccgagcagacccaggggaacuucggcgaccaggagcugauccggcaggggaccgacuacaagcacuggccccagaucgcccaguucgcccccuccgcgagcgccuucuucggcaugucccgcaucggcauggaggugcggccgagcgggacguggcugaccuacaccggcgccaucaagcucgacgacaaggaccccaacuucaaggaccaggucauccugcugaacaagcacaucgacgccuacaagaccuucccgcccacggagcccaagaaggacaagaagaagaaggccgacgagacccaggcgcucccccagcgccagaagaagcagcagaccgugacccugcugcccgccgccgaccucgacgacuucuccaagcagcugcagcagagcauguccagcgccgacuccacgcaggcguga

SEQ ID NO: 17471 - RNA, 1251 nt, Artificial Sequence
  SARS-CoV-2__MT605818.1__nucleocapsid protein (N) CDS gc
augagcgacaacggcccccagaaccagcgcaacgccccgcggaucaccuucgggggccccuccgacagcaccggguccaaccagaacggcgagcgcagcggggcccgguccaagcagcgccggccccagggccugcccaacaacacggcgagcugguucaccgcccucacccagcacggcaaggaggaccugaaguucccgcgcgggcagggcgugcccaucaacaccaacuccagccccgacgaccagaucggguacuaccggcgcgccacgcggcgcauccggggcggggacggcaagaugaaggaccugagcccccgcugguacuucuacuaccucggcaccgggccggaggccggccugcccuacggggccaacaaggacggcaucaucugggucgcgaccgagggcgcccugaacacccccaaggaccacaucgggacgcggaaccccgccaacaacgccgcgaucgugcuccagcugccgcagggcaccacccugcccaagggguucuacgccgagggcagccgcgggggcucccaggccagcucccggagcuccagccgcucccggaacagcuccacccccggcagcagcaagcgcacgucccccgcccggauggccgggaacggcggggacgcggcccucgcccugcugcuccuggaccgccugaaccagcucgagagcaagauguccggcaaggggcagcagcagcagggccagaccgugaccaagaaguccgccgccgaggcguccaagaagccgcggcagaagcgcaccgccacgaaggccuacaacgucacccaggccuucggccgccgggggcccgagcagacccagggcaacuucggggaccaggagcugauccgccagggcaccgacuacaagcacuggccccagaucgcccaguucgcgcccagcgccuccgccuucuucgggaugagccggaucggcauggaggugacgccguccggcaccuggcugaccuacaccggggccaucaagcucgacgacaaggaccccaacuucaaggaccaggugauccugcugaacaagcacaucgacgccuacaagacguucccgcccaccgagcccaagaaggacaagaagaagaaggcggacgagacccaggcccucccccagcgccagaagaagcagcagaccgucacgcugcugcccgccgccgaccucgacgacuucagcaagcagcugcagcaguccaugagcuccgcggacagcacccaggccuga

SEQ ID NO: 17472 - RNA, 1260 nt, Artificial Sequence
  SARS-CoV-2__MT607248.1__nucleocapsid protein (N) CDS gc
augagcgacaacggcccccagaaccagcgcaacgccccgcggaucaccuucgggggccccuccgacagcaccggguccaaccagaacggcgagcgcagcggggcccgguccaagcagcgccggccccagggccugcccaacaacacggcgagcugguucaccgcccucacccagcacggcaaggaggaccugaaguucccgcgcgggcagggcgugcccaucaacaccaacuccagccccgacgaccagaucggguacuaccggcgcgccacgcggcgcauccggggcggggacggcaagaugaaggaccugagcccccgcugguacuucuacuaccucggcaccgggccggaggccggccugcccuacggggccaacaaggacggcaucaucugggucgcgaccgagggcgcccugaacacccccaaggaccacaucgggacgcggaaccccgccaacaacgccgcgaucgugcuccagcugccgcagggcaccaccuuccccaagggguucuacgccgagggcucccgcgggggcucccaggccagcucccggagcuccagccgcucccggaacagcucccgcaacagcacccccggcagcuccaagcggacgagccccgcccgcauggccgggaacggcggggacgcggcccuggcccuccugcugcucgaccggcugaaccagcuggaguccaagaugagcggcaaggggcagcagcagcagggccagaccgugaccaagaaguccgccgccgaggcgagcaagaagccgcgccagaagcgcaccgccacgaaggccuacaacgucacccaggccuucggccggcgcgggcccgagcagacccagggcaacuucggggaccaggagcucauccggcagggcaccgacuacaagcacuggccccagaucgcccaguucgcgcccuccgccagcgccuucuucgggaugucccgcaucggcauggaggugacgccgagcggcaccuggcugaccuacaccggggccaucaagcuggacgacaaggaccccaacuucaaggaccaggugauccuccugaacaagcacaucgacgccuacaagacguucccgcccaccgagcccaagaaggacaagaagaagaaggcggacgagacccaggcccugccccagcggcagaagaagcagcagaccgucacgcuccugcccgccgccgaccuggacgacuucuccaagcagcuccagcagagcauguccagcgcggacuccacccaggccuga

SEQ ID NO: 17473 - RNA, 1260 nt, Artificial Sequence
  SARS-CoV-2__MT607611.1__nucleocapsid protein (N) CDS gc
augagcgacaacggcccccagaaccagcgcaacgccccgcggaucaccuucgggggccccuccuacagcaccggguccaaccagaacggcgagcgcagcggggcccgguccaagcagcgccggccccagggccugcccaacaacacggcgagcugguucaccgcccucacccagcacggcaaggaggaccugaaguucccgcgcgggcagggcgugcccaucaacaccaacuccagccccgacgaccagaucggguacuaccggcgcgccacgcggcgcauccggggcggggacggcaagaugaaggaccugagcccccgcugguacuucuacuaccucggcaccgggccggaggccggccugcccuacggggccaacaaggacggcaucaucugggucgcgaccgagggcgcccugaacacccccaaggaccacaucgggacgcggaaccccgccaacaacgccgcgaucgugcuccagcugccgcagggcaccacccugcccaagggguucuacgccgagggcagccgcgggggcucccaggccagcucccggagcuccagccgcucccggaacagccuccgcaacuccacccccggcagcagccgggggacgucccccgcccgcauggccggcaacgggggcgacgcggcccuggcccugcuccugcuggaccggcucaaccagcuggagagcaagauguccgggaagggccagcagcagcagggccagaccgugaccaagaaguccgccgccgaggcguccaagaagccgcgccagaagcgcaccgccacgaaggccuacaacgucacccaggccuucgggcggcgcggccccgagcagacccaggggaacuucggcgaccaggagcugauccggcaggggaccgacuacaagcacuggccccagaucgcccaguucgcgcccagcgccuccgccuucuucggcaugagccgcaucggcauggaggugacgccguccgggaccuggcucaccuacaccggcgccaucaagcuggacgacaaggaccccaacuucaaggaccaggugauccugcucaacaagcacaucgacgccuacaagacguucccgcccaccgagcccaagaaggacaagaagaagaaggcggacgagacccaggcccugccccagcggcagaagaagcagcagaccgucacgcugcuccccgccgccgaccuggacgacuucagcaagcagcugcagcaguccaugagcuccgcggacagcacccaggccuga

SEQ ID NO: 17474 - RNA, 1260 nt, Artificial Sequence
  SARS-CoV-2__MT609566.1__nucleocapsid protein (N) CDS gc
augagcgacaacggcccccagaaccagcgcaacgccccgcggaucaccuucgggggccccuccgacagcaccggguccaaccagaacggcgagcgcagcggggcccgguccaagcagcgccggccccagggccugcccaacaacacggcgagcugguucaccgcccucacccagcacggcaaggaggaccugaaguucccgcgcgggcagggcgugcccaucaacaccaacuccagccccgacgaccagaucggguacuaccggcgcgccacgcggcgcauccggggcggggacggcaagaugaaggaccugagcccccgcugguacuucuacuaccucggcaccgggccggaggccggccugcccuacggggccaacaaggacggcaucaucugggucgcgaccgagggcgcccugaacacccccaaggaccacaucgggacgcggaaccccgccaacaacgccgcgaucgugcuccagcugccgcagggcaccacccugcccaagggguucuacgccgagggcucccgcgggggcucccaggccagcucccggagcuccagccgcucccggaacagcucccgcaacagcacccccggcagcucccgggggacgagccccgcccgcauggccggcaacgggggcgacgcggcccucgcccugcugcuccuggaccggcugaaccagcucgaguccaagaugagcgggaagggccagcagcagcagggccagaccgugaccaagaaguccgccgccgaggcgagcaagaagccgcgccagaagcgcaccgccacgaaggccuacaacgucacccaggccuucgggcggcgcggccccgagcagacccaggggaacuucggcgaccaggagcugauccggcaggggaccgacuacaagcacuggccccagaucgcccaguucgcgcccuccgccagcgccuucuucggcaugucccgcaucggcauggaggugacgccgagcgggaccuggcugaccuacaccggcgccaucaagcucgacgacaaggaccccaacuucaaggaccaggugauccugcugaacaagcacaucgacgccuacaagaucuucccgcccacggagcccaagaaggacaagaagaagaaggcggacgagacccaggcccucccccagcggcagaagaagcagcagaccgucacccugcugcccgccgccgaccucgacgacuucuccaagcagcugcagcagagcauguccagcgcggacuccacgcaggccuga

SEQ ID NO: 17475 - RNA, 1260 nt, Artificial Sequence
  SARS-CoV-2__MT601281.1__nucleocapsid protein (N) CDS gc
augagcgacaacggcccccagaaccagcgcaacgccccgcggaucaccuucgggggccccuccgacagcaccggguccaaccagaacggcgagcgcagcggggcccgguccaagcagcgccggccccagggccugcccaacaacacggcgagcugguucaccgcccucacccagcacggcaaggaggaccugaaguucccgcgcgggcagggcgugcccaucaacaccaacuccagccccgacgaccagaucggguacuaccggcgcgccacgcggcgcauccggggcggggacggcaagaugaaggaccugagcccccgcugguacuucuacuaccucggcaccgggccggaggccggccugcccuacggggccaacaaggacggcaucaucugggucgcgaccgagggcgcccugaacacccccaaggaccacaucgggacgcggaaccccgccaacaacgccgcgaucgugcuccagcugccgcagggcaccacccugcccaagggguucuacgccgagggcagccgcgggggcucccaggccagcucccggagcuccagccgcucccggaacagccuccgcaacuccacccccggcagcagccgggggacgucccccgcccgcauggccggcaacgggggcgacgcggcccuggcccugcuccugcuggaccggcucaaccagcuggagagcaagauguccgggaagggccagcagcagcagggccagaccgugaccaagaaguccgccgccgaggcguccaagaagccgcgccagaagcgcaccgccacgaaggccuacaacgucacccaggccuucgggcggcgcggccccgagcagacccaggggaacuucggcgaccaggagcugauccggcaggggaccgacuacaagcacuggccccagaucgcccaguucgcgcccagcgccuccgccuucuucggcaugagccgcaucggcauggaggugacgccguccgggaccuggcucaccuacaccggcgccaucaagcuggacgacaaggaccccaacuucaaggaccaggugauccugcucaacaagcacaucgacgccuacaagacguucccgcccaccgagcccaagaaggacaagaagaagaaggcggacgagacccaggcccugccccagcggcacaagaagcagcagaccgucacgcugcuccccgccgccgaccuggacgacuucagcaagcagcugcagcaguccaugagcuccgcggacagcacccaggccuga

SEQ ID NO: 17476 - RNA, 1260 nt, Artificial Sequence
  SARS-CoV-2__MT601290.1__nucleocapsid protein (N) CDS gc
augagcgacaacggcccccagaaccagcgcaacgccccgcggaucaccuucgggggccccuccgacagcaccggguccaaccagaacggcgagcgcagcggggcccgguccaagcagcgccggccccagggccugcccaacaacacggcgagcugguucaccgcccucacccagcacggcaaggaggaccugaaguucccgcgcgggcagggcgugcccaucaacaccaacuccagccccgacgaccagaucggguacuaccggcgcgccacgcggcgcauccggggcggggacggcaagaugaaggaccugagcccccgcugguacuucuacuaccucggcaccgggccggaggccggccugcccuacggggccaacaaggacggcaucaucugggucgcgaccgagggcgcccugaacacccccaaggaccacaucgggacgcggaaccccgccaacaacgccgcgaucgugcuccagcugccgcagggcaccacccugcccaagggguucuacgccgagggcagccgcgggggcacccaggccuccagccgguccagcucccgcagccggaacuccagccgcaacuccacgcccggcagcagcaagcggaccucccccgcccgcauggccgggaacggcggggacgcggcccucgcccugcugcuccuggaccggcugaaccagcucgagagcaagauguccggcaaggggcagcagcagcagggccagaccgugaccaagaaguccgccgccgaggcguccaagaagccgcgccagaagcgcacggccaccaaggccuacaacgucacccaggccuucggccggcgcgggcccgagcagauccagggcaacuucggggaccaggagcugauccggcagggcaccgacuacaagcacuggccccagaucgcccaguucgcgcccagcgccuccgccuucuucgggaugagccgcaucggcauggaggugacgccguccggcaccuggcugaccuacaccggggccaucaagcucgacgacaaggaccccaacuucaaggaccaggugauccugcugaacaagcacaucgacgccuacaagacguucccgcccaccgagcccaagaaggacaagaagaagaaggcggacgagacccaggcccucccccagcggcagaagaagcagcagaccgucacgcugcugcccgccgccgaccucgacgacuucagcaagcagcugcagcaguccaugagcuccgcggacagcacccaggccuga

SEQ ID NO: 17477 - RNA, 1260 nt, Artificial Sequence
  SARS-CoV-2__MT585039.1__nucleocapsid protein (N) CDS gc
augagcgacaacggcccccagaaccagcgcaacgccccgcggaucaccuucugcgggcccuccgacagcaccggcuccaaccagaacggggagcgcagcggcgcccgguccaagcagcgccggccccaggggcugcccaacaacacggcgagcugguucaccgcccucacccagcacggcaaggaggaccugaaguucccgcgcggccagggggugcccaucaacaccaacuccagccccgacgaccagaucggcuacuaccggcgcgccacgcggcgcauccgcgggggcgacgggaagaugaaggaccugagcccccggugguacuucuacuaccucggcaccggcccggaggccgggcugcccuacggcgccaacaaggacgggaucaucugggucgcgaccgagggcgcccugaacacccccaaggaccacaucggcacgcggaaccccgccaacaacgccgcgaucgugcuccagcugccgcaggggaccacccugcccaagggcuucuacgccgaggggucccgcggcgggucccaggccagcucccggagcuccagccgcucccggaacagcucccgcaacagcacccccggcagcucccggggcacgagccccgcccgcauggccgggaacggcggggacgcggcccucgcccugcugcuccuggaccggcugaaccagcucgaguccaagaugagcggcaaggggcagcagcagcagggccagaccgugaccaagaaguccgccgccgaggcgagcaagaagccgcgccagaagcgcaccgccacgaaggccuacaacgucacccaggccuucggccggcgcgggcccgagcagacccagggcaacuucggggaccaggagcugauccggcagggcaccgacuacaagcacuggccccagaucgcccaguucgcgcccuccgccagcgccuucuucgggaugucccgcaucggcauggaggugacgccgagcggcaccuggcugaccuacaccggggccaucaagcucgacgacaaggaccccaacuucaaggaccaggugauccugcugaacaagcacaucgacgccuacaagacguucccgcccaccgagcccaagaaggacaagaagaagaaggcggacgagacccaggcccucccccagcggcagaagaagcagcagaccgucacgcugcugcccgccgccgaccucgacgacuucuccaagcagcugcagcagagcauguccagcgcggacuccacccaggccuga

SEQ ID NO: 17478 - RNA, 1260 nt, Artificial Sequence
  SARS-CoV-2__MT585089.1__nucleocapsid protein (N) CDS gc
augagcgacaacggcccccagaaccagcgcaacgccccgcggaucaccuucgggggccccuccgacagcaccggguccaaccagaacggcgagcgcagcggggcccgguccaagcagcgccggccccagggccugcccaacaacacggcgagcugguucaccgcccucacccagcacggcaaggaggaccugaaguucccgcgcgggcagggcgugcccaucaacaccaacuccagccccgacgaccagaucggguacuaccggcgcgccacgcggcgcauccggggcggggacggcaagaugaaggaccugagcccccgcugguacuucuacuaccucggcaccgggccggaggccggccugcccuacggggccaacaaggacggcaucaucugggucgcgaccgagggcgcccugaacacccccaaggaccacaucgggacgcggaaccccgccaacaacgccgcgaucgugcuccagcugccgcagggcaccacccugcccaagggguucuacgccgagggcucccgcgggggcucccaggccagcucccggagcuccagccgcucccggaacagcucccgcaacagcacccccggcagcucccgggggacgagccccgccaagauggccggcaacgggggcgacgcggcccucgcccugcugcuccuggaccgccugaaccagcucgaguccaagaugagcgggaagggccagcagcagcagggccagaccgugaccaagaaguccgccgccgaggcgagcaagaagccgcggcagaagcgcaccgccacgaaggccuacaacgucacccaggccuucgggcgccggggccccgagcagacccaggggaacuucggcgaccaggagcugauccgccaggggaccgacuacaagcacuggccccagaucgcccaguucgcgcccuccgccagcgccuucuucggcaugucccggaucggcauggaggugacgccgagcgggaccuggcugaccuacaccggcgccaucaagcucgacgacaaggaccccaacuucaaggaccaggugauccugcugaacaagcacaucgacgccuacaagacguucccgcccaccgagcccaagaaggacaagaagaagaaggcggacgagacccaggcccucccccagcgccagaagaagcagcagaccgucacgcugcugcccgccgccgaccucgacgacuucuccaagcagcugcagcagagcauguccagcgcggacuccacccaggccuga

SEQ ID NO: 17479 - RNA, 1260 nt, Artificial Sequence
  SARS-CoV-2__MT479224.1__nucleocapsid protein (N) CDS gc
augagcgacaacggcccccagaaccagcgcaacgccccgcggaucaccuucgggggccccuccgacagcaccggguccaaccagaacggcgagcgcagcggggcccgguccaagcagcgccggccccagggccugcccaacaacacggcgagcugguucaccgcccucacccagcacggcaaggaggaccugaaguucccgcgcgggcagggcgugcccaucaacaccaacuccagccccgacgaccagaucggguacuaccggcgcgccacgcggcgcauccggggcggggacggcaagaugaaggaccugagcccccgcugguacuucuacuaccucggcaccgggccggaggccggccugcccuacggggccaacaaggacggcaucaucugggucgcgaccgagggcgcccugaacacccccaaggaccacaucgggacgcggaaccccgccaacaacgccgcgaucgugcuccagcugccgcagggcaccacccugcagaagggguucuacgccgagggcucccgcgggggcucccaggccagcucccggagcuccagccgcucccggaacagcucccgcaacagcacccccggcagcucccgggggacgagccccgcccgcauggccggcaacgggggcgacgcggcccucgcccugcugcuccuggaccggcugaaccagcucgaguccaagaugagcgggaagggccagcagcagcagggccagaccgugaccaagaaguccgccgccgaggcgagcaagaagccccgccagaagcgcaccgccacgaaggccuacaacgucacccaggccuucgggcggcgcggcccggagcagacccaggggaacuucggcgaccaggagcugauccggcaggggaccgacuacaagcacuggccccagaucgcccaguucgcgcccuccgccagcgccuucuucggcaugucccgcaucggcauggaggugacgcccagcgggaccuggcugaccuacaccggcgccaucaagcucgacgacaaggacccgaacuucaaggaccaggugauccugcugaacaagcacaucgacgccuacaagacguucccgcccaccgagcccaagaaggacaagaagaagaaggcggacgagacccaggcccucccccagcggcagaagaagcagcagaccgucacgcugcugcccgccgccgaccucgacgacuucuccaagcagcugcagcagagcauguccagcgcggacuccacccaggccuga

SEQ ID NO: 17480 - RNA, 1260 nt, Artificial Sequence
  SARS-CoV-2__MT499220.1__nucleocapsid protein (N) CDS gc
augagcgacaacggcccccagaaccagcgcaacgccccgcggaucaccuucgggggccccuccgacagcaccuucuccaaccagaacggggagcgcagcggcgcccgguccaagcagcgccggccccaggggcugcccaacaacacggcgagcugguucaccgcccucacccagcacggcaaggaggaccugaaguucccgcgcggccagggggugcccaucaacaccaacuccagccccgacgaccagaucggcuacuaccggcgcgccacgcggcgcauccgcgggggcgacgggaagaugaaggaccugagcccccggugguacuucuacuaccucggcaccggcccggaggccgggcugcccuacggcgccaacaaggacgggaucaucugggucgcgaccgagggcgcccugaacacccccaaggaccacaucggcacgcggaaccccgccaacaacgccgcgaucgugcuccagcugccgcaggggaccacccugcccaagggcuucuacgccgaggggucccgcggcgggucccaggccagcucccggagcuccagccgcucccggaacagcucccgcaacagcacccccggcagcucccggggcacgagccccgcccgcauggccgggaacggcggggacgcggcccucgcccugcugcuccuggaccggcugaaccagcucgaguccaagaugagcggcaaggggcagcagcagcagggccagaccgugaccaagaaguccgccgccgaggcgagcaagaagccgcgccagaagcgcaccgccacgaaggccuacaacgucacccaggccuucggccggcgcgggcccgagcagacccagggcaacuucggggaccaggagcugauccggcagggcaccgacuacaagcacuggccccagaucgcccaguucgcgcccuccgccagcgccuucuucgggaugucccgcaucggcauggaggugacgccgagcggcaccuggcugaccuacaccggggccaucaagcucgacgacaaggaccccaacuucaaggaccaggugauccugcugaacaagcacaucgacgccuacaagacguucccgcccaccgagcccaagaaggacaagaagaagaaggcggacgagacccaggcccucccccagcggcagaagaagcagcagaccgucacgcugcugcccgccgccgaccucgacgacuucuccaagcagcugcagcagagcauguccagcgcggacuccacccaggccuga

SEQ ID NO: 17481 - RNA, 1260 nt, Artificial Sequence
  SARS-CoV-2__MT576048.1__nucleocapsid protein (N) CDS gc
augagcgacaacggcccccagaaccagcgcaacgccccgcggaucaccuucgggggccccuccgacagcaccggguccaaccagaacggcgagcgcagcggggcccgguccaagcagcgccggccccagggccugcccaacaacacggcgagcugguucaccgcccucacccagcacggcaaggaggaccugaaguucccgcgcgggcagggcgugcccaucaacaccaacuccagccccgacgaccagaucggguacuaccggcgcgccacgcggcgcauccggggcggggacggcaagaugaaggaccugagcccccgcugguacuucuacuaccucggcaccgggccggaggccggccugcccuacggggccaacaaggacggcaucaucugggucgcgaccgagggcgcccugaacacccccaaguaccacaucgggacgcggaaccccgccaacaacgccgcgaucgugcuccagcugccgcagggcaccacccugcccaagggguucuacgccgagggcagccgcgggggcucccaggccagcucccggagcuccagccgcucccggaacagccuccgcaacuccacccccggcagcagccgggggacgucccccgcccgcauggccggcaacgggggcgacgcggcccuggcccugcuccugcuggaccggcucaaccagcuggagagcaagauguccgggaagggccagcagcagcagggccagaccgugaccaagaaguccgccgccgaggcguccaagaagccgcgccagaagcgcaccgccacgaaggccuacaacgucacccaggccuucgggcggcgcggccccgagcagacccaggggaacuucggcgaccaggagcugauccggcaggggaccgacuacaagcacuggccccagaucgcccaguucgcgcccagcgccuccgccuucuucggcaugagccgcaucggcauggaggugacgccguccgggaccuggcucaccuacaccggcgccaucaagcuggacgacaaggaccccaacuucaaggaccaggugauccugcucaacaagcacaucgacgccuacaagacguucccgcccaccgagcccaagaaggacaagaagaagaaggcggacgagacccaggcccugccccagcggcagaagaagcagcagaccgucacgcugcuccccgccgccgaccuggacgacuucagcaagcagcugcagcaguccaugagcuccgcggacagcacccaggccuga

SEQ ID NO: 17482 - RNA, 1260 nt, Artificial Sequence
  SARS-CoV-2__MT576057.1__nucleocapsid protein (N) CDS gc
augagcgacaacggcccccagaaccagcgcaacgccccgcggaucaccuucgggggccccuccgacagcaccggguccaaccagaacggcgagcgcagcggggcccgguccaagcagcgccggccccagggccugcccaacaacacggcgagcugguucaccgcccucacccagcacggcaaggaggaccugaaguucccgcgcgggcagggcgugcccaucaacaccaacuccagccccgacgaccagaucggguacuaccggcgcgccacgcggcgcauccggggcggggacggcaagaugaaggaccugagcccccgcugguacuucuacuaccucggcaccgggccggaggccggccugcccuacggggccaacaaggacggcaucaucugggucgcgaccgagggcgcccugaacacccccaaggaccacaucgggacgcggaaccccgccaacaacgccgcgaucgugcuccagcugccgcagggcaccacccugcccaagggguucuacgccgagggcagccgcgggggcucccaggccagcucccggagcuccagccgcucccggaacagccuccgcaacuccacccccggcagcagccgggggacgucccccgcccgcauggccggcaacgggggcgacgcggcccuggcccugcuccugcuggaccggcucaaccagcuggagagcaagauguccgggaagggccagcagcagcagggccagaccgugaccaagaaguccgccgccgaggcguccaagaagccgcgccagaagcgcaccgccacgaaggccuacaacgucacccaggccuucgggcggcgcggccccgagcagacccaggggaacuucggcgaccaggagcugauccggcaggggaccgacuacaaguacuggccccagaucgcccaguucgcgcccagcgccuccgccuucuucggcaugagccgcaucggcauggaggugacgccguccgggaccuggcucaccuacaccggcgccaucaagcuggacgacaaggaccccaacuucaaggaccaggugauccugcucaacaagcacaucgacgccuacaagacguucccgcccaccgagcccaagaaggacaagaagaagaaggcggacgagacccaggcccugccccagcggcagaagaagcagcagaccgucacgcugcuccccgccgccgaccuggacgacuucagcaagcagcugcagcaguccaugagcuccgcggacagcacccaggccuga

SEQ ID NO: 17483 - RNA, 1260 nt, Artificial Sequence
  SARS-CoV-2__MT520263.1__nucleocapsid protein (N) CDS gc
augagcgacaacggcccccagaaccagcgcaacgccccgcggaucaccuucgggggccccuccgacagcaccggguccaaccagaacggcgagcgcagcggggcccgguccaagcagcgccggccccagggccugcccaacaacacggcgagcugguucaccgcccucacccagcacggcaaggaggaccugaaguucccgcgcgggcagggcgugcccaucaacaccaacuccagccccgacgaccagaucggguacuaccggcgcgccacgcggcgcauccggggcggggacggcaagaugaaggaccugagcccccgcugguacuucuacuaccucggcaccgggccggaggccggccugcccuacggggccaacaaggacggcaucaucugggucgcgaccgagggcgcccugaacacccccaaggaccacaucgggacgcggaaccccgccaacaacgccgcgaucgugcuccagcugccgcagggcaccacccugcccaagggguucuacgccgagggcucccgcgggggcucccaggccagcucccggagcuccagccgcucccggaacagcucccgcaacagcacccccggcagcucccgggggacgagccccgcccgcauggccggcaacgggggcgacgcggcccucgcccugcugcuccuggaccggcugaaccaccucgaguccaagaugagcgggaagggccagcagcagcagggccagaccgugaccaagaaguccgccgccgaggcgagcaagaagccgcgccagaagcgcaccgccacgaaggccuacaacgucacccaggccuucgggcggcgcggccccgagcagacccaggggaacuucggcgaccaggagcugauccggcaggggaccgacuacaagcacuggccccagaucgcccaguucgcgcccuccgccagcgccuucuucggcaugucccgcaucggcauggaggugacgccgagcgggaccuggcugaccuacaccggcgccaucaagcucgacgacaaggaccccaacuucaaggaccaggugauccugcugaacaagcacaucgacgccuacaagacguucccgcccaccgagcccaagaaggacaagaagaagaaggcggacgagacccaggcccucccccagcggcagaagaagcagcagaccgucacgcugcugcccgccgccgaccucgacgacuucuccaagcagcugcagcagagcauguccagcgcggacuccacccaggccuga

SEQ ID NO: 17484 - RNA, 1260 nt, Artificial Sequence
  SARS-CoV-2__MT520301.1__nucleocapsid protein (N) CDS gc
augagcgacaacggcccccagaaccagcgcaacgccccgcggaucaccuucgggggccccuccgacagcaccggguccaaccagaacggcgagcgcagcggggcccgguccaagcagugccgcccccagggccugcccaacaacacggcgagcugguucaccgcccucacccagcacggcaaggaggaccugaaguucccgcgggggcagggcgugcccaucaacaccaacuccagccccgacgaccagaucggguacuaccgccgggccacgcgccggauccgcggcggggacggcaagaugaaggaccugagcccccggugguacuucuacuaccucggcaccgggccggaggccggccugcccuacggggccaacaaggacggcaucaucugggucgcgaccgagggcgcccugaacacccccaaggaccacaucgggacgcgcaaccccgccaacaacgccgcgaucgugcuccagcugccgcagggcaccacccugcccaagggguucuacgccgagggcucccgcgggggcucccaggccagcucccggagcuccagccggucccgcaacagcucccggaacagcacccccggcagcucccgcgggacgagccccgcccggauggccggcaacgggggcgacgcggcccucgcccugcugcuccuggaccgccugaaccagcucgaguccaagaugagcgggaagggccagcagcagcagggccagaccgugaccaagaaguccgccgccgaggcgagcaagaagccgcggcagaagcgcaccgccacgaaggccuacaacgucacccaggccuucgggcgccggggccccgagcagacccaggggaacuucggcgaccaggagcugauccgccaggggaccgacuacaagcacuggccccagaucgcccaguucgcgcccuccgccagcgccuucuucggcaugucccggaucggcauggaggugacgccgagcgggaccuggcugaccuacaccggcgccaucaagcucgacgacaaggaccccaacuucaaggaccaggugauccugcugaacaagcacaucgacgccuacaagacguucccgcccaccgagcccaagaaggacaagaagaagaaggcggacgagacccaggcccucccccagcgccagaagaagcagcagaccgucacgcugcugcccgccgccgaccucgacgacuucuccaagcagcugcagcagagcauguccagcgcggacuccacccaggccuga

SEQ ID NO: 17485 - RNA, 1260 nt, Artificial Sequence
  SARS-CoV-2__MT520331.1__nucleocapsid protein (N) CDS gc
augagcgacaacggcccccagaaccagcgcaacgccccgcggaucaccuucgggggccccuccgacagcaccggguccaaccagaacggcgagcgcagcggggcccgguccaagcagcgccggccccagggccugcccaacaacacggcgagcugguucaccgcccucacccagcacggcaaggaggaccugaaguucccgcgcgggcagggcgugcccaucaacaccaacuccagccccgacgaccagaucggguacuaccggcgcgccacgcggcgcauccggggcggggacggcaagaugaaggaccugagcccccgcugguacuucuacuaccucggcaccgggccggaggccggccugcccuacggggccaacaaggacggcaucaucugggucgcgaccgagggcgcccugaacacccccaaggaccacaucgggacgcggaaccccgccaacaacgccgcgaucgugcuccagcugccgcagggcaccacccugcccaagggguucuacgccgagggcucccgcgggggcucccaggccagcucccggagcuccagccgcucccggaacagcucccgcaacagcacccccggcagcucccgggggacgagccccgcccgcauggccggcaacgggggcgacgcggcccucgcccugcugcuccuggaccggcugaaccagcucgaguccaagaugagcgggaagggccagcagcagcagggccagaccgugaccaagaaguccgccgccgaggcggccaagaagccgcgccagaagcgcaccgccacgaaggccuacaacgucacccaggccuucgggcggcgcggccccgagcagacccaggggaacuucggcgaccaggagcugauccggcaggggaccgacuacaagcacuggccccagaucgcgcaguucgcccccagcgccuccgccuucuucggcaugagccgcaucggcauggaggugacgccguccgggaccuggcugaccuacaccggcgccaucaagcucgacgacaaggaccccaacuucaaggaccaggugauccugcugaacaagcacaucgacgcguacaagacguucccgcccaccgagcccaagaaggacaagaagaagaaggccgacgagacccaggcccucccccagcggcagaagaagcagcagaccgucacgcugcugcccgccgcggaccucgacgacuucagcaagcagcugcagcaguccaugagcuccgccgacagcacccaggccuga

SEQ ID NO: 17486 - RNA, 1260 nt, Artificial Sequence
  SARS-CoV-2__MT520343.1__nucleocapsid protein (N) CDS gc
augagcgacaacggcccccagaaccagcgcaacgccccgcggaucaccuucgggggccccuccuacagcaccggguccaaccagaacggcgagcgcagcggggcccgguccaagcagcgccggccccagggccugcccaacaacacggcgagcugguucaccgcccucacccagcacggcaaggaggaccugaaguucccgcgcgggcagggcgugcccaucaacaccaacuccagccccgacgaccagaucggguacuaccggcgcgccacgcggcgcauccggggcggggacggcaagaugaaggaccugagcccccgcugguacuucuacuaccucggcaccgggccggaggccggccugcccuacggggccaacaaggacggcaucaucugggucgcgaccgagggcgcccugaacacccccaaggaccacaucgggacgcggaaccccgccaacaacgccgcgaucgugcuccagcugccgcagggcaccacccugcccaagggguucuacgccgagggcucccgcgggggcucccaggccagcucccggagcuccagccgcucccggaacagcucccgcaacagcacccccggcagcucccgggggacgagccccgcccgcauggccggcaacgggggcgacgcggcccucgcccugcugcuccuggaccggcugaaccagcucgaguccaagaugagcgggaagggccagcagcagcagggccagaccgugaccaagaaguccgccgccgaggcgagcaagaagccgcgccagaagcgcaccgccacgaaggccuacaacgucacccaggccuucgggcggcgcggccccgagcagacccaggggaacuucggcgaccaggagcugauccggcaggggaccgacuacaagcacuggccccagaucgcccaguucgcgcccuccgccagcgccuucuucggcaugucccgcaucggcauggaggugacgccgagcgggaccuggcugaccuacaccggcgccaucaagcucgacgacaaggaccccaacuucaaggaccaggugauccugcugaacaagcacaucgacgccuacaagacguucccgcccaccgagcccaagaaggacaagaagaagaaggcggacgagacccaggcccucccccagcggcagaagaagcagcagaccgucacgcugcugcccgccgccgaccucgacgacuucuccaagcagcugcagcagagcauguccagcgcggacuccacccaggccuga

SEQ ID NO: 17487 - RNA, 1260 nt, Artificial Sequence
  SARS-CoV-2__MT520498.1__nucleocapsid protein (N) CDS gc
augagcgacaacggcccccagaaccagcgcaacgccccgcggaucaccuucgggggccccuccgacagcaccggguccaaccagaacggcgagcgcagcggggcccgguccaagcagcgccggccccagggccugcccaacaacacggcgagcugguucaccgcccucacccagcacggcaaggaggaccugaaguucccgcgcgggcagggcgugcccaucaacaccaacuccagccccgacgaccagaucggguacuaccggcgcgccacgcggcgcauccggggcggggacggcaagaugaaggaccugagcccccgcugguacuucuacuaccucggcaccgggccggaggccggccugcccuacggggccaacaaggacggcaucaucugggucgcgaccgagggcgcccugaacacccccaaggaccacaucgggacgcggaaccccgccaacaacgccgcgaucgugcuccagcugccgcagggcaccacccugcccaagggguucuacgccgagggcucccgcgggggcucccaggccagcucccggagcuccagccgcucccggaacagcucccgcaacagcacccccggcagcucccgggggacgagccccgcccgcauggccggcaacgggggcgacgcggcccucgcccugcugcuccuggaccggcugaaccagcucgaguccaagaugagcgugaaggggcagcagcagcagggccagaccgucaccaagaaguccgccgccgaggcgagcaagaagccgcgccagaagcgcaccgccacgaaggccuacaacgugacccaggccuucggccggcgcgggcccgagcagacccagggcaacuucggggaccaggagcugauccggcagggcaccgacuacaagcacuggccccagaucgcccaguucgcgcccuccgccagcgccuucuucgggaugucccgcaucggcauggaggugacgccgagcggcaccuggcugaccuacaccggggccaucaagcucgacgacaaggaccccaacuucaaggaccaggucauccugcugaacaagcacaucgacgccuacaagacguucccgcccaccgagcccaagaaggacaagaagaagaaggcggacgagacccaggcccucccccagcggcagaagaagcagcagaccgugacgcugcugcccgccgccgaccucgacgacuucuccaagcagcugcagcagagcauguccagcgcggacuccacccaggccuga

SEQ ID NO: 17488 - RNA, 1260 nt, Artificial Sequence
  SARS-CoV-2__MT560706.1__nucleocapsid protein (N) CDS gc
augagcgacaacggcacccagaaccagcgcaacgcgccccggaucaccuucgggggcccguccgacagcacgggguccaaccagaacggcgagcgcagcggggcccgguccaagcagcgccggccccagggccugcccaacaacaccgccagcugguucaccgcccucacccagcacggcaaggaggaccugaaguucccccgcgggcagggcgugccgaucaacacgaacuccagccccgacgaccagaucggguacuaccggcgcgccacccggcgcauccggggcggggacggcaagaugaaggaccugagcccccgcugguacuucuacuaccucggcaccgggcccgaggccggccugccguacggggccaacaaggacggcaucaucugggucgcgaccgagggcgcccugaacacgcccaaggaccacaucgggacccggaaccccgccaacaacgccgcgaucgugcuccagcugccccagggcaccacccugccgaagggguucuacgccgagggcucccgcgggggcucccaggccagcucccggagcuccagccgcucccggaacagcucccgcaacagcacgcccggcagcucccgggggaccagccccgcccgcauggccggcaacgggggcgacgcggcccucgcccugcugcuccuggaccggcugaaccagcucgaguccaagaugagcgggaagggccagcagcagcagggccagaccgugaccaagaaguccgccgccgaggcgagcaagaagccccgccagaagcgcacggccaccaaggccuacaacgucacccaggccuucgggcggcgcggcccggagcagacccaggggaacuucggcgaccaggagcugauccggcaggggacggacuacaagcacuggccccagaucgcccaguucgcgcccuccgccagcgccuucuucggcaugucccgcaucggcauggaggugacccccagcgggaccuggcugaccuacacgggcgccaucaagcucgacgacaaggacccgaacuucaaggaccaggugauccugcugaacaagcacaucgacgccuacaagaccuucccgcccaccgagcccaagaaggacaagaagaagaaggcggacgagacccaggcccucccccagcggcagaagaagcagcagacggucacccugcugcccgccgccgaccucgacgacuucuccaagcagcugcagcagagcauguccagcgcggacuccacccaggccuga

SEQ ID NO: 17489 - RNA, 1260 nt, Artificial Sequence
  SARS-CoV-2__MT566435.1__nucleocapsid protein (N) CDS gc
augagcgacaacggcccccagaaccagcgcaacgccccgcggaucaccuucgggggccccuccgacagcaccggguccaaccagaacggcgagcgcagcggggcccgguccaagcagcgccggccccagggccugcccaacaacacggcgagcugguucaccgcccucacccagcacggcaaggaggaccugaaguucccgcgcgggcagggcgugcccaucaacaccaacuccagccccgacgaccagaucggguacuaccggcgcgccacgcggcgcauccggggcggggacggcaagaugaaggaccugagcccccgcugguacuucuacuaccucggcaccgggccggaggccggccugcccuacggggccaacaaggacggcaucaucugggucgcgaccgagggcgcccugaacacccccaaggaccacaucgggacgcggaaccccgccaacaacgccgcgaucgugcuccagcugccgcagggcaccacccugcccaagggguucuacgccgagggcucccgcgggggcucccaggccagcucccggagcuccagccgcucccggaacagcucccgcaacagcacccccggcagcuccaagcggacgagccccgcccgcauggccgggaacggcggggacgcggcccucgcccugcugcuccuggaccggcugaaccagcucgaguccaagaugagcggcaaggggcagcagcagcagggccagaccgugaccaagaaguccgccgccgaggcgagcaagaagccgcgccagaagcgcaccgccacgaaggccuacaacgucacccaggccuucggccggcgcgggcccgagcagacccagggcaacuucggggaccaggagcugauccggcagggcaccgacuacaagcacuggccccagaucgcccaguucgcgcccuccgccagcgccuucuucgggaugucccgcaucggcauggaggugacgccgagcggcaccuggcugaccuacaccggggccaucaagcucgacgacaaggaccccaacuucaaggaccaggugauccugcugaacaagcacaucgacgccuacaagacguucccgcccaccgagcccaagaaggacaagaagaagaaggcgggcgagacccaggcccucccccagcggcagaagaagcagcagaccgucacgcugcugcccgccgccgaccucgacgacuucuccaagcagcugcagcagagcauguccagcgcggacuccacccaggccuga

SEQ ID NO: 17490 - RNA, 1260 nt, Artificial Sequence
  SARS-CoV-2__MT557568.1__nucleocapsid protein (N) CDS gc
augagcgacaacggcccccagaaccagcgcaacgccccgcggaucaccuucgggggccccuccgacagcaccggguccaaccagaacggcgagcgcagcggggcccuguccaagcagcggcgcccccagggccuccccaacaacacggcgagcugguucaccgcccugacccagcacggcaaggaggaccugaaguucccgcgggggcagggcgugcccaucaacaccaacuccagccccgacgaccagaucggguacuaccgccgggccacgcgccggauccgcggcggggacggcaagaugaaggaccucagcccccggugguacuucuacuaccugggcaccgggccggaggccggccugcccuacggggccaacaaggacggcaucaucugggucgcgaccgagggcgcccucaacacccccaaggaccacaucgggacgcgcaaccccgccaacaacgccgcgaucgugcugcagcugccgcagggcaccacccuccccaagggguucuacgccgagggcagccgcgggggcucccaggccagcucccggagcuccagccggucccgcaacagcucccggaacagcacccccggcagcaaccgcgggacgucccccgcccggauggccggcaacgggggcgacgcggcccuggcccugcuccugcuggaccgccucaaccagcuggagagcaagauguccgggaagggccagcagcagcagggccagaccgugaccaagaaguccgccgccgaggcguccaagaagccgcggcagaagcgcaccgccacgaaggccuacaacgucacccaggccuucgggcgccggggccccgagcagacccaggggaacuucggcgaccaggagcugauccgccaggggaccgacuacaagcacuggccccagaucgcccaguucgcgcccagcgccuccgccuucuucggcaugagccggaucggcauggaggugacgccguccgggaccuggcucaccuacaccggcgccaucaagcuggacgacaaggaccccaacuucaaggaccaggugauccugcucaacaagcacaucgacgccuacaagacguucccgcccaccgagcccaagaaggacaagaagaagaaggcggacgagacccaggcccugccccagcgccagaagaagcagcagaccgucacgcugcuccccgccgccgaccuggacgacuucagcaagcagcugcagcaguccaugagcuccgcggacagcacccaggccuga

SEQ ID NO: 17491 - RNA, 1260 nt, Artificial Sequence
  SARS-CoV-2__MT558660.1__nucleocapsid protein (N) CDS gc
augagcgacaacggcccccagaaccagcgcaacgccccgcggaucaccuucgggggccccuccgacagcaccggguccaaccagaacggcgagcgcagcggggcccgguccaagcagcgccggccccagggccugcccaacaacacggcgagcugguucaccgcccucacccagcacggcaaggaggaccugaaguucccgcgcgggcagggcgugcccaucaacaccaacuccagccccgacgaccagaucggguacuaccggcgcgccacgcggcgcauccggggcggggacggcaagaugaaggaccugagcccccgcugguacuucuacuaccucggcaccgggccggaggccggccugcccuacggggccaacaaguacggcaucaucugggucgcgaccgagggcgcccugaacacccccaaggaccacaucgggacgcggaaccccgccaacaacgccgcgaucgugcuccagcugccgcagggcaccacccugcccaagggguucuacgccgagggcucccgcgggggcucccaggccagcucccggagcuccagccgcucccggaacagcucccgcaacagcacccccggcagcucccgggggacgagccccgcccgcauggccggcaacgggggcgacgcggcccucgcccugcugcuccuggaccggcugaaccagcucgaguccaagaugagcgggaagggccagcagcagcagggccagaccgugaccaagaaguccgccgccgaggcgagcaagaagccgcgccagaagcgcaccgccacgaaggccuacaacgucacccaggccuucgggcggcgcggccccgagcagacccaggggaacuucggcgaccaggagcugauccggcaggggaccgacuacaagcacuggccccagaucgcccaguucgcgcccuccgccagcgccuucuucggcaugucccgcaucggcauggaggugacgccgagcgggaccuggcugaccuacaccggcgccaucaagcucgacgacaaggaccccaacuucaaggaccaggugauccugcugaacaagcacaucgacgccuacaagacguucccgcccaccgagcccaagaaggacaagaagaagaaggcggacgagacccaggcccucccccagcggcagaagaagcagcagaccgucacgcugcugcccgccgccgaccucgacgacuucuccaagcagcugcagcagagcauguccagcgcggacuccacccaggccuga

SEQ ID NO: 17492 - RNA, 1260 nt, Artificial Sequence
  SARS-CoV-2__MT535490.1__nucleocapsid protein (N) CDS gc
augagcgacaacggcccccagaaccagcgcaacgccccgcggaucaccuucgggggccccuccgacagcaccggguccaaccagaacggcgagcgcagcggggcccgguccaagcagcgccggccccagggccugcccaacaacacggcgagcugguucaccgcccucacccagcacggcaaggaggaccugaaguucccgcgcgggcagggcgugcccaucaacaccaacuccagccccgacgaccagaucggguacuaccggcgcgccacgcggcgcauccggggcggggacggcaagaugaaggaccugagcccccgcugguacuucuacuaccucggcaccgggccggaggccggccugcccuacggggccaacaaggacggcaucaucugggucgcgaccgagggcgcccugaacacccccaaggaccacaucgggacgcggaaccccgccaacaacgccgcgaucgugcuccagcugccgcagggcaccacccugcccaagggguucuacgccgagggcucccgcgggggcucccaggccagcucccggagcuccagccgcucccggaacagcucccgcaacagcacccccggcagcucccgggggacgagccccgcccgcauggccgugaacggcggggacgcggcccucgcccugcugcuccuggaccggcugaaccagcucgaguccaagaugagcggcaaggggcagcagcagcagggccagaccgucaccaagaaguccgccgccgaggcgagcaagaagccgcgccagaagcgcaccgccacgaaggccuacaacgugacccaggccuucggccggcgcgggcccgagcagacccagggcaacuucggggaccaggagcugauccggcagggcaccgacuacaagcacuggccccagaucgcccaguucgcgcccuccgccagcgccuucuucgggaugucccgcaucggcauggaggugacgccgagcggcaccuggcugaccuacaccggggccaucaagcucgacgacaaggaccccaacuucaaggaccaggucauccugcugaacaagcacaucgacgccuacaagacguucccgcccaccgagcccaagaaggacaagaagaagaaggcggacgagacccaggcccucccccagcggcagaagaagcagcagaccgugacgcugcugcccgccgccgaccucgacgacuucuccaagcagcugcagcagagcauguccagcgcggacuccacccaggccuga

SEQ ID NO: 17493 - RNA, 1260 nt, Artificial Sequence
  SARS-CoV-2__MT535500.1__nucleocapsid protein (N) CDS gc
augagcgacaacggcccccagaaccagcgcaacgccccgcggaucaccuucgggggccccuccgacagcaccggguccaaccagaacggcgaccgcagcggggcccgguccaagcagcgccggccccagggccugcccaacaacacggcgagcugguucaccgcccucacccagcacggcaaggaggaccugaaguucccgcgcgggcagggcgugcccaucaacaccaacuccagccccgacgaccagaucggguacuaccggcgcgccacgcggcgcauccggggcggggacggcaagaugaaggaccugagcccccgcugguacuucuacuaccucggcaccgggccggaggccggccugcccuacggggccaacaaggacggcaucaucugggucgcgaccgagggcgcccugaacacccccaaggaccacaucgggacgcggaaccccgccaacaacgccgcgaucgugcuccagcugccgcagggcaccacccugcccaagggguucuacgccgagggcucccgcgggggcucccaggccagcucccggagcuccagccgcucccggaacagcucccgcaacagcacccccggcagcucccgggggacgagccccgcccgcauggccggcaacgggggcgacgcggcccucgcccugcugcuccuggaccggcugaaccagcucgaguccaagaugagcgggaagggccagcagcagcagggccagaccgugaccaagaaguccgccgccgaggcgagcaagaagccgcgccagaagcgcaccgccacgaaggccuacaacgucacccaggccuucgggcggcgcggccccgagcagacccaggggaacuucggcgaccaggagcugauccggcaggggaccgacuacaagcacuggccccagaucgcccaguucgcgcccuccgccagcgccuucuucggcaugucccgcaucggcauggaggugacgccgagcgggaccuggcugaccuacaccggcgccaucaagcucgacgacaaggaccccaacuucaaggaccaggugauccugcugaacaagcacaucgacgccuacaagacguucccgcccaccgagcccaagaaggacaagaagaagaaggcggacgagacccaggcccucccccagcggcagaagaagcagcagaccgucacgcugcugcccgccgccgaccucgacgacuucuccaagcagcugcagcagagcauguccagcgcggacuccacccaggccuga

SEQ ID NO: 17494 - RNA, 1260 nt, Artificial Sequence
  SARS-CoV-2__MT536964.1__nucleocapsid protein (N) CDS gc
augagcgacaacggcccccagaaccagcgcaacgccccgcggaucaccuucgggggccccuccgacagcaccggguccaaccagaacggcgagcgcagcggggcccgguccaagcagcgccggccccagggccugcccaacaacacggcgagcugguucaccgcccucacccagcacggcaaggaggaccugaaguucccgcgcgggcagggcgugcccaucaacaccaacuccagccccgacgaccagaucggguacuaccggcgcgccacgcggcgcauccggggcggggacggcaagaugaaggaccugagcccccgcugguacuucuacuaccucggcaccgggccggaggccggccugcccuacggggccaacaaggacggcaucaucugggucgcgaccgagggcgcccugaccacgcccaaggaccacaucgggacccggaaccccgccaacaacgccgcgaucgugcuccagcugccgcagggcaccacccugcccaagggguucuacgccgagggcucccgcgggggcucccaggccagcucccggagcuccagccgcucccggaacagcucccgcaacagcacgcccggcagcucccgggggaccagccccgcccgcauggccggcaacgggggcgacgcggcccucgcccugcugcuccuggaccggcugaaccagcucgaguccaagaugagcgggaagggccagcagcagcagggccagaccgugaccaagaaguccgccgccgaggcgagcaagaagccgcgccagaagcgcacggccaccaaggccuacaacgucacccaggccuucgggcggcgcggccccgagcagacccaggggaacuucggcgaccaggagcugauccggcaggggacggacuacaagcacuggccccagaucgcccaguucgcgcccuccgccagcgccuucuucggcaugucccgcaucggcauggaggugaccccgagcgggaccuggcugaccuacacgggcgccaucaagcucgacgacaaggaccccaacuucaaggaccaggugauccugcugaacaagcacaucgacgccuacaagaccuucccgcccaccgagcccaagaaggacaagaagaagaaggcggacgagacccaggcccucccccagcggcagaagaagcagcagacggucacccugcugcccgccgccgaccucgacgacuucuccaagcagcugcagcagagcauguccagcgcggacuccacccaggccuga

SEQ ID NO: 17495 - RNA, 1260 nt, Artificial Sequence
  SARS-CoV-2__MT511067.1__nucleocapsid protein (N) CDS gc
augagcgacaacggcccccagaaccagcgcaacgccccgcggaucaccuucgggggccccuccgacagcaccggguccaaccagaacggcgagcgcagcggggcccgguccaagcagcgccggccccagggccugcccaacaacacggcgagcugguucaccgcccucacccagcacggcaaggaggaccugaaguucccgcgcgggcagggcgugcccaucaacaccaacuccagccccgacgaccagaucggguacuaccggcgcgccacgcggcgcauccggggcggggacggcaagaugaaggaccugagcccccgcugguacuucuacuaccucggcaccgggccggaggccggccugcccuacggggccaacaaggacggcaucaucugggucgcgaccgagggcgcccugaacacccccaaggaccacaucgggacgcggaaccccgccaacaacgccgcgaucgugcuccagcugccgcagggcaccacccugcccaagggguucuacgccgagggcucccgcgggggcucccaggccagcucccggagcuccagccgcucccggaacagcucccgcaacagcacccccggcagcucccgggggacgagccccgcccgcauggccggcaacgggggcgacgcggcccucgcccugcugcuccuggaccggcugaaccagcucgaguccaagaugagcgggaagggccagcagcagcagggccagaccgugaccaagaaguccgccgccgaggcgagcaagaagccgcgccagaagcgcaccgccacgaaggccuacaacgucacccaggccuucgggcggcgcggccccgagcagacccaggggaacuucggcgaccaggagcugauccggcaggggaccgacuacaagcacuggccccagaucgcccaguucgcgcccuccgccagcgccuucuucggcaugucccgcaucggcauggaggugacgccgagcgggaccuggcugaccuacaccggcgccaucaagcucgacgacaaggaccccaacuucaaggaccaggugauccugcugaacaagcacaucgacgccuacaagacguucccgcccaccgagcccaagaaggacaagaagaagaaggcggacgagacccaggcccucccccagcggcagaagaagcagcagaccgucacgcugcugcccgccgccgaccucgacuacuucuccaagcagcugcagcagagcauguccagcgcggacuccacccaggccuga

SEQ ID NO: 17496 - RNA, 1260 nt, Artificial Sequence
  SARS-CoV-2__MT509959.1__nucleocapsid protein (N) CDS gc
augagcgacaacggcacccagaaccagcgcaacgcccugcggaucaccuucgggggccccuccgacagcacgggguccaaccagaacggcgagcgcagcggggcccgguccaagcagcgccggccgcagggccuccccaacaacaccgcgagcugguucaccgcccugacccagcacggcaaggaggaccugaaguucccccgcgggcagggcgugcccaucaacacgaacuccagcccggacgaccagaucggguacuaccggcgcgccacccggcgcauccggggcggggacggcaagaugaaggaccucagcccccgcugguacuucuacuaccugggcaccgggcccgaggccggccugcccuacggggccaacaaggacggcaucaucugggucgcgaccgagggcgcccucaacacgccgaaggaccacaucgggacccggaaccccgccaacaacgccgcgaucgugcugcagcugccccagggcaccacccuccccaagggguucuacgccgagggcucccgcgggggcucccaggccagcucccggagcuccagccgcucccggaacagcucccgcaacagcacgccgggcagcucccgggggaccagccccgcccgcauggccggcaacgggggcgacgcggcccuggcccugcuccugcuggaccggcucaaccagcuggaguccaagaugagcgggaagggccagcagcagcagggccagaccgugaccaagaaguccgccgccgaggcgagcaagaagccccgccagaagcgcacggccaccaaggccuacaacgucacccaggccuucgggcggcgcggccccgagcagacccaggggaacuucggcgaccaggagcugauccggcaggggacggacuacaagcacuggccgcagaucgcccaguucgcgcccuccgccagcgccuucuucggcaugucccgcaucggcauggaggugacccccagcgggaccuggcucaccuacacgggcgccaucaagcuggacgacaaggaccccaacuucaaggaccaggugauccugcucaacaagcacaucgacgccuacaagaccuucccgcccaccgagcccaagaaggacaagaagaagaaggcggacgagacccaggcccugccccagcggcagaagaagcagcagacggucacccugcucccggccgccgaccuggacgacuucuccaagcagcugcagcagagcauguccagcgcggacuccacccaggccuga

SEQ ID NO: 17497 - RNA, 1260 nt, Artificial Sequence
  SARS-CoV-2__MT509497.1__nucleocapsid protein (N) CDS gc
augagcgacaacggcccccagaaccagcgcaacgcccugcggaucaccuucgggggcccguccgacagcaccggguccaaccagaacggcgagcgcagcggggcccgguccaagcagcgccggccccagggccuccccaacaacacggcgagcugguucaccgcccugacccagcacggcaaggaggaccugaaguucccccgcgggcagggcgugccgaucaacaccaacuccagccccgacgaccagaucggguacuaccggcgcgccacgcggcgcauccggggcggggacggcaagaugaaggaccucagcccccgcugguacuucuacuaccugggcaccgggcccgaggccggccugccguacggggccaacaaggacggcaucaucugggucgcgaccgagggcgcccucaacacccccaaggaccacaucgggacgcggaaccccagcaacaacgccgccaucgugcugcagcugccccagggcaccacccucccgaagggguucuacgcggagggcucccgcgggggcagccaggccuccagccgguccagcucccgcagccggaacuccagccgcaacagcacccccggcuccagccgggggacgucccccgcccgcauggccggcaacgggggcgacgccgcgcuggcccugcuccugcuggaccggcucaaccagcuggagagcaagauguccgggaagggccagcagcagcagggccagaccgugaccaagaaguccgccgccgaggccuccaagaagccccgccagaagcgcaccgcgacgaaggccuacaacgucacccaggccuucgggcggcgcggcccggagcagacccaggggaacuucggcgaccaggagcugauccggcaggggaccgacuacaagcacuggccccagaucgcccaguucgcccccagcgcguccgccuucuucggcaugagccgcaucggcauggaggugacgcccuccgggaccuggcucaccuacaccggcgccaucaagcuggacgacaaggacccgaacuucaaggaccaggugauccugcucaacaagcacaucgacgccuacaagacguucccgcccaccgagcccaagaaggacaagaagaagaaggccgacgagacccaggcgcugccccagcggcagaagaagcagcagaccgucacgcugcuccccgccgccgaccuggacgacuucagcaagcagcugcagcaguccaugagcuccgccgacagcacccaggcguga

SEQ ID NO: 17498 - RNA, 1260 nt, Artificial Sequence
  SARS-CoV-2__MT509498.1__nucleocapsid protein (N) CDS gc
augagcgacaacggcccccagaaccagcgcaacgccccgcggaucaccuucgggggccccuccgacagcaccggguccaaccagaacggcgagcgcagcggggcccgguccaagcagcgccggccccagggccugcccaacaacacggcgagcugguucaccgcccucacccagcacggcaaggaggaccugaaguucccgcgcgggcagggcgugcccaucaacaccaacuccagccccgacgaccagaucggguacuaccggcgcgccacgcggcgcauccggggcggggacggcaagaugaaggaccugagcccccgcugguacuucuacuaccucggcaccgggccggaggccggccugcccuacggggccaacaaggacggcaucaucugggucgcgaccgagggcgcccugaacacccccaaggaccacaucgggacgcggaaccccgccaacaacgccgcgaucgugcuccagcugccgcagggcaccacccugcccaagggguucuacgccgagggcagccgcgggggcucccaggccagcucccggagcuccagccgcucccggaacagccuccgcaacuccacccccggcagcagccgggggacgucccccgcccgcauggccggcaacgggggcgacgcggcccuggcccugcuccugcuggaccggcucaaccagcuggagagcaagauguccgggaagggccagcagcagcagggccagaccgugaccaagaaguccgccgccgaggcguccaagaagccgcgccagaagcgcaccgccacgaaggccuacaacgucacccaggccuucgggcggcgcggccccgagcagacccaggggaacuucggcgaccaggagcugauccggcaggggaccgacuacaagcacuggccccagaucgcccaguucgcgcccagcgccuccgccuucuucggcaugagccgcaucggcauggaggugacgccguccgggaccuggcucaccuacaccggcgccaucaagcuggacgacaaggaccccaacuucaaguaccaggugauccugcucaacaagcacaucgacgccuacaagacguucccgcccaccgagcccaagaaggacaagaagaagaaggcggacgagacccaggcccugccccagcggcagaagaagcagcagaccgucacgcugcuccccgccgccgaccuggacgacuucagcaagcagcugcagcaguccaugagcuccgcggacagcacccaggccuga

SEQ ID NO: 17499 - RNA, 1260 nt, Artificial Sequence
  SARS-CoV-2__MT506566.1__nucleocapsid protein (N) CDS gc
augagcgacaacggcccccagaaccagcgcaacgccccgcacaucaccuucgggggccccuccgacagcaccggguccaaccagaacggcgagcggagcggggcccgcuccaagcagcggcgcccccagggccugcccaacaacacggcgagcugguucaccgcccucacccagcacggcaaggaggaccugaaguucccgcgggggcagggcgugcccaucaacaccaacuccagccccgacgaccagaucggguacuaccgccgggccacgcgccggauccgcggcggggacggcaagaugaaggaccugagcccccggugguacuucuacuaccucggcaccgggccggaggccggccugcccuacggggccaacaaggacggcaucaucugggucgcgaccgagggcgcccugaacacccccaaggaccacaucgggacgcgcaaccccgccaacaacgccgcgaucgugcuccagcugccgcagggcaccacccugcccaagggguucuacgccgagggcucccgcgggggcucccaggccagcucccggagcuccagccggucccgcaacagcucccggaacagcacccccggcagcucccgcgggacgagccccgcccggauggccggcaacgggggcgacgcggcccucgcccugcugcuccuggaccgccugaaccagcucgaguccaagaugagcgggaagggccagcagcagcagggccagaccgugaccaagaaguccgccgccgaggcgagcaagaagccgcggcagaagcgcaccgccacgaaggccuacaacgucacccaggccuucgggcgccggggccccgagcagacccaggggaacuucggcgaccaggagcugauccgccaggggaccgacuacaagcacuggccccagaucgcccaguucgcgcccuccgccagcgccuucuucggcaugucccggaucggcauggaggugacgccgagcgggaccuggcugaccuacaccggcgccaucaagcucgacgacaaggaccccaacuucaaggaccaggugauccugcugaacaagcacaucgacgccuacaagacguucccgcccaccgagcccaagaaggacaagaagaagaaggcggacgagacccaggcccucccccagcgccagaagaagcagcagaccgucacgcugcugcccgccgccgaccucgacgacuucuccaagcagcugcagcagagcauguccagcgcggacuccacccaggccuga

SEQ ID NO: 17500 - RNA, 1260 nt, Artificial Sequence
  SARS-CoV-2__MT502774.1__nucleocapsid protein (N) CDS gc
augagcgacaacggcccccagaaccagcgcaacgccccgcggaucaccuucgggggccccuccgacagcaccggguccaaccagaacggcgagcgcagcggggcccgguccaagcagcgccggccccagggccugcccaacaacacggcgagcugguucaccgcccucacccagcacggcaaggaggaccugaaguucccgcgcgggcagggcgugcccaucaacaccaacuccagccccgacgaccagaucggguacuaccggcgcgccacgcggcgcauccggggcggggacggcaagaugaaggaccugagcccccgcugguacuucuacuaccucggcaccgggccggaggccggccugcccuacggggccaacaaggacggcaucaucugggucgcgaccgagggcgcccugaacacccccaaggaccacaucgggacgcggaaccccgccaacaacgccgcgaucgugcuccagcugccgcagggcaccacccugcccaagggguucuacgccgagggcagccgcgggggcucccaggccagcucccggagcuccagccgcucccggaacagcucccgcaacagcacccccggcagcaaccgggggacgucccccgcccgcauggccggcaacgggggcgacgcggcccucgcccugcugcuccuggaccggcugaaccagcucgagagcaagauguccgggaagggccagcagcagcagggccagaccgugaccaagaaguccgccgccgaggcguccaagaagccgcgccagaagcgcaccgccacgaaggccuacaacgucacccaggccuucgggcggcgcggccccgagcagacccaggggaacuucggcgaccaggagcugauccggcaggggaccgacuacaagcacuggccccagaucgcccaguucgcgcccagcgccuccgccuucuucggcaugagccgcaucggcauggaggugacgccguccgggaccuggcugaccuacaccggcgccaucaagcucgacgacaaggaccccaacuucaaggaccaggugauccugcugaacaagcacaucgacgccuacaagacguucccgcccaccgagcccaagaaggacaagaacaagaaggcggacgagacccaggcccucccccagcggcagaagaagcagcagaccgucacgcugcugcccgccgccgaccucgacgacuucagcaagcagcugcagcaguccaugagcuccgcggacagcacccaggccuga

SEQ ID NO: 17501 - RNA, 1260 nt, Artificial Sequence
  SARS-CoV-2__MT496974.1__nucleocapsid protein (N) CDS gc
augagcgacaacggcccccagaaccagcgcaacgccccgcggaucaccuucgggggccccuccgacagcaccggguccaaccagaacggcgagcgcagcggggcccgguccaagcagcgccggccccagggccugcccaacaacacggcgagcugguucaccgcccucacccagcacggcaaggaggaccugaaguucccgcgcgggcagggcgugcccaucaacaccaacuccagccccgacgaccagaucggguacuaccggcgcgccacgcggcgcauccggggcggggacggcaagaugaaggaccugagcccccgcugguacuucuacuaccucggcaccgggccggaggccggccugcccuacggggccaacaaggacggcaucaucugggucgcgaccgagggcgcccugaacacccccaaggaccacaucgggacgcggaaccccgccaacaacgccgcgaucgugcuccagcugccgcagggcaccacccugcccaagggguucuacgccgagggcagccgcgggggcucccaggccagcucccggagcuccagccgcucccggaacagccuccgcaacuccacccccggcagcagccgggggacgucccccgcccgcauggccggcaacgggggcgacgcggcccuggcccugcuccugcuggaccggcucaaccagcuggagagcaagauguccgggaagggccagcagcagcagggccagaccgugaccaagaaguccgccgccgaggcguccaagaagccgcgccagaagcgcaccgccacgaaggccuacaacgucacccaggccuucgggcggcgcggccccgagcagacccaggggaacuucggcgaccaggagcugauccggcaggggaccgacuacaagcacuggccccagaucgcccaguucgcgcccagcgccuccgccuucuucggcaugagccgcaucggcauggaggugacgccguccgggaccuggcucaccuacaccggcgccaucaagcuggacgacaaggaccccaacuucaaggaccaggugauccugcucaacaagcacaucgacgccuacaagaucuucccgcccacggagcccaagaaggacaagaagaagaaggcggacgagacccaggcccugccccagcggcagaagaagcagcagaccgucacccugcuccccgccgccgaccuggacgacuucagcaagcagcugcagcaguccaugagcuccgcggacagcacgcaggccuga

SEQ ID NO: 17502 - RNA, 1260 nt, Artificial Sequence
  SARS-CoV-2__MT496976.1__nucleocapsid protein (N) CDS gc
augagcgacaacggcccccagaaccagcgcaacgccccgcggaucaccuucgggggccccuccgacagcaccggguccaaccagaacggcgagcgcagcggggcccgguccaagcagcgccggccccagggccugcccaacaacacggcgagcugguucaccgcccucacccagcacggcaaggaggaccugaaguucccgcgcgggcagggcgugcccaucaacaccaacuccagccccgacgaccagaucggguacuaccggcgcgccacgcggcgcauccggggcggggacggcaagaugaaggaccugagcccccgcugguacuucuacuaccucggcaccgggccggaggccggccugcccuacggggccaacaaggacggcaucaucugggucgcgaccgagggcgcccugaacacccccaaggaccacaucgggacgcggaaccccgccaacaacgccgcgaucgugcuccagcugccgcagggcaccacccugcccaagggguucuacgccgagggcucccgcgggggcucccaggccagcucccggagcuccagccgcucccucaacagcucccggaacagcacccccggcagcucccgcgggacgagccccgcccggauggccggcaacgggggcgacgcggcccuggcccugcuccugcuggaccgccucaaccagcuggaguccaagaugagcgggaagggccagcagcagcagggccagaccgugaccaagaaguccgccgccgaggcgagcaagaagccgcggcagaagcgcaccgccacgaaggccuacaacgucacccaggccuucgggcgccggggccccgagcagacccaggggaacuucggcgaccaggagcugauccgccaggggaccgacuacaagcacuggccccagaucgcccaguucgcgcccuccgccagcgccuucuucggcaugucccggaucggcauggaggugacgccgagcgggaccuggcucaccuacaccggcgccaucaagcuggacgacaaggaccccaacuucaaggaccaggugauccugcucaacaagcacaucgacgccuacaagacguucccgcccaccgagcccaagaaggacaagaagaagaaggcggacgagacccaggcccugccccagcgccagaagaagcagcagaccgucacgcugcuccccgccgccgaccuggacgacuucuccaagcagcugcagcagagcauguccagcgcggacuccacccaggccuga

SEQ ID NO: 17503 - RNA, 1260 nt, Artificial Sequence
  SARS-CoV-2__MT496984.1__nucleocapsid protein (N) CDS gc
augagcgacaacggcccccagaaccagcgcaacgccccgcggaucaccuucgggggccccuccgacagcaccggguccaaccagaacggcgagcgcagcggggcccgguccaagcagcgccggccccagggccugcccaacaacacggcgagcugguucaccgcccucacccagcacggcaaggaggaccugaaguucccgcgcgggcagggcgugcccaucaacaccaacuccagccccgacgaccagaucggguacuaccggcgcgccacgcggcgcauccggggcggggacggcaagaugaaggaccugagcccccgcugguacuucuacuaccucggcaccgggccggaggccggccugcccuacggggccaacaaggacggcaucaucugggucgcgaccgagggcgcccugaacacccccaaggaccacaucgggacgcggaaccccgccaacaacgccgcgaucgugcuccagcugccgcagggcaccacccugcccaagggguucuacgccgagggcucccgcgggggcucccaggccagcucccggagcuccagccgcucccggaacagcucccgcaacagcacccccggcagcucccgggggacgagccccgcccgcauggccggcaacgggggcgacgcggcccucgcccugcugcuccuggaccggcugaaccagcucgaguccaagaugagcgggaagggccagcagcagcagggccagaccgugaccaagaaguccgccgccgaggcgagcaagaagccgcgccagaagcgcaccgccacgaaggccuacaacgucacccaggccuucgggcggcgcggccccgagcagacccaggggaacuucggcgaccaggagcugauccggcaggggaccgacuacaagcacuggucccagaucgcccaguucgcgcccagcgccuccgccuucuucggcaugagccgcaucggcauggaggugacgcccuccgggaccuggcugaccuacaccggcgccaucaagcucgacgacaaggacccgaacuucaaggaccaggugauccugcugaacaagcacaucgacgccuacaagacguucccgcccaccgagcccaagaaggacaagaagaagaaggcggacgagacccaggcccucccccagcggcagaagaagcagcagaccgucacgcugcugcccgccgccgaccucgacgacuucagcaagcagcugcagcaguccaugagcuccgcggacagcacccaggccuga

SEQ ID NO: 17504 - RNA, 1260 nt, Artificial Sequence
  SARS-CoV-2__MT496986.1__nucleocapsid protein (N) CDS gc
augagcgacaacggcccccagaaccagcgcaacgccccgcggaucaccuucgggggccccuccgacagcaccggguccaaccagaacggcgagcgcagcggggcccgguccaagcagcgccggccccagggccugcccaacaacacggcgagcugguucaccgcccucacccagcacggcaaggaggaccugaaguucccgcgcgggcagggcgugcccaucaacaccaacuccagccccgacgaccagaucggguacuaccggcgcgccacgcggcgcauccggggcggggacggcaagaugaaggaccugagcccccgcugguacuucuacuaccucggcaccgggccggaggcccggcugcccuacggcgccaacaaggacgggaucaucugggucgcgaccgagggcgcccugaacacccccaaggaccacaucggcacgcgcaaccccgccaacaacgccgcgaucgugcuccagcugccgcaggggaccacccugcccaagggcuucuacgccgaggggagccggggcgggucccaggccagcucccgcagcuccagccggucccgcaacagccuccggaacuccacccccggcagcagccgcggcacgucccccgcccggauggccgggaacggcggggacgcggcccuggcccugcuccugcuggaccgccucaaccagcuggagagcaagauguccggcaaggggcagcagcagcagggccagaccgugaccaagaaguccgccgccgaggcguccaagaagccgcgccagaagcggaccgccacgaaggccuacaacgucacccaggccuucggccgccgggggcccgagcagacccagggcaacuucggggaccaggagcugauccgccagggcaccgacuacaagcacuggccccagaucgcccaguucgcgcccagcgccuccgccuucuucgggaugagccggaucggcauggaggugacgccguccggcaccuggcucaccuacaccggggccaucaagcuggacgacaaggaccccaacuucaaggaccaggugauccugcucaacaagcacaucgacgccuacaagacguucccgcccaccgagcccaagaaggacaagaagaagaaggcggacgagacccaggcccugccccagcgccagaagaagcagcagaccgucacgcugcuccccgccgccgaccuggacgacuucagcaagcagcugcagcaguccaugagcuccgcggacagcacccaggccuga

SEQ ID NO: 17505 - RNA, 1260 nt, Artificial Sequence
  SARS-CoV-2__MT477845.1__nucleocapsid protein (N) CDS gc
augagcgacaacggcccccagaaccagcgcaacgccccgcggaucaccuucgggggccccuccgacagcaccggguccaaccagaacggcgagcgcagcggggcccgguccaagcagcgccggccccagggccugcccaacaacacggcgagcugguucaccgcccucacccagcacggcaaggaggaccugaaguucccgcgcgggcagggcgugcccaucaacaccaacuccagccccgacgaccagaucggguacuaccggcgcgccacgcggcgcauccggggcggggacggcaagaugaaggaccugagcccccgcugguacuucuacuaccucggcaccgggccggaggccggccugcccuacggggccaacaaggacggcaucaucugggucgcgaccgagggcgcccugaacacccccaaggaccacaucgggacgcggaaccccgccaacaacgccgcgaucgugcuccagcugccgcagggcaccacccugcccaagggguucuacgccgagggcucccgcgggggcucccaggccagcucccggagcuccagccgcucccucaacagcucccggaacagcacccccggcagcuccaagcgcacgagccccgcccggauggccgggaacggcggggacgcggcccuggcccugcuccugcuggaccgccucaaccagcuggaguccaagaugagcggcaaggggcagcagcagcagggccagaccgugaccaagaaguccgccgccgaggcgagcaagaagccgcggcagaagcgcaccgccacgaaggccuacaacgucacccaggccuucggccgccgggggcccgagcagacccagggcaacuucggggaccaggagcugauccgccagggcaccgacuacaagcacuggccccagaucgcccaguucgcgcccuccgccagcgccuucuucgggaugucccggaucggcauggaggugacgccgagcggcaccuggcucaccuacaccggggccaucaagcuggacgacaaggaccccaacuucaaggaccaggugauccugcucaacaagcacaucgacgccuacaagacguucccgcccaccgagcccaagaaggacaagaagaagaaggcggacgagacccaggcccugccccagcgccagaagaagcagcagaccgucacgcugcuccccgccgccgaccuggacgacuucuccaagcagcugcagcagagcauguccagcgcggacuccacccaggccuga

SEQ ID NO: 17506 - RNA, 1260 nt, Artificial Sequence
  SARS-CoV-2__MT472625.1__nucleocapsid protein (N) CDS gc
augagcgacaacggcccccagaaccagcgcaacgccccgcggaucaccuucgggggccccuccgacagcaccggguccaaccagaacggcgagcgcagcggggcccgguccaagcagcgccggccccagggccugcccaacaacacggcgagcugguucaccgcccucacccagcacggcaaggaggaccugaaguucccgcgcgggcagggcgugcccaucaacaccaacuccagccccgacgaccagaucggguacuaccggcgcgccacgcggcgcauccggggcggggacggcaagaugaaggaccugagcccccgcugguacuucuacuaccucggcaccgggccggaggccggccugcccuacggggccaacaaggacggcaucaucugggucgcgaccgagggcgcccugaacacccccaaggaccacaucgggacgcggaaccccgccaacaacgccgcgaucgugcuccagcugccgcagggcaccacccugcccaagggguucuacgccgagggcucccgcgggggcucccaggccagcucccggagcuccagccgcucccggaacagcucccgcaacagcacccccggcagcucccgggggacgagccccgcccgcauggccggcaacgggggcgacgcggcccucgcccugcugcuccuggaccggcugaaccagcucgaguccaagaugagcgggaagggccagcagcagcagggccagaccgugaccaagaaguccgccgccgaggcgagcaagaagccgcgccagaagcgcaccgccacgaaggccuacaacgucacccaggccuucgggcggcgcggccccgagcagacccaggggaacuucggcgaccaggagcugauccggcaggggaccgacuacaagcacuggccccagaucgcccaguucgcgcccuccgccagcgccuucuucggcaugucccgcaucggcauggaggugacgccgagcgggaccuggcugaccuacaccggcgccaucaagcucgacgacaaggaccccaacuucaaggaccaggugauccugcugaacaagcacaucgacgccuacaagacguucccgcccaccgagcccaagaaggacaagaagaagaaggcggacgagacccaggcccucccccagcggcagaagaagcagcagaccgucacgcugcugcccgccgccgagcucgacgacuucuccaagcagcugcagcagagcauguccagcgcggacuccacccaggccuga

SEQ ID NO: 17507 - RNA, 1260 nt, Artificial Sequence
  SARS-CoV-2__MT358640.1__nucleocapsid protein (N) CDS gc
augagcgacaacggcccccagaaccagcgcaacgccccgcggaucaccuucgggggccccuccgacagcaccggguccaaccagaacggcgagcgcagcggggcccgguccaagcagcgccggccccagggccugcccaacaacacggcgagcugguucaccgcccucacccagcacggcaaggaggaccugaaguucccgcgcgggcagggcgugcccaucaacaccaacuccagccccgacgaccagaucggguacuaccggcgcgccacgcggcgcauccggggcggggacggcaagaugaaggaccugagcccccgcugguacuucuacuaccucggcaccgggccggaggccggccugcccuacggggccaacaaggacggcaucaucugggucgcgaccgagggcgcccugaacacccccaaggaccacaucgggacgcggaaccccgccaacaacgccgcgaucgugcuccagcugccgcagggcaccacccugcccaagggguucuacgccgagggcucccgcgggggcucccaggccagcucccggagcuccagccgcucccggaacagcucccgcaacagcacccccggcagcuccaagcggacgagccccgcccgcauggccgggaacggcggggacgcggcccucgcccugcugcuccuggaccggcugaaccaguucgaguccaagaugagcggcaaggggcagcagcagcagggccagaccgugaccaagaaguccgccgccgaggcgagcaagaagccgcgccagaagcgcaccgccacgaaggccuacaacgucacccaggccuucggccggcgcgggcccgagcagacccagggcaacuucggggaccaggagcucauccggcagggcaccgacuacaagcacuggccccagaucgcccaguucgcgcccuccgccagcgccuucuucgggaugucccgcaucggcauggaggugacgccgagcggcaccuggcugaccuacaccggggccaucaagcuggacgacaaggaccccaacuucaaggaccaggugauccuccugaacaagcacaucgacgccuacaagacguucccgcccaccgagcccaagaaggacaagaagaagaaggcggacgagacccaggcccugccccagcggcagaagaagcagcagaccgucacgcuccugcccgccgccgaccuggacgacuucuccaagcagcuccagcagagcauguccagcgcggacuccacccaggccuga

SEQ ID NO: 17508 - RNA, 1260 nt, Artificial Sequence
  SARS-CoV-2__MT459857.1__nucleocapsid protein (N) CDS gc
augagcgacaacggcccccagaaccagcgcaacgccccgcggaucaccuucgggggccccuccgacagcaccggguccaaccagaacggcgagcgcagcggggcccgguccaagcagcgccggccccagggccugcccaacaacacggcgagcugguucaccgcccucacccagcacggcaaggaggaccugaaguucccgcgcgggcagggcgugcccaucaacaccaacuccagccccgacgaccagaucggguacuaccggcgcgccacgcggcgcauccggggcggggacggcaagaugaaggaccugagcccccgcugguacuucuacuaccucggcaccgggccggaggccggccugcccuacggggccaacaaggacggcaucaucugggucgcgaccgagggcgcccugaacacccccaaggaccacaucgggacgcggaaccccgccaacaacgccgcgaucgugcuccagcugccgcagggcaccacccugcccaagggguucuacgccgagggcucccgcgggggcucccaggccagcucccggagcuccagccgcucccggaacagcucccgcaacagcacccccggcagcuccaagcggaucagccccgcccgcauggccgggaacggcggggacgcggcccucgcccugcugcuccuggaccggcugaaccagcucgaguccaagaugagcggcaaggggcagcagcagcagggccagacggugaccaagaaguccgccgccgaggcgagcaagaagccgcgccagaagcgcaccgccaccaaggccuacaacgucacgcaggccuucggccggcgcgggcccgagcagacccagggcaacuucggggaccaggagcugauccggcagggcaccgacuacaagcacuggccccagaucgcccaguucgcgcccuccgccagcgccuucuucgggaugucccgcaucggcauggaggugaccccgagcggcacguggcugaccuacaccggggccaucaagcucgacgacaaggaccccaacuucaaggaccaggugauccugcugaacaagcacaucgacgccuacaagaccuucccgcccacggagcccaagaaggacaagaagaagaaggcggacgagacccaggcccucccccagcggcagaagaagcagcagaccgucacccugcugcccgccgccgaccucgacgacuucuccaagcagcugcagcagagcauguccagcgcggacuccacgcaggccuga

SEQ ID NO: 17509 - RNA, 1260 nt, Artificial Sequence
  SARS-CoV-2__MT459903.1__nucleocapsid protein (N) CDS gc
augagcgacaacggcccccagaaccagcgcaacgccccgcggaucaccuucgggggccccuccgacagcaccggguccaaccagaacggcgagcgcagcggggcccgguccaagcagcgccggccccagggccugcccaacaacacggcgagcugguucaccgcccucacccagcacggcaaggaggaccugaaguucccgcgcgggcagggcgugcccaucaacaccaacuccagccccgacgaccagaucggguacuaccggcgcgccacgcggcgcauccggggcggggacggcaagaugaaggaccugagcccccgcugguacuucuacuaccucggcaccgggccggaggccggccugcccuacggggccaacaaggacggcaucaucugggucgcgaccgagggcgcccugaacacccccaaggaccacaucgggacgcggaaccccgccaacaacgccgcgaucgugcuccagcugccgcagggcaccacccugcccaagggguucuacgccgagggcucccgcgggggcucccaggccagcucccggagcuccagccgcucccggaacagcucccgcaacagcacccccggcagcuccaagcggacgagccccgcccgcauggccgggaacggcggggacgcggcccucgcccugcugcuccuggaccggcugaaccagcucgaguccaagaugagcggcaaggggcagcagcagcagggccagaccgugaccaagaaguccgccgccgaggcgagcaagaagccgcgccagaagcgcaccgccacgaaggccuacaacgucacccaggccuucggccggcgcgggcccgagcagacccagggcaacuucggggaccaggagcugauccggcagggcaccgacuacaagcacuggccccagaucgcccaguucgcgcccuccgccagcgccuucuucgggaugucccgcaucggcauggaggugacgccgagcggcaccuggcugaccuacaccggggccaucaagcucgacgacaaggaccccaacuucaaggaccaggugauccugcugaacaagcacaucgacgccuacaagacguuccggcccaccgagcccaagaaggacaagaagaagaaggcggacgagacccaggcccucccgcagcgccagaagaagcagcagaccgucacgcugcugcccgccgccgaccucgacgacuucuccaagcagcugcagcagagcauguccagcgcggacuccacccaggccuga

SEQ ID NO: 17510 - RNA, 1260 nt, Artificial Sequence
  SARS-CoV-2__MT459987.1__nucleocapsid protein (N) CDS gc
augagcgacaacggcccccagaaccagcgcaacgcccugcggaucaccuucgggggcccguccgacagcaccggguccaaccagaacggcgagcgcagcggggcccgguccaagcagcgccggccccagggccuccccaacaacacggcgagcugguucaccgcccugacccagcacggcaaggaggaccugaaguucccccgcgggcagggcgugccgaucaacaccaacuccagccccgacgaccagaucggguacuaccggcgcgccacgcggcgcauccggggcggggacggcaagaugaaggaccucagcccccgcugguacuucuacuaccugggcaccgggcccgaggccggccugccguacggggccaacaaggacggcaucaucugggucgcgaccgagggcgcccucaacacccccaaggaccacaucgggacgcggaaccccgccaacaacgccgcgaucgugcugcagcugccccagggcaccacccucccgaagggguucuacgccgagggcucccgcgggggcucccaggccagcucccggagcuccagccgcucccggaacagcucccgcaacagcacccccggcagcucccgggggacgagccccgcccgcauggccggcaacgggggcgacgcggcccuggcccugcuccugcuggaccggcucaaccagcuggaguccaagaugagcgggaagggccagcagcagcagggccagaccgugaccaagaaguccgccgccgaggcgagcaagaagccccgccagaagcgcaccgccacgaaggccuacaacgucacccaggccuucgggcggcgcggcccggagcagacccaggggaacuucggcgaccaggagcugauccggcaggggaccuacuacaagcacuggccccagaucgcccaguucgcgcccuccgccagcgccuucuucggcaugucccgcaucggcauggaggugacgcccagcgggaccuggcucaccuacaccggcgccaucaagcuggacgacaaggacccgaacuucaaggaccaggugauccugcucaacaagcacaucgacgccuacaagacguucccgcccaccgagcccaagaaggacaagaagaagaaggcggacgagacccaggcccugccccagcggcagaagaagcagcagaccgucacgcugcuccccgccgccgaccuggacgacuucuccaagcagcugcagcagagcauguccagcgcggacuccacccaggccuga

SEQ ID NO: 17511 - RNA, 1260 nt, Artificial Sequence
  SARS-CoV-2__MT461610.1__nucleocapsid protein (N) CDS gc
augagcgacaacggcccccagaaccagcgcaacgccccgcggaucaccuucgggggccccuccgacagcaccggguccaaccagaacggcgagcgcagcggggcccgguccaagcagcgccggccccagggccugcccaacaacacggcgagcugguucaccgcccucacccagcacggcaaggaggaccugaaguucccgcgcgggcagggcgugcccaucaacaccaacuccagccccuacgaccagaucggguacuaccggcgcgccacgcggcgcauccggggcggggacggcaagaugaaggaccugagcccccgcugguacuucuacuaccucggcaccgggccggaggccggccugcccuacggggccaacaaggacggcaucaucugggucgcgaccgagggcgcccugaacacccccaaggaccacaucgggacgcggaaccccgccaacaacgccgcgaucgugcuccagcugccgcagggcaccacccugcccaagggguucuacgccgagggcucccgcgggggcucccaggccagcucccggagcuccagccgcucccggaacagcucccgcaacagcacccccggcagcucccgggggacgagccccgcccgcauggccggcaacgggggcgacgcggcccucgcccugcugcuccuggaccggcugaaccagcucgaguccaagaugagcgggaagggccagcagcagcagggccagaccgugaccaagaaguccgccgccgaggcgagcaagaagccgcgccagaagcgcaccgccacgaaggccuacaacgucacccaggccuucgggcggcgcggccccgagcagacccaggggaacuucggcgaccaggagcugauccggcaggggaccgacuacaagcacuggccccagaucgcccaguucgcgcccuccgccagcgccuucuucggcaugucccgcaucggcauggaggugacgccgagcgggaccuggcugaccuacaccggcgccaucaagcucgacgacaaggaccccaacuucaaggaccaggugauccugcugaacaagcacaucgacgccuacaagacguucccgcccaccgagcccaagaaggacaagaagaagaaggcggacgagacccaggcccucccccagcggcagaagaagcagcagaccgucacgcugcugcccgccgccgaccucgacgacuucuccaagcagcugcagcagagcauguccagcgcggacuccacccaggccuga

SEQ ID NO: 17512 - RNA, 1260 nt, Artificial Sequence
  SARS-CoV-2__MT461663.1__nucleocapsid protein (N) CDS gc
augagcgacaacggcccccagaaccagcgcaacgccccgcggaucaccuucgggggccccuccgacagcaccggguccaaccagaacggcgagcgcagcggggcccgguccaagcagcgccggccccagggccugcccaacaacacggcgagcugguucaccgcccucacccagcacggcaaggaggaccugaaguucccgcgcgggcagggcgugcccaucaacaccaacuccagccccgacgaccagaucggguacuaccggcgcgccacgcggcgcauccggggcggggacggcaagaugaaggaccugagcccccgcugguacuucuacuaccucggcaccgggccggaggccggccugcccuacggggccaacaaggacggcaucaucugggucgcgaccgagggcgcccugaacacccccaaggaccacaucgggacgcggaaccccgccaacaacgccgcgaucgugcuccagcugccgcagggcaccacccugcccaagggguucuacgccgagggcagccgcgggggcucccaggccagcucccggagcuccagccgcucccggaacaucagccgcaacuccacccccggcagcagcaagcggacgucccccgcccgcauggccgggaacggcggggacgcggcccucgcccugcugcuccuggaccggcugaaccagcucgagagcaagauguccggcaaggggcagcagcagcagggccagaccgugaccaagaaguccgccgccgaggcguccaagaagccgcgccagaagcgcaccgccacgaaggccuacaacgucacccaggccuucggccggcgcgggcccgagcagacccagggcaacuucggggaccaggagcugauccggcagggcaccgacuacaagcacuggccccagaucgcccaguucgcgcccagcgccuccgccuucuucgggaugagccgcaucggcauggaggugacgccguccggcaccuggcugaccuacaccggggccaucaagcucgacgacaaggaccccaacuucaaggaccaggugauccugcugaacaagcacaucgacgccuacaagacguucccgcccaccgagcccaagaaggacaagaagaagaaggcggacgagacccaggcccucccccagcggcagaagaagcagcagaccgucacgcugcugcccgccgccgaccucgacgacuucagcaagcagcugcagcaguccaugagcuccgcggacagcacccaggccuga

SEQ ID NO: 17513 - RNA, 1260 nt, Artificial Sequence
  SARS-CoV-2__MT450889.1__nucleocapsid protein (N) CDS gc
augagcgacaacggcccccagaaccagcgcaacgccccgcggaucaccuucgggggccccuccgacagcaccggguccaaccagaacggcgagcgcagcggggcccgguccaagcagcgccggccccagggccugcccaacaacacggcgagcugguucaccgcccucacccagcacggcaaggaggaccugaaguucccgcgcgggcagggcgugcccaucaacaccaacuccagccccgacgaccagaucggguacuaccggcgcgccacgcggcgcauccggggcggggacggcaagaugaaggaccugagcccccgcugguacuucuacuaccucggcaccgggccggaggccggccugcccuacggggccaacaaggacggcaucaucugggucgcgaccgagggcgcccugaacacccccaaggaccacaucgggacgcggaaccccgccaacaacgccgcgaucgugcuccagcugccgcagggcaccacccugcccaagggguucuacgccgagggcucccgcgggggcucccaggccagcucccggagcuccagccgcucccggaacagcucccgcaacagcacccccggcagcucccgggggacgagccccgcccgcauggccggcaacgggggcgacgcggcccucgcccugcugcuccuggaccggcugaaccagcucgaguccaagaugagcgggaagggccagcagcagcagggccagaccgugaccaagaaguccgccgccgaggcgagcaagaagccgcgccagaagcgcaccgccacgaaggccuacaacgucacccaggccuucgggcggcgcggccccgagcagacccaggggaacuucggcgaccaggagcugauccggcaggggaccgacuacaagcacuggccccagaucgcccaguucgcgcccuccgccagcgccuucuucggcaugucccgcaucggcauggaggugacgccgagcgggaccuggcugaccuacaccggcgccaucaagcucgacgacaaggaccccaacuucaaggaccaggugauccugcugaacaagcacaucgacgccuacaagacguucccgcccaccgagcccaagaaggacaagaagaagaaggcggacgagacccaggcccucccccagcggcacaagaagcagcagaccgucacgcugcugcccgccgccgaccucgacgacuucuccaagcagcugcagcagagcauguccagcgcggacuccacccaggccuga

SEQ ID NO: 17514 - RNA, 1260 nt, Artificial Sequence
  SARS-CoV-2__MT451874.1__nucleocapsid protein (N) CDS gc
augagcgacaacggcccccagaaccagcgcaacgcccugcggaucaccuucgggggcccguccgacagcaccggguccaaccagaacggcgagcgcagcggggcccgguccaagcagcgccggccccagggccuccccaacaacacggcgagcugguucaccgcccugacccagcacggcaaggaggaccugaaguucccccgcgggcagggcgugccgaucaacaccaacuccagccccgacgaccagaucggguacuaccggcgcgccacgucccggauccgcggcggggacggcaagaugaaggaccucagcccccggugguacuucuacuaccugggcaccgggcccgaggccggccugccguacggggccaacaaggacggcaucaucugggucgcgaccgagggcgcccucaacacccccaaggaccacaucgggacgcgcaaccccgccaacaacgccgcgaucgugcugcagcugccccagggcaccacccucccgaagggguucuacgccgagggcucccgcgggggcagccaggccuccagccgguccagcucccggagccgcaacuccagccggaacagcacccccggcuccagccgcgggacgucccccgcccggauggccggcaacgggggcgacgcggcccuggcccugcuccugcuggaccgccucaaccagcuggagagcaagauguccgggaagggccagcagcagcagggccagaccgugaccaagaaguccgccgccgaggcgagcaagaagccccggcagaagcgcaccgccacgaaggccuacaacgucacccaggccuucgggcgccggggcccggagcagacccaggggaacuucggcgaccaggagcugauccgccaggggaccgacuacaagcacuggccccagaucgcccaguucgcgcccagcgccuccgccuucuucggcaugagccggaucggcauggaggugacgcccuccgggaccuggcucaccuacaccggcgccaucaagcuggacgacaaggacccgaacuucaaggaccaggugauccugcucaacaagcacaucgacgccuacaagacguucccgcccaccgagcccaagaaggacaagaagaagaaggcggacgagacccaggcccugccccagcgccagaagaagcagcagaccgucacgcugcuccccgccgccgaccuggacgacuucagcaagcagcugcagcaguccaugagcuccgcggacagcacccaggccuga

SEQ ID NO: 17515 - RNA, 1260 nt, Artificial Sequence
  SARS-CoV-2__MT451887.1__nucleocapsid protein (N) CDS gc
augagcgacaacggcccccagaaccagcgcaacgccccgcggaucaccuucgggggccccuccgacagcaccggguccaaccagaacggcgagcgcagcggggcccgguccaagcagcgccggccccagggccugcccaacaacacggcgagcugguucaccgcccucacccagcacggcaaggaggaccugaaguucccgcgcgggcagggcgugcccaucaacaccaacuccagccccgacgaccagaucggguacuaccggcgcgccacgcggcgcauccggggcggggacggcaagaugaaggaccugagcccccgcugguacuucuacuaccucggcaccgggccggaggccggccugcccuacggggccaacaaggacggcaucaucugggucgcgaccgagggcgcccugaacacccccaaggaccacaucgggacgcggaaccccgccaacaacgccgcgaucgugcuccagcugccgcagggcaccacccugcccaagggguucuacgccgagggcucccgcgggggcucccaggccagcucccggagcuccagccgcucccggaacagcucccgcaacagcacccccggcagcucccgggggacgagccccgcccgcauggccggcaacgggggcgacgcggcccucgcccugcugcuccuggaccggcugaaccagcucgaguccaagaugagcugcaaggggcagcagcagcagggccagaccgugaccaagaaguccgccgccgaggcgagcaagaagccgcgccagaagcgcaccgccacgaaggccuacaacgucacccaggccuucggccggcgcgggcccgagcagacccagggcaacuucggggaccaggagcugauccggcagggcaccgacuacaagcacuggccccagaucgcccaguucgcgcccuccgccagcgccuucuucgggaugucccgcaucggcauggaggugacgccgagcggcaccuggcugaccuacaccggggccaucaagcucgacgacaaggaccccaacuucaaggaccaggugauccugcugaacaagcacaucgacgccuacaagacguucccgcccaccgagcccaagaaggacaagaagaagaaggcggacgagacccaggcccucccccagcggcagaagaagcagcagaccgucacgcugcugcccgccgccgaccucgacgacuucuccaagcagcugcagcagagcauguccagcgcggacuccacccaggccuga

SEQ ID NO: 17516 - RNA, 1260 nt, Artificial Sequence
  SARS-CoV-2__MT450966.1__nucleocapsid protein (N) CDS gc
augagcgacaacggcccccagaaccagcgcaacgccccgcggaucaccuucgggggccccuccgacagcaccggguccaaccagaacggcgagcgcagcggggcccgguccaagcagcgccggccccagggccugcccaacaacacggcgagcugguucaccgcccucacccagcacggcaaggaggaccugaaguucccgcgcgggcagggcgugcccaucaacaccaacuccagccccgacgaccagaucggguacuaccggcgcgccacgcggcgcauccggggcggggacggcaagaugaaggaccugagcccccgcugguacuucuacuaccucggcaccgggccggaggccggccugcccuacggggccaacaaggacggcaucaucugggucgcgaccgagggcgcccugaacacccccaaggaccacaucgggacgcggaaccccgccaacaacgccgcgaucgugcuccagcugccgcagggcaccacccugcccaagggguucuacgccgagggcucccgcgggggcucccaggccagcucccggagcuccagccgcucccggaacagcucccgcaacagcacccccggcagcucccgggggacgagccccgcccgcauggccggcaacgggggcgacgcggcccucgcccugcugcuccuggaccggcugaaccagcucgaguccaagaugagcgggaagggccagcagcagcagggccagaccgugaccaagaaguccgccgccgaggcgagcaagaagccgcgccagaagcgcaccgccacgaaggccuacaacgucauccaggccuucgggcggcgcggccccgagcagacccaggggaacuucggcgaccaggagcugauccggcaggggaccgacuacaagcacuggccccagaucgcccaguucgcgcccuccgccagcgccuucuucggcaugucccgcaucggcauggaggugaccccgagcgggacguggcugaccuacaccggcgccaucaagcucgacgacaaggaccccaacuucaaggaccaggugauccugcugaacaagcacaucgacgccuacaagaccuucccgcccacggagcccaagaaggacaagaagaagaaggcggacgagacccaggcccucccccagcggcagaagaagcagcagaccgucacccugcugcccgccgccgaccucgacgacuucuccaagcagcugcagcagagcauguccagcgcggacuccacgcaggccuga

SEQ ID NO: 17517 - RNA, 1260 nt, Artificial Sequence
  SARS-CoV-2__MT451143.1__nucleocapsid protein (N) CDS gc
augagcgacaacggcccccagaaccagcgcaacgccccgcggaucaccuucgggggccccuccgacagcaccggguccaaccagaacggcgagcgcagcggggcccgguccaagcagcgccggccccagggccugcccaacaacacggcgagcugguucaccgcccucacccagcaccgcaaggaggaccugaaguucccgcggggccagggggugcccaucaacaccaacuccagccccgacgaccagaucggcuacuaccgccgggccacgcgccggauccgcgggggcgacgggaagaugaaggaccugagcccccggugguacuucuacuaccucggcaccggcccggaggccgggcugcccuacggcgccaacaaggacgggaucaucugggucgcgaccgagggcgcccugaacacccccaaggaccacaucggcacgcgcaaccccgccaacaacgccgcgaucgugcuccagcugccgcaggggaccacccugcccaagggcuucuacgccgaggggucccggggcgggucccaggccagcucccgcagcuccagccggucccgcaacagcucccggaacagcacccccggcagcucccgcggcacgagccccgcccggauggccgggaacggcggggacgcggcccucgcccugcugcuccuggaccgccugaaccagcucgaguccaagaugagcggcaaggggcagcagcagcagggccagaccgugaccaagaaguccgccgccgaggcgagcaagaagccgcgccagaagcggaccgccacgaaggccuacaacgucacccaggccuucggccgccgggggcccgagcagacccagggcaacuucggggaccaggagcugauccgccagggcaccgacuacaagcacuggccccagaucgcccaguucgcgcccuccgccagcgccuucuucgggaugucccggaucggcauggaggugacgccgagcggcaccuggcugaccuacaccggggccaucaagcucgacgacaaggaccccaacuucaaggaccaggugauccugcugaacaagcacaucgacgccuacaagacguucccgcccaccgagcccaagaaggacaagaagaagaaggcggacgagacccaggcccucccccagcgccagaagaagcagcagaccgucacgcugcugcccgccgccgaccucgacgacuucuccaagcagcugcagcagagcauguccagcgcggacuccacccaggccuga

SEQ ID NO: 17518 - RNA, 1260 nt, Artificial Sequence
  SARS-CoV-2__MT451189.1__nucleocapsid protein (N) CDS gc
augagcgacaacggcccccagaaccagcgcaacgccccgcggaucaccuucgggggccccuccgacagcaccggguccaaccagaacggcgagcgcagcggggcccgguccaagcagcgccggccccagggccugcccaacaacacggcgagcugguucaccgcccucacccagcacggcaaggaggaccugaaguucccgcgcgggcagggcgugcccaucaacaccaacuccagccccgacgaccagaucggguacuaccggcgcgccacgcggcgcauccggggcggggacggcaagaugaaggaccugagcccccgcugguacuucuacuaccucggcaccgggccggaggccggccugcccuacggggccaacaaggacggcaucaucugggucgcgaccgagggcgcccugaacacccccaaggaccacaucgggacgcggaaccccgccaacaacgccgcgaucgugcuccagcugccgcagggcaccacccugcccaagggguucuacgccgagggcucccgcgggggcucccaggccagcucccggagcuccagccgcucccggaacagcucccgcaacagcauccccggcagcuccaagcggaccagccccgcccgcauggccgggaacggcggggacgcggcccucgcccugcugcuccuggaccggcugaaccagcucgaguccaagaugagcggcaaggggcagcagcagcagggccagacggugaccaagaaguccgccgccgaggcgagcaagaagccgcgccagaagcgcaccgccaccaaggccuacaacgucacgcaggccuucggccggcgcgggcccgagcagacccagggcaacuucggggaccaggagcugauccggcagggcaccgacuacaagcacuggccccagaucgcccaguucgcgcccuccgccagcgccuucuucgggaugucccgcaucggcauggaggugaccccgagcggcacguggcugaccuacaccggggccaucaagcucgacgacaaggaccccaacuucaaggaccaggugauccugcugaacaagcacaucgacgccuacaagaccuucccgcccacggagcccaagaaggacaagaagaagaaggcggacgagacccaggcccucccccagcggcagaagaagcagcagaccgucacccugcugcccgccgccgaccucgacgacuucuccaagcagcugcagcagagcauguccagcgcggacuccacgcaggccuga

SEQ ID NO: 17519 - RNA, 1260 nt, Artificial Sequence
  SARS-CoV-2__MT451245.1__nucleocapsid protein (N) CDS gc
augagcgacaacggcccccagaaccagcgcaacgccccgcggaucaccuucgggggccccuccgacagcaccggguccaaccagaacggcgagcgcagcggggcccgguccaagcagcgccggccccagggccugcccaacaacacggcgagcugguucaccgcccucacccagcacggcaaggaggaccugaaguucccgcgcgggcagggcgugcccaucaacaccaacuccagccccgacgaccagaucggguacuaccggcgcgccacgcggcgcauccggggcggggacggcaagaugaaggaccugagcccccgcugguacuucuacuaccucggcaccgggccggaggccggccugcccuacggggccaacaaggacggcaucaucugggucgcgaccgagggcgcccugaacacccccaaggaccacaucgggacgcggaaccccgccaacaacgccgcgaucgugcuccagcugccgcagggcaccacccugcccaagggguucuacgccgagggcagccgcgggggcggccaggccuccagccgguccagcucccgcagccggaacuccagccgcaacuccacccccgggagcagcaagcggacgucccccgcccgcauggccggcaacgggggcgacgcggcccucgcccugcugcuccuggaccggcugaaccagcucgagagcaagauguccgggaagggccagcagcagcagggccagaccgugaccaagaaguccgccgccgaggcguccaagaagccgcgccagaagcgcaccgccacgaaggccuacaacgucacccaggccuucgggcggcgcggccccgagcagacccaggggaacuucggcgaccaggagcugauccggcaggggaccgacuacaagcacuggccccagaucgcccaguucgcgcccagcgccuccgccuucuucggcaugagccgcaucggcauggaggugacgccguccgggaccuggcugaccuacaccggcgccaucaagcucgacgacaaggaccccaacuucaaggaccaggugauccugcugaacaagcacaucgacgccuacaagacguucccgcccaccgagcccaagaaggacaagaagaagaaggcggacgagacccaggcccucccccagcggcagaagaagcagcagaccgucacgcugcugcccgccgccgaccucgacgacuucagcaagcagcugcagcaguccaugagcuccgcggacagcacccaggccuga

SEQ ID NO: 17520 - RNA, 1260 nt, Artificial Sequence
  SARS-CoV-2__MT451258.1__nucleocapsid protein (N) CDS gc
augagcgacaacggcccccagaaccagcgcaacgccccgcggaucaccuucgggggccccuccgacagcaccggguccaaccagaacggcgagcgcagcggggcccgguccaagcagcgccggccccagggccugcccaacaacacggcgagcugguucaccgcccucacccagcacggcaaggaggaccugaaguucccgcgcgggcagggcgugcccaucaacaccaacuccagccccgacgaccagaucggguacuaccggcgcgccacgcggcgcauccggggcggggacggcaagaugaaggaccugagcccccgcugguacuucuacuaccucggcaccgggccggaggccggccugcccuacggggccaacaaggacggcaucaucugggucgcgaccgagggcgcccugaacacccccaaggaccacaucgggacgcggaaccccgccaacaacgccgcgaucgugcuccagcugccgaagggcaccacccugcccaagggguucuacgccgagggcagccgcgggggcucccaggccagcucccggagcuccagccgcucccggaacagcucccgcaaccucacccccggcagcagccgggggacgucccccgcccgcauggccggcaacgggggcgacgcggcccuggcccugcuccugcuggaccggcucaaccagcuggagagcaagauguccgggaagggccagcagcagcagggccagaccgugaccaagaaguccgccgccgaggcguccaagaagccgcgccagaagcgcaccgccacgaaggccuacaacgucacccaggccuucgggcggcgcggccccgagcagacccaggggaacuucggcgaccaggagcugauccggcaggggaccgacuacaagcacuggccccagaucgcccaguucgcgcccagcgccuccgccuucuucggcaugagccgcaucggcauggaggugacgccguccgggaccuggcucaccuacaccggcgccaucaagcuggacgacaaggaccccaacuucaaggaccaggugauccugcucaacaagcacaucgacgccuacaagacguucccgcccaccgagcccaagaaggacaagaagaagaaggcggacgagacccaggcccugccccagcggcagaagaagcagcagaccgucacgcugcuccccgccgccgaccuggacgacuucagcaagcagcugcagcaguccaugagcuccgcggacagcacccaggccuga

SEQ ID NO: 17521 - RNA, 1260 nt, Artificial Sequence
  SARS-CoV-2__MT451476.1__nucleocapsid protein (N) CDS gc
augagcgacaacggcccccagaaccagcgcaacgccccgcggaucaccuucgggggccccuccgacagcaccggguccaaccagaacggcgagcgcagcggggcccgguccaagcagcgccggccccagggccugcccaacaacacggcgagcugguucaccgcccucacccagcacggcaaggaggaccugaaguucccgcgcgggcagggcgugcccaucaacaccaacuccagccccgacgaccagaucggguacuaccggcgcgccacgcggcgcauccggggcggggacggcaagaugaaggaccugagcccccgcugguacuucuacuaccucggcaccgggccggaggccggccugcccuacggggccaacaaggacggcaucaucugggucgcgaccgagggcgcccugaacacccccaaggaccacaucgggacgcggaaccccgccaacaacgccgcgaucgugcuccagcugccgcagggcaccacccugcccaagggguucuacgccgagggcucccgcgggggcucccaggccagcucccggagcuccagccgcucccggaacagcucccgcaacagcacccccggcagcucccgggggacgagccccgcccgcauggccggcaacgggggcgacgcggcccucgcccugcugcuccuggaccggcuguaccagcucgaguccaagaugagcgggaagggccagcagcagcagggccagaccgugaccaagaaguccgccgccgaggcgagcaagaagccgcgccagaagcgcaccgccacgaaggccuacaacgucacccaggccuucgggcggcgcggccccgagcagacccaggggaacuucggcgaccaggagcugauccggcaggggaccgacuacaagcacuggccccagaucgcccaguucgcgcccuccgccagcgccuucuucggcaugucccgcaucggcauggaggugacgccgagcgggaccuggcugaccuacaccggcgccaucaagcucgacgacaaggaccccaacuucaaggaccaggugauccugcugaacaagcacaucgacgccuacaagacguucccgcccaccgagcccaagaaggacaagaagaagaaggcggacgagacccaggcccucccccagcggcagaagaagcagcagaccgucacgcugcugcccgccgccgaccucgacgacuucuccaagcagcugcagcagagcauguccagcgcggacuccacccaggccuga

SEQ ID NO: 17522 - RNA, 1260 nt, Artificial Sequence
  SARS-CoV-2__MT444626.1__nucleocapsid protein (N) CDS gc
augagcgacaacggcccccagaaccagcgcaacgccccgcggaucaccuucgggggccccuccgacagcaccggguccaaccagaacggcgagcgcagccuggcccgguccaagcagcgccggccccaggggcuccccaacaacacggcgagcugguucaccgcccugacccagcacggcaaggaggaccugaaguucccgcgcggccagggggugcccaucaacaccaacuccagccccgacgaccagaucggcuacuaccggcgcgccacgcggcgcauccgcgggggcgacgggaagaugaaggaccucagcccccggugguacuucuacuaccugggcaccggcccggaggccgggcugcccuacggcgccaacaaggacgggaucaucugggucgcgaccgagggcgcccucaacacccccaaggaccacaucggcacgcggaaccccgccaacaacgccgcgaucgugcugcagcugccgcaggggaccacccuccccaagggcuucuacgccgaggggucccgcggcgggucccaggccagcucccggagcuccagccgcucccggaacagcucccgcaacagcacccccggcagcucccggggcacgagccccgcccgcauggccgggaacggcggggacgcggcccuggcccugcuccugcuggaccggcucaaccagcuggaguccaagaugagcggcaaggggcagcagcagcagggccagaccgugaccaagaaguccgccgccgaggcgagcaagaagccgcgccagaagcgcaccgccacgaaggccuacaacgucacccaggccuucggccggcgcgggcccgagcagacccagggcaacuucggggaccaggagcugauccggcagggcaccgacuacaagcacuggccccagaucgcccaguucgcgcccuccgccagcgccuucuucgggaugucccgcaucggcauggaggugacgccgagcggcaccuggcucaccuacaccggggccaucaagcuggacgacaaggaccccaacuucaaggaccaggugauccugcucaacaagcacaucgacgccuacaagacguucccgcccaccgagcccaagaaggacaagaagaagaaggcggacgagacccaggcccugccccagcggcagaagaagcagcagaccgucacgcugcuccccgccgccgaccuggacgacuucuccaagcagcugcagcagagcauguccagcgcggacuccacccaggccuga

SEQ ID NO: 17523 - RNA, 1260 nt, Artificial Sequence
  SARS-CoV-2__MT447172.1__nucleocapsid protein (N) CDS gc
augagcgacaacggcccccagaaccagcgcaacgccccgcggaucaccuucgggggccccuccgacagcaccggguccaaccagaacggcgagcgcagcggggcccgguccaagcagcgccggccccagggccugcccaacaacacggcgagcugguucaccgcccucacccagcacggcaaggaggaccugaaguucccgcgcgggcagggcgugcccaucaacaccaacuccagccccgacgaccagaucggguacuaccggcgcgccacgcggcgcauccggggcggggacggcaagaugaaggaccugagcccccgcugguacuucuacuaccucggcaccgggccggaggucggccugcccuacggggccaacaaggacggcaucaucuggguggccaccgagggcgcgcugaacacccccaaggaccacaucgggacgcggaaccccgccaacaacgccgccaucgugcuccagcugccgcagggcaccacccugcccaagggguucuacgcggagggcucccgcgggggcucccaggccagcucccggagcuccagccgcucccggaacagcucccgcaacagcacccccggcagcucccgggggacgagccccgcccgcauggccggcaacgggggcgacgccgcgcucgcccugcugcuccuggaccggcugaaccagcucgaguccaagaugagcgggaagggccagcagcagcagggccagaccgucaccaagaaguccgccgccgaggccagcaagaagccgcgccagaagcgcaccgcgacgaaggccuacaacgugacccaggccuucgggcggcgcggccccgagcagacccaggggaacuucggcgaccaggagcugauccggcaggggaccgacuacaagcacuggccccagaucgcccaguucgcccccuccgcgagcgccuucuucggcaugucccgcaucggcauggaggugacgccgcuggggaccuggcucaccuacaccggcgccaucaagcuggacgacaaggaccccaacuucaaggaccaggucauccugcucaacaagcacaucgacgccuacaagacguucccgcccaccgagcccaagaaggacaagaagaagaaggccgacgagacccaggcgcugccccagcggcagaagaagcagcagaccgugacgcugcuccccgccgccgaccuggacgacuucagcaagcagcugcagcaguccaugagcuccgccgacagcacccaggcguga

SEQ ID NO: 17524 - RNA, 1251 nt, Artificial Sequence
  SARS-CoV-2__MT434815.1__nucleocapsid protein (N) CDS gc
augagcgacaacggcccccagaaccagcgcaacgccccgcggaucaccuucgggggccccuccgacagcaccggguccaaccagaacggcgagcgcagcggggcccgguccaagcagcgccggccccagggccugcccaacaacacggcgagcugguucaccgcccucacccagcacggcaaggaggaccugaaguucccgcgcgggcagggcgugcccaucaacaccaacuccagccccgacgaccagaucggguacuaccggcgcgccacgcggcgcauccggggcggggacggcaagaugaaggaccugagcccccgcugguacuucuacuaccucggcaccgggccggaggccggccugcccuacggggccaacaaggacggcaucaucugggucgcgaccgagggcgcccugaacacccccaaggaccacaucgggacgcggaaccccgccaacaacgccgcgaucgugcuccagcugccgcagggcaccacccugcccaagggguucuacgccgagggcucccgcgggggcucccaggccagcucccggagcuccagccgcucccggaacagcucccgcaacagcacccccggcagcucccgggggacgagccccgcccgcauggccggcaacgggggcgacgcggcccucgcccugcugcuccuggaccggcugaaccagcucgaguccaagaugagcgggaagggccagcagcagcagggccagaccgugaccaagaaguccgccgccgaggcgagcaagaagccgcgccagaagcgcaccgccacgaaggccuacaacgucacccaggccuucgggcggcgcggccccgagcagacccaggggaacuucggcgaccaggagcugauccggcaggggaccgacuacaagcacuggccccagaucgcccaguucgcgcccuccgccagcgccuucuucggcaugucccgcaucggcauggaggugacgccgagcgggaccuggcugaccuacaccggcgccaucaagcucgacgacaaggaccccaacuucaaggaccaggugauccugcugaacaagcacaucgacgccuacaagacguucccgcccaccgagcccaagaaggacaagaagaagaaggcggacgagacccaggcccucccccagcggcagaagaagcagacccugcugcccgccgccgaccucgacgacuucuccaagcagcugcagcagagcauguccagcgcggacuccacgcaggccuga

SEQ ID NO: 17525 - RNA, 1260 nt, Artificial Sequence
  SARS-CoV-2__MT412280.1__nucleocapsid protein (N) CDS gc
augagcgacaacggcccccagaaccagcgcaacgccccgcggaucaccuucgggggccccuccgacagcaccggguccaaccagaacggcgagcgcagcggggcccgguccaagcagcgccggccccagggccugcccaacaacacggcgagcugguucaccgcccucacccagcacggcaaggaggaccugaaguucccgcgcgggcagggcgugcccaucaacaccaacuccagccccgacgaccagaucggguacuaccggcgcgccacgcggcgcauccggggcggggacggcaagaugaaggaccugagcccccgcugguacuucuacuaccucggcaccgggccggaggccggccugcccuacggggccaacaaggacggcaucaucugggucgcgaccgagggcgcccugaacacccccaaggaccacaucgggacgcggaaccccgccaacaacgccgcgaucgugcuccagcugccgcagggcaccacccugcccaagggguucuacgccgagggcucccgcgggggcucccaggccagcucccggagcuccagccgcucccggaacagcucccgcaacagcacccccggcagcucccgggggacgagccccgcccgcauggccggcaacgggggcgacgcggcccucgcccugcugcuccuggaccggcugaaccagcucgaguccaagaugagcgggaagggccagcagcagcagggccagaccgugaccaagaaguccgccgccgaggcgagcaagaagccgcgccagaagcgcaccgccacgaaggccuacaacgucacccaggccuucgggcggcgcggccccgagcagacccaggggaacuucggcgaccaggagcugauccggcuggggaccgacuacaagcacuggccccagaucgcccaguucgcgcccuccgccagcgccuucuucggcaugucccgcaucggcauggaggugacgccgagcgggaccuggcucaccuacaccggcgccaucaagcuggacgacaaggaccccaacuucaaggaccaggugauccugcucaacaagcacaucgacgccuacaagacguucccgcccaccgagcccaagaaggacaagaagaagaaggcggacgagacccaggcccugccccagcggcagaagaagcagcagaccgucacgcugcuccccgccgccgaccuggacgacuucuccaagcagcugcagcagagcauguccagcgcggacuccacccaggccuga

SEQ ID NO: 17526 - RNA, 1260 nt, Artificial Sequence
  SARS-CoV-2__MT412284.1__nucleocapsid protein (N) CDS gc
augagcgacaacggcccccagaaccagcgcaacgccccgcggaucaccuucgggggccccuccgacagcaccggguccaaccagaacggcgagcgcagcggggcccgguccaagcagcgccggccccagggccugcccaacaacacggcgagcugguucaccgcccucacccagcacggcaaggaggaccugaaguucccgcgcgggcagggcgugcccaucaacaccaacuccagccccgacgaccagaucggguacuaccggcgcgccacgcggcgcauccggggcggggacggcaagaugaaggaccugagcccccgcugguacuucuacuaccucggcaccgggccggaggccggccugcccuacggggccaacaaggacggcaucaucugggucgcgaccgagggcgcccugaacacccccaaggaccacaucgggacgcggaaccccgccaacaacgccgcgaucgugcuccagcugccgcagggcaccacccugcccaagggguucuacgccgagggcucccgcgggggcucccaggccagcucccggagcuccagccgcucccggaacagcucccgcaacagcacccccggcagcucccgggggacgagccccgcccgcauggccggcaacgggggcgacgcggcccucgcccugcugcuccuggaccggcugaaccagcucgaguccaagaugagcgggaagggccagcagcagcagggccagaccgugaccaagaaguccgccgccgaggcgagcaagaagccgcgccagaagcgcaccgccacgaaggccuacaacgucacccaggccuucgggcggcgcggccccgagcagacccaggggaacuucggcgaccaggagcugauccggcaggggaccgacuacaagcacuggccccagaucgcccaguucgcgcuguccgccagcgccuucuucggcaugucccgcaucggcauggaggugacgcccagcgggaccuggcucaccuacaccggcgccaucaagcuggacgacaaggacccgaacuucaaggaccaggugauccugcucaacaagcacaucgacgccuacaagacguucccgcccaccgagcccaagaaggacaagaagaagaaggcggacgagacccaggcccugccccagcggcagaagaagcagcagaccgucacgcugcuccccgccgccgaccuggacgacuucuccaagcagcugcagcagagcauguccagcgcggacuccacccaggccuga

SEQ ID NO: 17527 - RNA, 1260 nt, Artificial Sequence
  SARS-CoV-2__MT412294.1__nucleocapsid protein (N) CDS gc
augagcgacaacggcccccagaaccagcgcaacgccccgcggaucaccuucgggggccccuccgacagcaccggguccaaccagaacggcgagcgcagcggggcccgguccaagcagcgccggccccagggccugcccaacaacacggcgagcugguucaccgcccucacccagcacggcaaggaggaccugaaguucccgcgcgggcagggcgugcccaucaacaccaacuccagccccgacgaccagaucggguacuaccggcgcgccacgcggcgcauccggggcggggacggcaagaugaaggaccugagcccccgcugguacuucuacuaccucggcaccgggccggaggccggccugcccuacggggccaacaaggacggcaucaucugggucgcgaccgagggcgcccugaacacccccaaggaccacaucgggacgcggaaccccgccaacaacgccgcgaucgugcuccagcugccgcagggcaccacccugcccaagggguucuacgccgagggcucccgcgggggcucccaggccagcucccggagcuccagccgcucccggaacagcucccgcaacagcacccccggcagcucccgggggacgagccccgccaccauggccggcaacgggggcgacgcggcccucgcccugcugcuccuggaccgccugaaccagcucgaguccaagaugagcgggaagugccagcagcagcagggccagaccgugaccaagaaguccgccgccgaggcgagcaagaagccgcggcagaagcgcacggccaccaaggccuacaacgucacccaggccuucggccgccgggggcccgagcagacccagggcaacuucggggaccaggagcugauccgccagggcacggacuacaagcacuggccccagaucgcccaguucgcgcccuccgccagcgccuucuucgggaugucccggaucggcauggaggugaccccgagcggcaccuggcugaccuacacgggggccaucaagcucgacgacaaggaccccaacuucaaggaccaggugauccugcugaacaagcacaucgacgccuacaagaccuucccgcccaccgagcccaagaaggacaagaagaagaaggcggacgagacccaggcccucccccagcgccagaagaagcagcagacggucacccugcugcccgccgccgaccucgacgacuucuccaagcagcugcagcagagcauguccagcgcggacuccacccaggccuga

SEQ ID NO: 17528 - RNA, 1260 nt, Artificial Sequence
  SARS-CoV-2__MT415320.1__nucleocapsid protein (N) CDS gc
augagcgacaacggcccccagaaccagcgcaacgccccgcggaucaccuucgggggccccuccgacagcaccggguccaaccagaacggcgagcgcagcggggcccgguccaagcagcgccggccccagggccugcccaacaacacggcgagcugguucaccgcccucacccagcacggcaaggaggaccugaaguucccgcgcgggcagggcgugcccaucaacaccaacuccagccccgacgaccagaucggguacuaccggcgcgccacgcggcgcauccggggcggggacggcaagaugaaggaccugagcccccgcugguacuucuacuaccucggcaccgggccggaggccggccugcccuacggggccaacaaggacggcaucaucugggucgcgaccgagggcgcccugaacacccccaaggaccacaucgggacgcggaaccccgccaacaacgccgcgaucgugcuccagcugccgcagggcaccacccugcccaagggguucuacgccgagggcucccgcgggggcucccaggccagcucccggagcuccagccgcucccggaacagcucccgcaacagcacccccggcagcucccgggggacgagccccgcccgcauggccggcaacgggggcgacgcggcccucgcccugcugcuccuggaccggcugaaccagcucgaguccaagaugagcgggaagggccagcagcagcagggccagaccgugaccaagaaguccgccgccgaggcgagcaagaagccgcgccagaagcgcaccgccacgaaggccuacaacgucacccaggccuucgggcggcgcggccccgagcagacccaggggaacuucggcgaccaggagcugauccggcaggggaccgacuacaagcacuggccccagaucgcccaguucgcgcccuccgccagcgccuucuucggcaugucccgcaucggcauggaggugacgccgagcgggaccuggcugaccuacaccggcgccaucaagcucgacgacaaggacuccaacuucaaggaccaggugauccugcugaacaagcacaucgacgccuacaagacguucccgcccaccgagcccaagaaggacaagaagaagaaggcggacgagacccaggcccucccccagcggcagaagaagcagcagaccgucacgcugcugcccgccgccgaccucgacgacuucagcaagcagcugcagcaguccaugagcuccgcggacagcacccaggccuga

SEQ ID NO: 17529 - RNA, 1260 nt, Artificial Sequence
  SARS-CoV-2__MT385444.1__nucleocapsid protein (N) CDS gc
augagcgacaacggcccccagaaccagcgcaacgccccgcggaucaccuucgggggccccuccgacagcaccggguccaaccagaacggcgagcgcagcggggcccgguccaagcagcugcgcccccagggccuccccaacaacacggcgagcugguucaccgcccugacccagcacggcaaggaggaccugaaguucccgcgggggcagggcgugcccaucaacaccaacuccagccccgacgaccagaucggguacuaccgccgggccacgcgccggauccgcggcggggacggcaagaugaaggaccucagcccccggugguacuucuacuaccugggcaccgggccggaggccggccugcccuacggggccaacaaggacggcaucaucugggucgcgaccgagggcgcccucaacacccccaaggaccacaucgggacgcgcaaccccgccaacaacgccgcgaucgugcugcagcugccgcagggcaccacccuccccaagggguucuacgccgagggcucccgcgggggcucccaggccagcucccggagcuccagccggucccgcaacagcucccggaacagcacccccggcagcucccgcgggacgagccccgcccggauggccggcaacgggggcgacgcggcccuggcccugcuccugcuggaccgccucaaccagcuggaguccaagaugagcgggaagggccagcagcagcagggccagaccgugaccaagaaguccgccgccgaggcgagcaagaagccgcggcagaagcgcaccgccacgaaggccuacaacgucacccaggccuucgggcgccggggccccgagcagacccaggggaacuucggcgaccaggagcugauccgccaggggaccgacuacaagcacuggccccagaucgcccaguucgcgcccuccgccagcgccuucuucggcaugucccggaucggcauggaggugacgccgagcgggaccuggcucaccuacaccggcgccaucaagcuggacgacaaggaccccaacuucaaggaccaggugauccugcucaacaagcacaucgacgccuacaagacguucccgcccaccgagcccaagaaggacaagaagaagaaggcggacgagacccaggcccugccccagcgccagaagaagcagcagaccgucacgcugcuccccgccgccgaccuggacgacuucuccaagcagcugcagcagagcauguccagcgcggacuccacccaggccuga

SEQ ID NO: 17530 - RNA, 1260 nt, Artificial Sequence
  SARS-CoV-2__MT375432.1__nucleocapsid protein (N) CDS gc
augagcgacaacggcccccagaaccagcgcaacgccccgcggaucaccuucgggggccccuccgacagcaccggguccaaccagaacggcgagcgcagcggggcccgguccaagcagcgccggccccagggccugcccaacaacacggcgagcugguucaccgcccucacccagcacggcaaggaggaccugaaguucccgcgcgggcagggcgugcccaucaacaccaacuccagccccgacgaccagaucggguacuaccggcgcuccacgcggcgcauccggggcggggacggcaagaugaaggaccugagcccccgcugguacuucuacuaccucggcaccgggccggaggccggccugcccuacggggccaacaaggacggcaucaucugggucgccaccgagggcgcgcugaacacccccaaggaccacaucgggacgcggaaccccgccaacaacgccgccaucgugcuccagcugccgcagggcaccacccugcccaagggguucuacgcggagggcucccgcgggggcagccaggccuccagccgguccagcucccgcagccggaacuccagccgcaacagcacccccggcuccagccgggggacgucccccgcccgcauggccggcaacgggggcgacgccgcgcucgcccugcugcuccuggaccggcugaaccagcucgagagcaagauguccgggaagggccagcagcagcagggccagaccgugaccaagaaguccgccgccgaggccagcaagaagccgcgccagaagcgcaccgcgacgaaggccuacaacgucacccaggccuucgggcggcgcggccccgagcagacccaggggaacuucggcgaccaggagcugauccggcaggggaccgacuacaagcacuggccccagaucgcccaguucgcccccagcgcguccgccuucuucggcaugagccgcaucggcauggaggugacgccguccgggaccuggcugaccuacaccggcgccaucaagcucgacgacaaggaccccaacuucaaggaccaggugauccugcugaacaagcacaucgacgccuacaagacguucccgcccaccgagcccaagaaggacaagaagaagaaggccgacgagacccaggcgcucccccagcggcagaagaagcagcagaccgucacgcugcugcccgccgccgaccucgacgacuucagcaagcagcugcagcaguccaugagcuccgccgacagcacccaggcguga

SEQ ID NO: 17531 - RNA, 1260 nt, Artificial Sequence
  SARS-CoV-2__MT374106.1__nucleocapsid protein (N) CDS gc
augagcgacaacggcccccagaaccagcgcaacgccccgcggaucaccuucgggggccccuccgacagcaccggguccaaccagaacggcgagcgcagcggggcccgguccaagcagcgccggccccagggccugcccaacaacacggcgagcugguucaccgcccucacccagcacggcaaggaggaccugaaguucccgcgcgggcagggcgugcccaucaacaccaacuccagccccgacgaccagaucggguacuaccggcgcgccacgcggcgcauccggggcggggacggcaagaugaaggaccugagcccccgcugguacuucuacuaccucggcaccgggccggaggccggccugcccuacggggccaacaaggacggcaucaucugggucgcgaccgagggcgcccugaacacccccaaggaccacaucgggacgcggaaccccgccaacaacgccgcgaucgugcuccagcugccgcagggcaccacccugcccaagggguucuacgccgagggcagccgcgggggcucccaggccagcucccggagcagcccccgcucccggaacuccagccgcaacuccacccccggcagcagccgggggacguccccggcccgcauggccggcaacgggggcgacgcggcccucgcccugcugcuccuggaccggcugaaccagcucgagagcaagauguccgggaagggccagcagcagcagggccagaccgugaccaagaaguccgccgccgaggcguccaagaagccccgccagaagcgcaccgccacgaaggccuacaacgucacccaggccuucgggcggcgcggccccgagcagacccaggggaacuucggcgaccaggagcugauccggcaggggaccgacuacaagcacuggccccagaucgcccaguucgcgccgagcgccuccgccuucuucggcaugagccgcaucggcauggaggugacgcccuccgggaccuggcugaccuacaccggcgccaucaagcucgacgacaaggaccccaacuucaaggaccaggugauccugcugaacaagcacaucgacgccuacaagacguucccgcccaccgagcccaagaaggacaagaagaagaaggcggacgagacccaggcccucccccagcggcagaagaagcagcagaccgucacgcugcugcccgccgccgaccucgacgacuucagcaagcagcugcagcaguccaugagcuccgcggacagcacccaggccuga

SEQ ID NO: 17532 - RNA, 1260 nt, Artificial Sequence
  SARS-CoV-2__MT252737.1__nucleocapsid protein (N) CDS gc
augagcgacaacggcccccagaaccagcgcaacgccccgcggaucaccuucgggggccccuccgacagcaccggguccaaccagaacggcgagcgcagcggggcccgguccaagcagcgccggccccagggccugcccaacaacacggcgagcugguucaccgcccucacccagcacggcaaggaggaccugaaguucccgcgcgggcagggcgugcccaucaacaccaacuccagccccgacgaccagaucggguacuaccggcgcgccacgcggcgcauccggggcggggacggcaagaugaaggaccugagcccccgcugguacuucuacuaccucggcaccgggccggaggccggccugcccuacggggccaacaaggacggcaucaucugggucgcgaccgagggcgcccugaacacccccaaggaccacaucgggacgcggaaccccgccaacaacgccgcgaucgugcuccagcugccgcagggcaccacccugcccaagggguucuacgccgagggcucccgcgggggcucccaggccagcucccggagcuccagccgcucccggaacagcucccgcaacagcacccccggcagcucccgggggacgagccccgcccgcauggccggcaacgggggcgacgcggcccucgcccugcugcuccuggaccggcugaaccagcucgaguccaagaugagcgggaagggccagcagcagcagggccagaccgugaccaagaaguccgccgccgaggcgagcaagaagccgcgccagaagcgcaccgccacgaaggccuacaacgucacccaggccuucgggcggcgcggccccgagcagacccaggggaacuucggcgaccaggagcugauccggcaggggaccgacuacaagcacuggccccagaucgcccaguucgcgcccuccgccagcgccuucuucggcaugucccgcaucggcauggaggugacgccgagcgggaccuggcugaccuacaccggcgccaucaagcucgacgacaaggaccccaacuucaaggaccaggugauccugcugaacaagcacaucgacgccuacaagacguucccgcccaccgagcccaagaaggacaagaagaagaaggcggacgagacccaggcccucccccagcggcagaagaagcagcagaucgucacccugcugcccgccgccgaccucgacgacuucuccaagcagcugcagcagagcauguccagcgcggacuccacgcaggccuga

SEQ ID NO: 17533 - RNA, 1260 nt, Artificial Sequence
  SARS-CoV-2__MT371047.1__nucleocapsid protein (N) CDS gc
augagcgacaacggcccccagaaccagcgcaacgccccgcggaucaccuucgggggccccuccgacagcaccggguccaaccagaacggcgagcgcagcggggcccgguccaagcagcgccggccccagggccugcccaacaacacggcgagcugguucaccgcccucacccagcacggcaaggaggaccugaaguucccgcgcgggcagggcgugcccaucaacaccaacuccagccccgacgaccagaucggguacuaccggcgcgccacgcggcgcauccggggcggggacggcaagaugaaggaccugagcccccgcugguacuucuacuaccucggcaccgggccggaggccggccugcccuacggggccaacaaggacggcaucaucugggucgcgaccgagggcgcccugaacacccccaaggaccacaucgggacgcggaaccccgccaacaacgccgcgaucgugcuccagcugccgcagggcaccacccugcccaagggguucuacgccgagggcucccgcgggggcucccaggccagcucccggagcuccagccgcucccggaacagcucccgcaacagcacccccggcagcucccgggggacgagccccgcccgcauggccggcaacgggggcgacgcggcccucgcccugcugcuccuggaccggcugaaccagcucgaguccaagaugagcgggaagggccagcagcagcagggccagaccgugaccaagaaguccgccgccgaggcgagcaagaagccgcgccagaagcgcaccgccacgaaggccuacaacgucacccaggccuucgggcggcgcggccccgagcagacccaggggaacuucggcgaccaggagcugauccggcaggggaccgacuacaagcacuggccccagaucgcccaguucgcgcccuccgccagcgccuucuucggcaugucccgcaucggcauggaggugacgccgagcgggaccuggcugaccuacaccggcgccaucaagcucgacgacaaggaccccaacuucaaggaccaggugauccugcugaacaagcacaucgacgccuacaagacguucccgcccaccgagcccaagaaggacaagaagaagaaggcggacgagacccaggcccucccccagcggcagaagaagcagcagaccgucacgcugcugcccgccuccgaccucgacgacuucagcaagcagcugcagcaguccaugagcuccgccgacagcacccaggcguga

SEQ ID NO: 17534 - RNA, 1260 nt, Artificial Sequence
  SARS-CoV-2__MT370850.1__nucleocapsid protein (N) CDS gc
augagcgacaacggcccccagaaccagcgcaacgccccgcggaucaccuucgggggccccuccgacagcaccggguccaaccagaacggcgagcgcagcggggcccgguccaagcagcgccggccccagggccugcccaacaacacggcgagcugguucaccgcccucacccagcacggcaaggaggaccugaaguucucccgcgggcagggcgugccgaucaacaccaacagcucccccgacgaccagaucggguacuaccggcgcgccacgcggcgcauccggggcggggacggcaagaugaaggaccugagcccccgcugguacuucuacuaccucggcaccgggcccgaggccggccugccguacggggccaacaaggacggcaucaucugggucgcgaccgagggcgcccugaacacccccaaggaccacaucgggacgcggaaccccgccaacaacgccgcgaucgugcuccagcugccccagggcaccacccugccgaagggguucuacgccgagggcucccgcgggggcagccaggccuccagccgguccagcucccgcagccggaacuccagccgcaacagcacccccggcuccagccgggggacgucccccgcccgcauggccggcaacgggggcgacgcggcccucgcccugcugcuccuggaccggcugaaccagcucgagagcaagauguccgggaagggccagcagcagcagggccagaccgugaccaagaaguccgccgccgaggcgagcaagaagccccgccagaagcgcaccgccacgaaggccuacaacgucacccaggccuucgggcggcgcggcccggagcagacccaggggaacuucggcgaccaggagcugauccggcaggggaccgacuacaagcacuggccccagaucgcccaguucgcgcccagcgccuccgccuucuucggcaugagccgcaucggcauggaggugacgcccuccgggaccuggcugaccuacaccggcgccaucaagcucgacgacaaggacccgaacuucaaggaccaggugauccugcugaacaagcacaucgacgccuacaagacguucccgcccaccgagcccaagaaggacaagaagaagaaggcggacgagacccaggcccucccccagcggcagaagaagcagcagaccgucacgcugcugcccgccgccgaccucgacgacuucagcaagcagcugcagcaguccaugagcuccgcggacagcacccaggccuga

SEQ ID NO: 17535 - RNA, 1260 nt, Artificial Sequence
  SARS-CoV-2__MT370876.1__nucleocapsid protein (N) CDS gc
augagcgacaacggcccccagaaccagcgcaacgccccgcggaucaccuucgggggccccuccgacagcaccggguccaaccagaacggcgagcgcagcggggcccgguccaagcagcgccggccccagggccugcccaacaacacggcgagcugguucaccgcccucacccagcacggcaaggaggaccugaaguucccgcgcgggcagggcgugcccaucaacaccaacuccagccccgacgaccagaucggguacuaccggcgcgccacgcggcgcauccggggcggggacggcaagaugaaggaccugagcccccgcugguacuucuacuaccucggcaccgggccggaggccggccugcccuacggggccaacaaggacggcaucaucugggucgcgaccgagggcgcccugaacacccccaaggaccacaucgggacgcggaaccccgccaacaacgccgcgaucgugcuccagcugccgcagggcaccacccugcccaagggguucuacgccgagggcucccgcgggggcucccaggccagcucccggagcuccagccgcucccggaacagcucccgcaacagcacccccggcagcucccgggggacgagccccgcccgcauggccggcaacgggggcgacgcggcccucgcccugcugcuccuggaccggcugaaccagcucgaguccaagaugagcgggaagggccagcagcagcagggccagaccgugaccaagaaguccgccgccgaggcgagcaagaagccgcgccagaagcgcaccgccacgaaggccuacaacgucacccaggccuucgggcggcgcggccccgagcagacccaggggaacuucggcgaccaggagcugauccggcaggggaccgacuacaagcacuggccccagaucgcccaguucgcgcccuccgccagcgccuucuucggcaugucccgcaucggcauggaggugacgccgagcgggaccuggcugaccuacaucggcgccaucaagcucgacgacaaggaccccaacuucaaggaccaggugauccugcugaacaagcacaucgacgccuacaagaccuucccgcccacggagcccaagaaggacaagaagaagaaggcggacgagacccaggcccucccccagcggcagaagaagcagcagaccgucacccugcugcccgccgccgaccucgacgacuucuccaagcagcugcagcagagcauguccagcgcggacuccacgcaggccuga

SEQ ID NO: 17536 - RNA, 1260 nt, Artificial Sequence
  SARS-CoV-2__MT370904.1__nucleocapsid protein (N) CDS gc
augagcgacaacggcccccagaaccagcgcaacgccccgcggaucaccuucgggggccccuccgacagcaccggguccaaccagaacggcgagcgcagcggggcccgguccaagcagcgccggccccagggccugcccaacaacacggcgagcugguucaccgcccucacccagcacggcaaggaggaccugaaguucccgcgcgggcagggcgugcccaucaacaccaacuccagccccgacgaccagaucggguacuaccggcgcgccacgcggcgcauccggggcggggacggcaagaugaaggaccugagcccccgcugguacuucuacuaccucggcaccgggccggaggccggccugcccuacggggccaacaaggacggcaucaucugggucgcgaccgagggcgcccugaacacccccaaggaccacaucgggacgcggaaccccgccaacaacgccgcgaucgugcuccagcugccgcagggcaccacccugcccaagggguucuacgccgagggcucccgcgggggcucccaggccagcucccggagcuccagccgcucccggaacagcucccgcaacagcacccccggcagcucccgggggacgagccccgcccgcauggccggcaacgggggcgacgcggcccucgcccugcugcuccuggaccggcugaaccagcucgaguccaagaugagcgggaagggccagcagcagcagggccagaccgugaccaagaaguccgccagcgaggccuccaagaagccgcgccagaagcgcaccgcgacgaaggccuacaacgucacccaggccuucgggcggcgcggccccgagcagacccaggggaacuucggcgaccaggagcugauccggcaggggaccgacuacaagcacuggccccagaucgcccaguucgcccccagcgcguccgccuucuucggcaugagccgcaucggcauggaggugacgccguccgggaccuggcugaccuacaccggcgccaucaagcucgacgacaaggaccccaacuucaaggaccaggugauccugcugaacaagcacaucgacgccuacaagacguucccgcccaccgagcccaagaaggacaagaagaagaaggccgacgagacccaggcgcucccccagcggcagaagaagcagcagaccgucacgcugcugcccgccgccgaccucgacgacuucagcaagcagcugcagcaguccaugagcuccgccgacagcacccaggcguga

SEQ ID NO: 17537 - RNA, 1260 nt, Artificial Sequence
  SARS-CoV-2__MT370948.1__nucleocapsid protein (N) CDS gc
augagcgacaacggcccccagaaccagcgcaacgccccgcggaucaccuucgggggccccuccgacagcaccggguccaaccagaacggcgagcgcagcggggcccgguccaagcagcgccggccccagggccugcccaacaacacggcgagcugguucaccgcccucacccagcacggcaaggaggaccugaaguucccgcgcgggcagggcgugcccaucaacaccaacuccagccccgacgaccagaucggguacuaccggcgcgccacgcggcgcauccggggcggggacggcaagaugaaggaccugagcccccgcugguacuucuacuaccucggcaccgggccggaggccggccugcccuacggggccaacaaggacggcaucaucugggucgcgaccgagggcgcccugaacacccccaaggaccacaucgggacgcggaaccccgccaacaacgccgcgaucgugcuccagcugccgcagggcaccacccugcccaagggguucuacgccgagggcucccgcgggggcucccaggccagcucccggagcuccagccgcucccggaacagcucccgcaacagcacccccggcagcucccgggggacgagccccgcccgcauggccggcaacgggggcgacgcggcccucgcccugcugcuccuggaccggcugaaccagcucgaguccaagaugagcgggaagggccagcagcagcagggccagaccgugaccaagaaguccgccgccgaggcgagcaagaagccgcgccagaagcgcaccgccacgaaggccuacaacgucacccaggccuucgggcggcgcggccccgagcagacccaggggaacuucggcgaccaggagcugauccggcaggggaccgacuacaagcacuggccccagaucgcccaguucgcgcccuccgccagcgccuucuucggcaugucccgcaucggcauggaggugacgccgagcgggaccuggcugaccuacaccggcgccaucaagcucgacgacaaggaccccaacuucaaggaccaggugauccugcugaacaagcacaucgacgccuacaagacguucccgcccaccgagcccaagaaggacaagaagaagaaggcggacgagacccaggcccucccccagcggcagaagaagcagcagaccgucacgcugcugcccgccgccgaccucgacgacuucuccaagcagcugcagcagagcauguccaucgcggacagcacccaggccuga

SEQ ID NO: 17538 - RNA, 1260 nt, Artificial Sequence
  SARS-CoV-2__MT370961.1__nucleocapsid protein (N) CDS gc
augagcgacaacggcccccagaaccagcgcaacgccccgcggaucaccuucgggggccccuccgacagcaccggguccaaccagaacggcgagcgcagcggggcccgguccaagcagcgccggccccagggccugcccaacaacacggcgagcugguucaccgcccucacccagcacggcaaggaggaccugaaguucccgcgcgggcagggcgugcccaucaacaccaacuccagccccgacgaccagaucggguacuaccggcgcgccacgcggcgcauccggggcggggacggcaagaugaaggaccugagcccccgcugguacuucuacuaccucggcaccgggccggaggccggccugcccuacggggccaacaaggacggcaucaucugggucgcgaccgagggcgcccugaacacccccaaggaccacaucgggacgcggaaccccgccaacaacgccgcgaucgugcuccagcugccgcagggcaccacccugcccaagggguucuacgccgagggcagccgcgggggcucccaggccagcucccggagcuccagccgcucccggaacagcucccgcaacagcacccccggcagcucccgggggacgagccccgcccgcauggccggcaacgggggcgacgcggcccucgcccugcugcuccuggaccggcugaaccagcucgagcgcaagauguccgggaagggccagcagcagcagggccagaccgugaccaagaaguccgccgccgaggcguccaagaagccgcgccagaagcggaccgccacgaaggccuacaacgucacccaggccuucgggcgccggggccccgagcagacccaggggaacuucggcgaccaggagcugauccgccaggggaccgacuacaagcacuggccccagaucgcccaguucgcgcccagcgccuccgccuucuucggcaugagccggaucggcauggaggugacgccguccgggaccuggcugaccuacaccggcgccaucaagcucgacgacaaggaccccaacuucaaggaccaggugauccugcugaacaagcacaucgacgccuacaagacguucccgcccaccgagcccaagaaggacaagaagaagaaggcggacgagacccaggcccucccccagcgccagaagaagcagcagaccgucacgcugcugcccgccgccgaccucgacgacuucagcaagcagcugcagcaguccaugagcuccgcggacagcacccaggccuga

SEQ ID NO: 17539 - RNA, 1260 nt, Artificial Sequence
  SARS-CoV-2__MT371035.1__nucleocapsid protein (N) CDS gc
augagcgacaacggcccccagaaccagcgcaacgccccgcggaucaccuucgggggccccuccgacagcaccggguccaaccagaacggcgagcgcagcggggcccgguccaagcagcgccggccccagggccugcccaacaacacggcgagcugguucaccgcccucacccagcacggcaaggaggaccugaaguucccgcgcgggcagggcgugcccaucaacaccaacuccagccccgacgaccagaucggguacuaccggcgcgccacgcggcgcauccggggcggggacggcaagaugaaggaccugagcccccgcugguacuucuacuaccucggcaccgggccggaggccggccugcccuacggggccaacaaggacggcaucaucugggucgcgaccgagggcgcccugaacacccccaaggaccacaucgggacgcggaaccccgccaacaacgccgcgaucgugcuccagcugccgcagggcaccacccugcccaagggguucuacgccgagggcucccgcgggggcucccaggccagcucccggagcuccagccgcucccggaacagcucccgcaacagcacccccggcagcucccgggggacgagccccgcccgcauggccggcaacgggggcgacgcggcccucgcccugcugcuccuggaccggcugaaccagcucgaguccaagaugagcgggaagggccagcagcagcagggccagaccgugaccaagaaguccgccgccgaggcgagcaagaagccgcgccagaagcgcaccgccacgaaggccuacaacgucacccaggccuucgggcggcgcggccccgagcagacccaggggaacuucggcgaccaggagcugauccggcaggggaccgacuacaagcacuggccccagaucgcccaguucgcgcccuccgccagcgccuucuucggcaugucccgcaucggcaucgaggugacgccgagcgggaccuggcugaccuacaccggcgccaucaagcucgacgacaaggaccccaacuucaaggaccaggugauccugcugaacaagcacaucgacgccuacaagacguucccgcccaccgagcccaagaaggacaagaagaagaaggcggacgagacccaggcccucccccagcggcagaagaagcagcagaccgucacgcugcugcccgccgccgaccucgacgacuucuccaagcagcugcagcagagcauguccagcgcggacuccacccaggccuga

SEQ ID NO: 17540 - RNA, 1260 nt, Artificial Sequence
  SARS-CoV-2__MT371038.1__nucleocapsid protein (N) CDS gc
augagcgacaacggcccccagaaccagcgcaacgccccgcggaucaccuucgggggccuguccgacagcaccggguccaaccagaacggcgagcgcagcggggcccgguccaagcagcgccggccccagggccuccccaacaacacggcgagcugguucaccgcccugacccagcacggcaaggaggaccugaaguucccccgcgggcagggcgugccgaucaacaccaacuccagccccgacgaccagaucggguacuaccggcgcgccacgcggcgcauccggggcggggacggcaagaugaaggaccucagcccccgcugguacuucuacuaccugggcaccgggcccgaggccggccugccguacggggccaacaaggacggcaucaucugggucgcgaccgagggcgcccucaacacccccaaggaccacaucgggacgcggaaccccgccaacaacgccgcgaucgugcugcagcugccccagggcaccacccucccgaagggguucuacgccgagggcagccgcgggggcucccaggccagcucccggagcuccagccgcucccggagcuccagccgcaacagcacccccggcuccagccgggggacgucccccgcccgcauggccggcaacgggggcgacgcggcccuggcccugcuccugcuggaccggcucaaccagcuggagagcaagauguccgggaagggccagcagcagcagggccagaccgugaccaagaaguccgccgccgaggcguccaagaagccccgccagaagcgcaccgccacgaaggccuacaacgucacccaggccuucgggcggcgcggcccggagcagacccaggggaacuucggcgaccaggagcugauccggcaggggaccgacuacaagcacuggccccagaucgcccaguucgcgcccagcgccuccgccuucuucggcaugagccgcaucggcauggaggugacgcccuccgggaccuggcucaccuacaccggcgccaucaagcuggacgacaaggacccgaacuucaaggaccaggugauccugcucaacaagcacaucgacgccuacaagacguucccgcccaccgagcccaagaaggacaagaagaagaaggcggacgagacccaggcccugccccagcggcagaagaagcagcagaccgucacgcugcuccccgccgccgaccuggacgacuucagcaagcagcugcagcaguccaugagcuccgcggacagcacccaggccuga

SEQ ID NO: 17541 - RNA, 1260 nt, Artificial Sequence
  SARS-CoV-2__MT358690.1__nucleocapsid protein (N) CDS gc
augagcgacaacggcccccagaaccagcgcaacgccccgcggaucaccuucgggggccccuccgacagcaccggguccaaccagaacggcgagcgcagcggggcccgguccaagcagcgccggccccagggccugcccaacaacacggcgagcugguucaccgcccucacccagcacggcaaggaggaccugaaguucccgcgcgggcagggcgugcccaucaacaccaacuccagccccgacgaccagaucggguacuaccggcgcgccacgcggcgcauccggggcggggacggcaagaugaaggaccugagcccccgcugguacuucuacuaccucggcaccgggccggaggccggccugcccuacggggccaacaaggacggcaucaucugggucgcgaccgagggcgcccugaacacccccaaggaccacaucgggacgcggaaccccgccaacaacgccgcgaucgugcuccagcugccgcagggcaccacccugcccaagggguucuacgccgagggcucccgcgggggcucccaggccagcucccggagcuccagccgcucccggaacagcucccgcaacagcacccccggcagcucccgggggacgagccccggccgcauggccgggaacggcggggacgccgcgcucgcccugcugcuccuggaccggcugaaccagcucgaguccaagaugagcggcaagugccagcagcagcagggccagaccguggccaagaaguccgccgccgaggcgagcaagaagccgcgccagaagcgcaccgccaccaaggccuacaacgucacgcaggccuucgggcggcgcggccccgagcagacccaggggaacuucggcgaccaggagcugauccggcaggggaccgacuacaagcacuggccccagaucgcccaguucgcgcccuccgccagcgccuucuucggcaugucccgcaucggcauggaggugaccccgagcgggacguggcugaccuacaccggcgccaucaagcucgacgacaaggaccccaacuucaaggaccaggugauccugcugaacaagcacaucgacgccuacaagaccuucccgcccacggagcccaagaaggacaagaagaagaaggcggacgagacccaggcccucccccagcggcagaagaagcagcagaccgucacccugcugcccgccgccgaccucgacgacuucuccaagcagcugcagcagagcauguccagcgcggacuccacgcaggccuga

SEQ ID NO: 17542 - RNA, 1260 nt, Artificial Sequence
  SARS-CoV-2__MT358737.1__nucleocapsid protein (N) CDS gc
augagcgacaacggcccccagaaccagcgcaacgccccgcggaucaccuucgggggccccuccgacagcaccggguccaaccagaacggcgagcgcagcggggcccgguccaagcagcgccggccccagggccugcccaacaacacggcgagcugguucaccgcccucacccagcacggcaaggaggaccugaaguucccgcgcgggcagggcgugcccaucaacaccaacuccagccccgacgaccagaucggguacuaccggcgcgccacgcggcgcauccggggcggggacggcaagaugaaggaccugagcccccgcugguacuucuacuaccucggcaccgggccggaggccggccugcccuacggggccaacaaggacggcaucaucugggucgcgaccgagggcgcccugaacacccccaaggaccacaucgggacgcggaaccccgccaacaacgccgcgaucgugcuccagcugccgcagggcaccacccugcccaagggguucuacgccgagggcucccgcgggggcucccaggccagcucccggagcuccagccgcucccggaacagcucccgcaacagcacccccggcagcucccgggggacgagccccgcccgcauggccggcaacgggggcgacgcggcccucgcccugcugcuccuggaccggcugaaccagcucgaguccaagaugagcgggaagggccagcagcagcagggccagaccgugaccaagaaguccgccgccgaggcgagcaagaagccgcgccagaagcgcaccgccacgaaggccuacaacgucacccaggccuucgggcggcgcggccccgagcagacccaggggaacuucggcgaccaggagcugauccggcaggggaccgacuacaagcacuggccccagaucgcccaguucgcgcccuccgccagcgccuucuucggcaugucccgcaucggcauggaggugacgccgagcgggaccuggcugaccuacaccggcgccaucaagcucggggacaaggaccccaacuucaaggaccaggugauccugcugaacaagcacaucgacgccuacaagacguucccgcccaccgagcccaagaaggacaagaagaagaaggcggacgagacccaggcccucccccagcggcagaagaagcagcagaccgucacgcugcugcccgccgccgaccucgacgacuucuccaagcagcugcagcagagcauguccagcgcggacuccacccaggccuga

SEQ ID NO: 17543 - RNA, 1260 nt, Artificial Sequence
  SARS-CoV-2__MT334533.1__nucleocapsid protein (N) CDS gc
augagcgacaacggcccccagaaccagcgcaacgccccgcggaucaccuucgggggccccuccgacagcaccggguccaaccagaacggcgagcgcagcggggcccgguccaagcagcgccggccccagggccugcccaacaacacggcgagcugguucaccgcccucacccagcacggcaaggaggaccugaaguucccgcgcgggcagggcgugcccaucaacaccaacuccagccccgacgaccagaucggguacuaccggcgcgccacgcggcgcauccggggcggggacggcaagaugaaggaccugagcccccgcugguacuucuacuaccucggcaccgggccggaggccggccugcccuacggggccaacaaggacggcaucaucugggucgcgaccgagggcgcccugaacacccccaaggaccacaucgggacgcggaaccccagcaacaacgccgccaucgugcuccagcugccgcagggcaccacccugcccaagggguucuacgcggagggcucccgcgggggcagccaggccuccagccgguccagcucccgcagccggaacuccagccgcaacagcacccccggcuccagccgggggacgucccccgcccgcauggccggcaacgggggcgacgccgcgcucgcccugcugcuccuggaccggcugaaccagcucgagagcaagauguccgggaagggccagcagcagcagggccagaccgugaccaagaaguccgccgccgaggccuccaagaagccgcgccagaagcgcaccgcgacgaaggccuacaacgucacccaggccuucgggcggcgcggccccgagcagacccaggggaacuucggcgaccaggagcugauccggcaggggaccgacuacaagcacuggccccagaucgcccaguucgcccccagcgcguccgccuucuucggcaugagccgcaucggcauggaggugacgccguccgggaccuggcugaccuacaccggcgccaucaagcucgacgacaaggaccccaacuucaaggaccaggugauccugcugaacaagcacaucgacgccuacaagacguucccgcccaccgagcccaagaaggacaagaagaagaaggccgacgagacccaggcgcucccccagcggcagaagaagcagcagaccgucacgcugcugcccgccgccgaccucgacgacuucagcaagcagcugcagcaguccaugagcuccgccgacagcacccaggcguga

SEQ ID NO: 17544 - RNA, 1260 nt, Artificial Sequence
  SARS-CoV-2__MT293159.1__nucleocapsid protein (N) CDS gc
augagcgacaacggcccccagaaccagcgcaacgccccgcggaucaccuucgggggccccuccgacagcaccggguccaaccagaacggcgagcgcagcggggcccgguccaagcagcgccggccccagggccugcccaacaacacggcgagcugguucaccgcccucacccagcacggcaaggaggaccugaaguucccgcgcgggcagggcgugcccaucaacaccaacuccagccccgacgaccagaucggguacuaccggcgcgccacgcggcgcauccggggcggggacggcaagaugaaggaccugagcccccgcugguacuucuacuaccucggcaccgggccggaggccggccugcccuacggggccaacaaggacggcaucaucugggucgcgaccgagggcgcccugaacacccccaaggaccacaucgggacgcggaaccccgccaacaacgccgcgaucgugcuccagcugccgcagggcaccacccugcccaagggguucuacgccgagggcucccgcgggggcucccaggccagcucccggagcuccagccgcucccggaacagcucccgcaacagcacccccggcagcucccgggggacgagccccgccaccauggccggcaacgggggcgacgcggcccucgcccugcugcuccuggaccgccugaaccagcucgaguccaagaugagcgggaagggccagcagcagcagggccagaccgugaccaagaaguccgccgccgaggcgagcaagaagccgcggcagaagcgcacggccaccaaggccuacaacgucacccaggccuucgggcgccggggccccgagcagacccaggggaacuucggcgaccaggagcugauccgccaggggacggacuacaagcacuggccccagaucgcccaguucgcgcccuccgccagcgccuucuucggcaugucccggaucggcauggaggugaccccgagcgggaccuggcugaccuacacgggcgccaucaagcucgacgacaaggaccccaacuucaaggaccaggugauccugcugaacaagcacaucgacgccuacaagaccuucccgcccaccgagcccaagaaggacaagaagaagaaggcggacgagacccaggcccucccccagcgccagaagaagcagcagacggucacccugcugcccgccgccgaccucgacgacuucuccaagcagcugcagcagagcauguccagcgcggacuccacccaggccuga

SEQ ID NO: 17545 - RNA, 1260 nt, Artificial Sequence
  SARS-CoV-2__MT293178.1__nucleocapsid protein (N) CDS gc
augagcgacaacggcacccagaaccagcgcaacgcgccccggaucaccuucgggggcccguccgacacgaccgggagcaaccagaacggcgagcgcuccggggcccggagcaagcagcgccggccccagggccugcccaacaacaccgccuccugguucaccgcccucacgcagcacggcaaggaggaccugaaguucccccgcgggcagggcgugccgaucaacaccaacagcucccccgacgaccagaucggguacuaccggcgcgccacccggcgcauccggggcggggacggcaagaugaaggaccugagcccccgcugguacuucuacuaccucggcaccgggcccgaggccggccugccguacggggccaacaaggacggcaucaucugggucgcgacggagggcgcccugaacacccccaaggaccacaucgggacccggaaccccgccaacaacgccgcgaucgugcuccagcugccccagggcaccacgcugccgaagggguucuacgccgagggcucccgcgggggcagccaggccuccagccgguccagcucccgcagccggaacuccagccgcaacuccacccccggcagcagccgggggaccucccccgcccgcauggccggcaacgggggcgacgcggcccucgcccugcugcuccuggaccggcugaaccagcucgagagcaagauguccgggaagggccagcagcagcagggccagaccgugacgaagaaguccgccgccgaggcgagcaagaagccccgccagaagcgcaccgccaccaaggccuacaacgucacccaggccuucgggcggcgcggcccggagcagacgcaggggaacuucggcgaccaggagcugauccggcaggggaccgacuacaagcacuggccccagaucgcccaguucgcgcccagcgccuccgccuucuucggcaugagccgcaucggcauggaggugacccccuccgggaccuggcugacguacaccggcgccaucaagcucgacgacaaggacccgaacuucaaggaccaggugauccugcugaacaagcacaucgacgccuacaagaccuucccgcccaccgagcccaagaaggacaagaagaagaaggcggacgagacgcaggcccucccccagcggcagaagaagcagcagaccgucacccugcugcccgccgccgaccucgacgacuucagcaagcagcugcagcaguccaugagcuccgcggacagcacccaggccuga

SEQ ID NO: 17546 - RNA, 1260 nt, Artificial Sequence
  SARS-CoV-2__MT263411.1__nucleocapsid protein (N) CDS gc
augagcgacaacggcccccagaaccagcgcaacgccccgcggaucaccuucgggggccccuccgacagcaccggguccaaccagaacggcgagcgcagcggggcccgguccaagcagcgccggccccagggccugcccaacaacacggcgagcugguucaccgcccucacccagcacggcaaggaggaccugaaguucccgcgcgggcagggcgugcccaucaacaccaacuccagccccgacgaccagaucggguacuaccggcgcgccacgcggcgcauccggggcggggacggcaagaugaaggaccugagcccccgcugguacuucuacuaccucggcaccgggccggaggccggccugcccuacggggccaacaaggacggcaucaucugggucgcgaccgagggcgcccugaacacccccaaggaccacaucgggacgcggaaccccgccaacaacgccgcgaucgugcuccagcugccgcagggcaccacccugcccaagggguucuacgccgagggcagccgcgggggcucccaggccagcucccggagcuccagccgcucccggaacagcucccgcaacagcacccccggcagcucccgggggacgagccccgcccgcauggccggcaacgggggcgacgcggcccucgcccugcugcuccuggaccggcugaaccagcucgagaccaagauguccgggaagggccagcagcagcagggccagaccgugaccaagaaguccgccgccgaggcguccaagaagccgcgccagaagcgcacggccaccaaggccuacaacgucacccaggccuucgggcggcgcggccccgagcagacccaggggaacuucggcgaccaggagcugauccggcaggggacggacuacaagcacuggccccagaucgcccaguucgcgcccagcgccuccgccuucuucggcaugagccgcaucggcauggaggugaccccguccgggaccuggcugaccuacacgggcgccaucaagcucgacgacaaggaccccaacuucaaggaccaggugauccugcugaacaagcacaucgacgccuacaagaccuucccgcccaccgagcccaagaaggacaagaagaagaaggcggacgagacccaggcccucccccagcggcagaagaagcagcagacggucacccugcugcccgccgccgaccucgacgacuucagcaagcagcugcagcaguccaugagcuccgcggacagcacccaggccuga

SEQ ID NO: 17547 - RNA, 1260 nt, Artificial Sequence
  SARS-CoV-2__MT259237.1__nucleocapsid protein (N) CDS gc
augagcuacaacggcccccagaaccagcgcaacgccccgcggaucaccuucgggggccccuccgacagcaccggguccaaccagaacggcgagcgcagcggggcccgguccaagcagcgccggccccagggccugcccaacaacacggcgagcugguucaccgcccucacccagcacggcaaggaggaccugaaguucccgcgcgggcagggcgugcccaucaacaccaacuccagccccgacgaccagaucggguacuaccggcgcgccacgcggcgcauccggggcggggacggcaagaugaaggaccugagcccccgcugguacuucuacuaccucggcaccgggccggaggccggccugcccuacggggccaacaaggacggcaucaucugggucgcgaccgagggcgcccugaacacccccaaggaccacaucgggacgcggaaccccgccaacaacgccgcgaucgugcuccagcugccgcagggcaccacccugcccaagggguucuacgccgagggcucccgcgggggcucccaggccagcucccggagcuccagccgcucccggaacagcucccgcaacagcacccccggcagcucccgggggacgagccccgcccgcauggccggcaacgggggcgacgcggcccucgcccugcugcuccuggaccggcugaaccagcucgaguccaagaugagcgggaagggccagcagcagcagggccagaccgugaccaagaaguccgccgccgaggcgagcaagaagccgcgccagaagcgcaccgccacgaaggccuacaacgucacccaggccuucgggcggcgcggccccgagcagacccaggggaacuucggcgaccaggagcugauccggcaggggaccgacuacaagcacuggccccagaucgcccaguucgcgcccuccgccagcgccuucuucggcaugucccgcaucggcauggaggugacgccgagcgggaccuggcugaccuacaccggcgccaucaagcucgacgacaaggaccccaacuucaaggaccaggugauccugcugaacaagcacaucgacgccuacaagacguucccgcccaccgagcccaagaaggacaagaagaagaaggcggacgagacccaggcccucccccagcggcagaagaagcagcagaccgucacgcugcugcccgccgccgaccucgacgacuucuccaagcagcugcagcagagcauguccagcgcggacuccacccaggccuga

SEQ ID NO: 17548 - RNA, 1260 nt, Artificial Sequence
  SARS-CoV-2__MT259269.1__nucleocapsid protein (N) CDS gc
augagcgacgacggcccccagaaccagcgcaacgccccgcggaucaccuucgggggccccuccgacagcaccggguccaaccagaacggcgagcgcagcggggcccgguccaagcagcgccggccccagggccugcccaacaacacggcgagcugguucaccgcccucacccagcacggcaaggaggaccugaaguucccgcgcgggcagggcgugcccaucaacaccaacuccagccccgacgaccagaucggguacuaccggcgcgccacgcggcgcauccggggcggggacggcaagaugaaggaccugagcccccgcugguacuucuacuaccucggcaccgggccggaggccggccugcccuacggggccaacaaggacggcaucaucugggucgcgaccgagggcgcccugaacacccccaaggaccacaucgggacgcggaaccccgccaacaacgccgcgaucgugcuccagcugccgcagggcaccacccugcccaagggguucuacgccgagggcucccgcgggggcucccaggccagcucccggagcuccagccgcucccggaacagcucccgcaacagcacccccggcagcucccgggggacgagccccgcccgcauggccggcaacgggggcgacgcggcccucgcccugcugcuccuggaccggcugaaccagcucgaguccaagaugagcgggaagggccagcagcagcagggccagaccgugaccaagaaguccgccgccgaggcgagcaagaagccgcgccagaagcgcaccgccacgaaggccuacaacgucacccaggccuucgggcggcgcggccccgagcagacccaggggaacuucggcgaccaggagcugauccggcaggggaccgacuacaagcacuggccccagaucgcccaguucgcgcccuccgccagcgccuucuucggcaugucccgcaucggcauggaggugacgccgagcgggaccuggcugaccuacaccggcgccaucaagcucgacgacaaggaccccaacuucaaggaccaggugauccugcugaacaagcacaucgacgccuacaagacguucccgcccaccgagcccaagaaggacaagaagaagaaggcggacgagacccaggcccucccccagcggcagaagaagcagcagaccgucacgcugcugcccgccgccgaccucgacgacuucuccaagcagcugcagcagagcauguccagcgcggacuccacccaggccuga

SEQ ID NO: 17549 - RNA, 1260 nt, Artificial Sequence
  SARS-CoV-2__MT259274.1__nucleocapsid protein (N) CDS gc
augagcgacaacggcccccagaaccagcgcaacgccccgcggaucaccuucgggggccccuccgacagcaccggguccaaccagaacggcgagcgcagcgggacgcgguccaagcagcgccggccccagggccugcccaacaacaccgccagcugguucaccgcgcucacccagcacggcaaggaggaccugaaguucccgcgcgggcagggcgugcccaucaacacgaacuccagccccgacgaccagaucggguacuaccggcgcgccacccggcgcauccggggcggggacggcaagaugaaggaccugagcccccgcugguacuucuacuaccucggcaccgggccggaggccggccugcccuacggggccaacaaggacggcaucaucugggucgccaccgagggcgcgcugaacacgcccaaggaccacaucgggacccggaaccccgccaacaacgccgccaucgugcuccagcugccgcagggcaccacccugcccaagggguucuacgcggagggcucccgcgggggcucccaggccagcucccggagcuccagccgcucccggaacagcucccgcaacagcacgcccggcagcucccgggggaccagccccgcccgcauggccggcaacgggggcgacgccgcgcucgcccugcugcuccuggaccggcugaaccagcucgaguccaagaugagcgggaagggccagcagcagcagggccagaccgugaccaagaaguccgccgccgaggccagcaagaagccgcgccagaagcgcacggcgaccaaggccuacaacgucacccaggccuucgggcggcgcggccccgagcagacccaggggaacuucggcgaccaggagcugauccggcaggggacggacuacaagcacuggccccagaucgcccaguucgcccccuccgcgagcgccuucuucggcaugucccgcaucggcauggaggugaccccgagcgggaccuggcugaccuacacgggcgccaucaagcucgacgacaaggaccccaacuucaaggaccaggugauccugcugaacaagcacaucgacgccuacaagaccuucccgcccaccgagcccaagaaggacaagaagaagaaggccgacgagacccaggcgcucccccagcggcagaagaagcagcagacggucacccugcugcccgccgccgaccucgacgacuucuccaagcagcugcagcagagcauguccagcgccgacuccacccaggcguga

SEQ ID NO: 17550 - RNA, 1260 nt, Artificial Sequence
  SARS-CoV-2__MT159718.2__nucleocapsid protein (N) CDS gc
augagcgacaacggcccccagaaccagcgcaacgccccgcggaucaccuucgggggccccuccgacagcaccggguccaaccagaacggcgagcgcagcggggcccgguccaagcagcgccggccccagggccugagcaacaacacggcguccugguucaccgcccucacccagcacggcaaggaggaccugaaguucccccgcgggcagggcgugccgaucaacaccaacagcucccccgacgaccagaucggguacuaccggcgcgccacgcggcgcauccggggcggggacggcaagaugaaggaccugagcccccgcugguacuucuacuaccucggcaccgggcccgaggccggccugccguacggggccaacaaggacggcaucaucugggucgcgaccgagggcgcccugaacacccccaaggaccacaucgggacgcggaaccccgccaacaacgccgcgaucgugcuccagcugccccagggcaccacccugccgaagggguucuacgccgagggcucccgcgggggcagccaggccuccagccgguccagcucccgcagccggaacuccagccgcaacagcacccccggcuccagccgggggacgucccccgcccgcauggccggcaacgggggcgacgcggcccucgcccugcugcuccuggaccggcugaaccagcucgagagcaagauguccgggaagggccagcagcagcagggccagaccgugaccaagaaguccgccgccgaggcgagcaagaagccccgccagaagcgcaccgccacgaaggccuacaacgucacccaggccuucgggcggcgcggcccggagcagacccaggggaacuucggcgaccaggagcugauccggcaggggaccgacuacaagcacuggccccagaucgcccaguucgcgcccagcgccuccgccuucuucggcaugagccgcaucggcauggaggugacgcccuccgggaccuggcugaccuacaccggcgccaucaagcucgacgacaaggacccgaacuucaaggaccaggugauccugcugaacaagcacaucgacgccuacaagacguucccgcccaccgagcccaagaaggacaagaagaagaaggcggacgagacccaggcccucccccagcggcagaagaagcagcagaccgucacgcugcugcccgccgccgaccucgacgacuucagcaagcagcugcagcaguccaugagcuccgcggacagcacccaggccuga

SEQ ID NO: 17551 - RNA, 1260 nt, Artificial Sequence
  SARS-CoV-2__MT135043.1__nucleocapsid protein (N) CDS gc
augagcgacaacggcccccagaaccagcgcaacgccccgcggaucaccuucgggggccccuccgacagcaccggguccaaccagaacggcgagcgcagcggggcccgguccaagcagcgccggccccagggccugcccaacaacacggcgagcugguucaccgcccucacccagcacggcaaggaggaccugaaguucccgcgcgggcagggcgugcccaucaacaccaacuccagccccgacgaccagaucggguacuaccggcgcgccacgcggcgcauccggggcggggacggcaagaugaaggaccugagcccccgcugguacuucuacuaccucggcaccgggccggaggccggccugcccuacggggccaacaaggacggcaucaucugggucgcgaccgagggcgcccugaacacccccaaggaccacaucgggacgcggaaccccgccaacaacgccgcgaucgugcuccagcugccgcagggcaccacccugcccaagggguucuacgccgagggcucccgcgggggcucccaggccagcucccggagcuccagccgcucccggaacagcucccgcaacagcacccccggcagcucccgggggacgagccccgcccgcauggccggcaacgggggcgacgcggcccucgcccugcugcuccuggaccggcugaaccagcucgaguccaagaugagcgggaagggccagcagcagcagggccagaccgugaccaagaaguccgccgccgaggcgagcaagaagccgcgccagaagcgcaccgccacgaaggccuacaacgucacccaggccuucgggcggcgcggccccgagcagacccaggggaacuucggcgaccaggagcugauccggcaggggaccgacuacaagcacuggccccagaucgcccaguucgcgcccuccgccagcgccuucuucggcaugucccgcaucggcauggaggugacgccgagcgggaccuggcugaccuacaccggcgccaucaagcucgacgacaaggugcccaacuucaaggaccaggucauccugcugaacaagcacaucgacgccuacaagacguucccgcccaccgagcccaagaaggacaagaagaagaaggcggacgagacccaggcccucccccagcggcagaagaagcagcagaccgugacgcugcugcccgccgccgaccucgacgacuucuccaagcagcugcagcagagcauguccagcgcggacuccacccaggccuga

SEQ ID NO: 17552 - RNA, 249 nt, Artificial Sequence
  MERS-CoV/MERS-CoV-Jeddah-human-1__KF958702.1__envelope protein (E) CDS gc
augcugcccuucgugcaggagcgcaucggccucuucaucgucaacuucuucaucuucaccguggugugcgccaucacccugcuggucugcauggccuuccucacggcgacccggcugugcgugcagugcaugaccggguucaacacccugcucgugcagcccgcccuguaccuguacaacacgggccgcagcgucuacgugaaguuccaggacuccaagccgccccucccgcccgacgaguggguguga

SEQ ID NO: 17553 - RNA, 249 nt, Artificial Sequence; identical to SEQ ID NO: 17552
  MERS-CoV/Al-Hasa_4_2013__KF186564.1__envelope protein (E) CDS gc

SEQ ID NO: 17554 - RNA, 249 nt, Artificial Sequence; identical to SEQ ID NO: 17552
  MERS-CoV/Riyadh_14_2013__KJ156934.1__envelope protein (E) CDS gc

SEQ ID NO: 17555 - RNA, 249 nt, Artificial Sequence; identical to SEQ ID NO: 17552
  MERS-CoV/England 1__NC_038294.1__envelope protein (E) CDS gc

SEQ ID NO: 17556 - RNA, 231 nt, Artificial Sequence
  SARS-CoV/Tor2__NC_004718.3__envelope protein (E) CDS gc
auguacagcuucguguccgaggagaccggcacccugaucgucaacagcgugcuccuguuccuggccuucguggucuuccuccuggugacgcuggccauccucaccgcgcugcgccugugcgccuacugcugcaacaucgugaacgucucccucgugaagcccaccguguacgucuacagccgggugaagaaccugaacuccagcgagggggugccggaccugcucgucuga

SEQ ID NO: 17557 - RNA, 255 nt, Artificial Sequence
  HCoV/OC43__NC_006213.1__envelope protein (E) CDS gc
auguucauggccgacgccuaccuggcggacaccgugugguacgucggccagaucaucuucaucguggccaucugccuccuggugaccaucgucgugguggccuuccuggccacguucaagcucugcauccagcugugcgggaugugcaacacccugguccucagccccuccaucuacguguucaaccgcggccggcaguucuacgaguucuacaacgacgugaagccgcccguccuggacguggacgacguguga

SEQ ID NO: 17558 - RNA, 249 nt, Artificial Sequence
  HCoV/HKU1__NC_006577.2__envelope protein (E) CDS gc
augguggaccuguucuucaacgacaccgccugguacaucggccagauccucgugcuggugcuguucugccucaucagccugaucuucguggucgccuuccuggcgaccaucaagcucugcaugcagcugugcggguucugcaacuucuucaucaucucccccagcgccuacguguacaagcgcggcaugcagcuguacaaguccuacagcgagcaggucaucccgcccacguccgacuaccucaucuga

SEQ ID NO: 17559 - RNA, 234 nt, Artificial Sequence
  HCoV/229E/BN1/GER/2015__KU291448.1__envelope protein (E) CDS gc
auguuccugaagcucguggacgaccacgcccugaucgucaacgugcugaucuggugcgugguccucaucgugauccugcuggugugcaucaccaucaucaagcucaucaagcugugcuucacgugccacauguucugcaaccgcaccgucuacggccccaucaagaacguguaccacaucuaccagagcuacaugcacaucgacccguuccccaagcgggugaucgacuucuga

SEQ ID NO: 17560 - RNA, 234 nt, Artificial Sequence
  HCoV/NL63/RPTEC/2004__JX504050.1__envelope protein (E) CDS gc
auguuccugcgccucaucgacgacaacggcaucgugcugaacagcauccuguggcuccuggucaugaucuucuucuucgugcuggccaugaccuucaucaagcucauccagcugugcuucacgugccacuacuucuucucccggacccuguaccagcccguguacaagaucuuccucgccuaccaggacuacaugcagaucgcgccgguccccgccgaggugcugaacguguga

SEQ ID NO: 17561 - RNA, 231 nt, Artificial Sequence; identical to SEQ ID NO: 17556
  Bat SARS-like CoV/WIV1__KF367457.1__envelope protein (E) CDS gc

SEQ ID NO: 17562 - RNA, 240 nt, Artificial Sequence
  BatCoV/HKU9-1 BF_005I__NC_009021.1__envelope protein (E) CDS gc
auguacgacaucgugggcaccaacaacagcauccugaucgccaacguccucgugcugaucaucaucugccugcucguggucaucguggggugcgcccugcugcucauccugcaguucguguucggcgucugcggguucguguucaaguucgugugcaagcccaccauccuggucuacaacaaguuccgcaacgagucccuccugaacgagcgggaggagcugcucugcgacaacguguga

SEQ ID NO: 17563 - RNA, 252 nt, Artificial Sequence
  PDCoV/Swine/Thailand/S5011/2015__KU051641.1__envelope protein (E) CDS gc
augguggucgacgacugggccgugaccauccccggccaguacaucaucgccauccugguggucaucugcaucgggguggcgcuccuguucaucaacacgugccuggccugcgugaagcuguucuacaagugcuaccucggcgccgccuaccugguccgcccgaucaucguguacuacagcaagcccaaccccgugcccgaggacgaguucgucaaggugcaccaguucccgcggaacacccacuacguguga

SEQ ID NO: 17564 - RNA, 231 nt, Artificial Sequence
  PEDV/NPL-PEDv/2013/P10__KJ778616.1__envelope protein (E) CDS gc
augcugcagcucgugaacgacaacggccuggucgugaacgugauccuguggcuguucguccucuucuuccugcucaucaucagcaucaccuucgugcagcuggugaaccugugcuucacgugccaccgccucugcaacuccgccgucuacacccccaucgggcggcuguaccgcguguacaagagcuacaugcagaucgacccgcugcccuccaccgugaucgacgucuga

SEQ ID NO: 17565 - RNA, 252 nt, Artificial Sequence
  MHV/A59__NC_048217.1__envelope protein (E) CDS gc
auguucaaccuguuccucaccgacaccgugugguacgucggccagaucaucuucaucuucgccgugugccugauggugacgaucaucgucguggccuuccuggcgagcaucaagcucugcauccagcugugcgggcugugcaacacccucgugcugucccccagcaucuaccuguacgaccgcuccaagcagcucuacaaguacuacaacgaggagaugcggcugccgcugcucgaggucgacgacaucuga

SEQ ID NO: 17566 - RNA, 228 nt, Artificial Sequence
  SARS-CoV-2/Wuhan-Hu-1__NC_045512.2/MN908947.2/EPI_ISL_402128__env elope protein (E) CDS gc
auguacagcuucguguccgaggagaccggcacccugaucgucaacagcgugcuccuguuccuggccuucguggucuuccuccuggugacgcuggccauccucaccgcgcugcgccugugcgccuacugcugcaacaucgugaacgucucccucgugaagcccagcuucuacguguacucccgggucaagaaccugaacagcucccgcgugccggaccugcucguguga

SEQ ID NO: 17567 - RNA, 228 nt, Artificial Sequence
  SARS-CoV-2__MT919790.1__envelope protein (E) CDS gc
auguacagcuucguguccgaggagaccggcacccugaucgucaacagcgugcuccuguucuucgccuucguggucuuccugcucgugacgcuggccauccugaccgcgcuccgccugugcgccuacugcugcaacaucgugaacgucucccuggugaagcccagcuucuacguguacucccgggucaagaaccucaacagcucccgcgugccggaccugcugguguga

SEQ ID NO: 17568 - RNA, 228 nt, Artificial Sequence
  SARS-CoV-2__MT907517.1__envelope protein (E) CDS gc
auguacagcuucguguccgaggagaccggcacccugaucgucaacagcgugcuccuguuccuggccuucguggucuuccuccuggugacgcuggccauccucaccgcgcugcgccugugcgccuacugcugcaacaucgugaacgucucccucgugaagcccagcuucuacguguacucccgggucaaggaccugaacagcucccgcgugccggaccugcucguguga

SEQ ID NO: 17569 - RNA, 228 nt, Artificial Sequence
  SARS-CoV-2__MT905416.1__envelope protein (E) CDS gc
auguacagcuucuucuccgaggagaccggcacccugaucgugaacagcguccuccuguuccuggccuucgugguguuccuccuggucacgcuggccauccucaccgcgcugcgccugugcgccuacugcugcaacaucgugaacgugucccucgucaagcccagcuucuacguguacucccgggugaagaaccugaacagcucccgcgucccggaccugcucguguga

SEQ ID NO: 17570 - RNA, 228 nt, Artificial Sequence
  SARS-CoV-2__MT873051.1__envelope protein (E) CDS gc
auguacagcuucguguccgaggagaccggcacccugaucgucaacagcgugcuccuguuccuggccuucguggucuuccuccuggugacgcuggccauccucaccgcgcugcgccugugcgccuacugcugcaacaucgugaacgucucccucgugaagcccagcuucuacguguacucccgggucaagaaccugaacagcucccgcgugcuggaccuccugguguga

SEQ ID NO: 17571 - RNA, 228 nt, Artificial Sequence
  SARS-CoV-2__MT873111.1__envelope protein (E) CDS gc
auguacagcuucguguccgaggagaccggcacccugaucgucaacagcgugcuccuguuccuggccuucguggucuuccuccuggugacgcuggccauccucaccgcgcugcgccugugcgccuacugcugcaacaucgugaacgucucccucgugaagcccagcuucuacguguacucccgggucaagaaccugaacagcuuccgcgugccggaccugcucguguga

SEQ ID NO: 17572 - RNA, 228 nt, Artificial Sequence
  SARS-CoV-2__MT873335.1__envelope protein (E) CDS gc
auguacagcuucguguccgaggagaccggcacccugaucgucaacagcgugcuccuguuccuggccuucguggucuuccuccuggugacgcuggccauccucaccgcgcugcgccugugcgccuacugcugcaacaucgugaacgucuccuucgugaagcccagcuucuacguguacucccgggucaagaaccucaacagcucccgcgugccggaccugcugguguga

SEQ ID NO: 17573 - RNA, 228 nt, Artificial Sequence
  SARS-CoV-2__MT873370.1__envelope protein (E) CDS gc
auguacagcuucguguccgaggagaccggcacccugaucgucaacagcgugcuccuguuccuggccuucguggucuuccuccuggugacgcuggccauccucaccgcgcugcgccugugcgccuacugcugcaacaucgugaacgucucccucgugaagcccagcuucuacguguacucccgguucaagaaccugaacagcucccgcgucccggaccugcucguguga

SEQ ID NO: 17574 - RNA, 228 nt, Artificial Sequence
  SARS-CoV-2__MT872498.1__envelope protein (E) CDS gc
auguacagcuucguguccgaggagaccggcacccugaucgucaacagcguccucuucuuccuggccuucgugguguuccugcucgugacgcuggccauccugaccgcgcuccgccugugcgccuacugcugcaacaucgugaacgucucccuggugaagcccagcuucuacguguacucccgguucaagaaccucaacagcucccgcgucccggaccugcugguguga

SEQ ID NO: 17575 - RNA, 228 nt, Artificial Sequence
  SARS-CoV-2__MT846585.1__envelope protein (E) CDS gc
auguacagcuucaucuccgaggagaccggcacccugaucgugaacagcguccuccuguuccuggccuucgugguguuccuccuggucacgcuggccauccucaccgcgcugcgccugugcgccuacugcugcaacaucgugaacgugucccucgucaagcccagcuucuacguguacucccgggugaagaaccugaacagcucccgcgucccggaccugcucguguga

SEQ ID NO: 17576 - RNA, 228 nt, Artificial Sequence
  SARS-CoV-2__MT835383.1__envelope protein (E) CDS gc
auguacagcuucgccuccgaggagaccggcacccugaucgugaacagcguccuccuguuccuggccuucgugguguuccuccuggucacgcuggcgauccucaccgcccugcgccugugcgccuacugcugcaacaucgugaacgugucccucgucaagcccagcuucuacguguacucccgggugaagaaccugaacagcucccgcgucccggaccugcucguguga

SEQ ID NO: 17577 - RNA, 228 nt, Artificial Sequence
  SARS-CoV-2__MT833965.1__envelope protein (E) CDS gc
auguacagcuucguguccgaggagaccggcacccugaucgucaacagcgugcuccuguuccuggccuucguggucuuccuccuggugauccuggccauccucacggcgcugcgccugugcgccuacugcugcaacaucgugaacgucucccucgugaagcccagcuucuacguguacucccgggucaagaaccugaacagcucccgcgugccggaccugcucguguga

SEQ ID NO: 17578 - RNA, 228 nt, Artificial Sequence
  SARS-CoV-2__MT834224.1__envelope protein (E) CDS gc
auguacagcuucguguccgaggagaccggcacccugaucgucaacagcgugcuccuguuccuggccuucguggucuuccuccuggugacgcuggccauccucaccgcgcugcgccugugcgccuacugcugcaacaucgugaacgucucccucgugaagcccagcuucuacguguacucccgggucaagaaccugaacagcucccgcgugagcgaccugcucguguga

SEQ ID NO: 17579 - RNA, 228 nt, Artificial Sequence
  SARS-CoV-2__MT704816.1__envelope protein (E) CDS gc
auguacagcuucguguccgaggagaccggcacccugaucgucaacagcgugcuccuguuccuggccuucguggucuuccuccuggugacgcuggccauccucaccgcgcugcgccugugcgccuacuucugcaacaucgugaacgucucccucgugaagcccagcuucuacguguacucccgggucaagaaccugaacagcucccgcgugccggaccugcucguguga

SEQ ID NO: 17580 - RNA, 228 nt, Artificial Sequence
  SARS-CoV-2__MT827831.1__envelope protein (E) CDS gc
auguacagcuucguguccgaggagaucggcacccugaucgucaacagcgugcuccuguuccuggccuucguggucuuccuccuggugacccuggccauccucacggcgcugcgccugugcgccuacugcugcaacaucgugaacgucucccucgugaagcccagcuucuacguguacucccgggucaagaaccugaacagcucccgcgugccggaccugcucguguga

SEQ ID NO: 17581 - RNA, 228 nt, Artificial Sequence
  SARS-CoV-2__MT825091.1__envelope protein (E) CDS gc
auguacagcuucguguccgaggagaccggcacccugaucgucaacagcgugcuccuguuccuggccuucguggucuuccuccuggugacgcuggccacccucaccgcgcugcgccugugcgccuacugcugcaacaucgugaacgucucccucgugaagcccagcuucuacguguacucccgggucaagaaccugaacagcucccgcgugccggaccugcucguguga

SEQ ID NO: 17582 - RNA, 228 nt, Artificial Sequence
  SARS-CoV-2__MT821604.1__envelope protein (E) CDS gc
auguacagcuucguguccgaggagaccggcacccugaucgucaacagcgugcuccuguuccuggccuucguggucuuccuccuggugacgcuggccauccucaccgcgcugcgccugugcguguacugcugcaacaucgucaacgugucccucgugaagcccagcuucuacgucuacucccgggugaagaaccugaacagcucccgcgugccggaccugcucgucuga

SEQ ID NO: 17583 - RNA, 228 nt, Artificial Sequence
  SARS-CoV-2__MT810623.1__envelope protein (E) CDS gc
auguacagcuucguguccgaggacaccggcacccugaucgucaacagcgugcuccuguuccuggccuucguggucuuccuccuggugacgcuggccauccucaccgcgcugcgccugugcgccuacugcugcaacaucgugaacgucucccucgugaagcccagcuucuacguguacucccgggucaagaaccugaacagcucccgcgugccggaccugcucguguga

SEQ ID NO: 17584 - RNA, 228 nt, Artificial Sequence
  SARS-CoV-2__MT811741.1__envelope protein (E) CDS gc
auguacagcuucguguccgaggagaccggcacccugaucgucaacagcgugcuccuguuccuggccuucgugguccuccugcuggugacgcucgccauccugaccgcgcugcgccucugcgccuacugcugcaacaucgugaacgucucccuggugaagcccagcuucuacguguacucccgggucaagaaccugaacagcucccgcgugccggaccuccugguguga

SEQ ID NO: 17585 - RNA, 228 nt, Artificial Sequence
  SARS-CoV-2__MT666099.1__envelope protein (E) CDS gc
auguacagcuucguguccgaggagaccggcacccugaucgucaacagcgugcuccugcugcucgccuucguggucuuccugcuggugacgcucgccauccugaccgcgcugcgccucugcgccuacugcugcaacaucgugaacgucucccuggugaagcccagcuucuacguguacucccgggucaagaaccugaacagcucccgcgugccggaccuccugguguga

SEQ ID NO: 17586 - RNA, 228 nt, Artificial Sequence
  SARS-CoV-2__MT627619.1__envelope protein (E) CDS gc
auguacagcuucguguccgaggagaccggcacccugaucgucaacagcgugcuccuguuccuggccuucguggucuuccuccuggugacgcuggccauccucaccgcgcugcgccugugcuccuacugcugcaacaucgugaacgucagccucgugaagcccuccuucuacguguacagccgggucaagaaccugaacuccagccgcgugccggaccugcucguguga

SEQ ID NO: 17587 - RNA, 228 nt, Artificial Sequence
  SARS-CoV-2__MT630422.1__envelope protein (E) CDS gc
auguacagcuucguguccgaggagaccggcacccugaucgucaacagcguccucuucuuccuggccuucgugguguuccugcucgugacgcuggccauccugaccgcgcuccgccugugcgccuacugcugcaacaucgugaacgucucccuggugaagcccagcuucuacguguacucccgggucaagaaccucaacagcucccgcgugccggaccugcugguguga

SEQ ID NO: 17588 - RNA, 228 nt, Artificial Sequence
  SARS-CoV-2__MT632491.1__envelope protein (E) CDS gc
auguacagcuucgugucccaggagaccggcacccugaucgucaacagcgugcuccuguuccuggccuucguggucuuccuccuggugacgcuggccauccucaccgcgcugcgccugugcgccuacugcugcaacaucgugaacgucucccucgugaagcccagcuucuacguguacucccgggucaagaaccugaacagcucccgcgugccggaccugcucguguga

SEQ ID NO: 17589 - RNA, 228 nt, Artificial Sequence
  SARS-CoV-2__MT632864.1__envelope protein (E) CDS gc
auguacagcuucguguccgaggagaccggcacccugaucgucaacagcgugcuccuguuccuggccuucguggucuuccuccuggugacgcuggccauccucaccgcgcugcgccugugcgccuacugcugcaacaucgugaacgucucccucgugaagcccuucuucuacguguacagccgggucaagaaccugaacuccagccgcgugccggaccugcucguguga

SEQ ID NO: 17590 - RNA, 228 nt, Artificial Sequence
  SARS-CoV-2__MT598173.1__envelope protein (E) CDS gc
auguacagcuucguguccgagaagaccggcacccugaucgucaacagcgugcuccuguuccuggccuucguggucuuccuccuggugacgcuggccauccucaccgcgcugcgccugugcgccuacugcugcaacaucgugaacgucucccucgugaagcccagcuucuacguguacucccgggucaagaaccugaacagcucccgcgugccggaccugcucguguga

SEQ ID NO: 17591 - RNA, 228 nt, Artificial Sequence
  SARS-CoV-2__MT568636.1__envelope protein (E) CDS gc
auguacagcuucguguccgaggagaccggcacccugaucgucaacagcgugcuccuguuccuggccuucguggucuuccuccuggugacgcuggccauccucaccgcgcugcgccugugcgccuacugcugcaacaucgugaacgucucccucgugaagcccagcuucuacguguacucccgggucaagaaccugaacagcucccgcgugccguaccugcucguguga

SEQ ID NO: 17592 - RNA, 228 nt, Artificial Sequence
  SARS-CoV-2__MT568638.1__envelope protein (E) CDS gc
auguacagcuucguguccgaggagaccggcacccugaucgucaacagcgugcuccuguuccuggccuucguggucuuccuccuggugacgcuggccauccucaccgcgcugcgccugugcgccuacugcugcaacaucgugaacgucucccucgugaagcccagcuucuacguguacucccgggucaagaaccugaacagcugccgcgugccggaccugcucguguga

SEQ ID NO: 17593 - RNA, 228 nt, Artificial Sequence
  SARS-CoV-2__MT459833.1__envelope protein (E) CDS gc
auguacagcuucguguccgaggagaccggcacccugaucgucaacagcgugcuccuguuccuggccuucguggucuuccuccuggugacgcuggccauccucaccgcgcugcgcaugugcgccuacugcugcaacaucgugaacgucucccuggugaagcccagcuucuacguguacucccgggucaagaaccucaacagcucccgcgugccggaccugcugguguga

SEQ ID NO: 17594 - RNA, 228 nt, Artificial Sequence
  SARS-CoV-2__MT451171.1__envelope protein (E) CDS gc
auguacagcuucguguccgaggagaccggcacccugaucgucaacagcgugcuccuguuccuggccuucguggucuuccuccuggugacgcuggccauccucaccgcgcugcgccugugcgccuacugcugcaacaucgugaacgucucccucgugaagcccagcuucuacguguacucccgggucaagaaccugaacagcucccgcgugccggacuuccugguguga

SEQ ID NO: 17595 - RNA, 228 nt, Artificial Sequence
  SARS-CoV-2__MT350246.1__envelope protein (E) CDS gc
auguacagcuucguguccgaggagaccggcacccugaucgucaacagcgugcuccuguuccuggccuucguggucuuccuccuggugacgcuggccauccucaccgugcugcgccugugcgcguacugcugcaacaucgucaacgugucccucgugaagcccagcuucuacgucuacucccgggugaagaaccugaacagcucccgcgugccggaccugcucgucuga

SEQ ID NO: 17596 - RNA, 228 nt, Artificial Sequence
  SARS-CoV-2__MT039890.1__envelope protein (E) CDS gc
auguacagcuucguguccgaggagaccggcacccugaucgucaacagcgugcuccuguuccuggccuucguggucuuccuccuggugacgcuggccauccucaccgcgcaccgccugugcgccuacugcugcaacaucgugaacgucucccuggugaagcccagcuucuacguguacucccgggucaagaaccucaacagcucccgcgugccggaccugcugguguga

SEQ ID NO: 17597 - RNA, 5667 nt, Artificial Sequence
  MERS-CoV/MERS-CoV-Jeddah-human-1__KF958702.1__non-structural protein 3 (NSP3) CDS gc
auggcccccgugaagaagguggccuucggcggggaccaggugcacgagguggcggccguccgcagcgugaccguggaguacaacauccacgccguccuggacacccuccuggccuccagcucccugcggacguucgugguggacaagagccucuccaucgaggaguucgccgacgucgugaaggagcaggucagcgaccugcuggugaagcuccugcgcggcaugccgauccccgacuucgaccuggacgacuucaucgacgcgcccugcuacugcuucaacgccgagggggacgccuccuggagcuccaccaugaucuucagccuccaccccguggagugcgacgaggagugcuccgagguggaggccagcgaccuggaggagggcgaguccgagugcaucagcgagaccuccaccgagcaggucgacgugagccacgagaucuccgacgacgagugggcggccgccguggacgaggccuucccgcuggacgaggccgaggacgucacggagagcgugcaggaggaggcgcagcccguggagguccccguggaggacaucgugcaggucgugaucgccgacacccuccaggagacccccgucguguccgacaccguggaggucccgccccagguggugaagcugcccagcgagccccagacgauccagccggaggucaaggagguggcccccguguacgaggccgacaccgagcagacccagagcgucaccgugaagcccaagcggcugcgcaagaagcggaacguggacccccucuccaacuucgagcacaaggucaucacggagugcgugaccaucgugcugggggacgccauccaggucgcgaagugcuacggcgagagcgugcuggugaacgccgccaacacccaccucaagcacggcgggggcaucgccggggccaucaacgcggccuccaagggcgccguccagaaggagagcgacgaguacauccuggccaaggggccgcuccaggugggcgacuccgugcugcugcagggccacagccuggccaagaacauccuccacgucguggggcccgacgcgcgcgccaagcaggacgugucccugcugagcaagugcuacaaggccaugaacgccuacccccucgucgugacgccccugguguccgcgggcaucuucggggucaagccggccgugagcuucgacuaccugauccgggaggccaagacccgcgugcucgucguggugaacucccaggacgucuacaagagccugaccaucguggacaucccccagucccugaccuucagcuacgacggccuccggggcgccauccgcaaggccaaggacuacggguucaccguguucgucugcacggacaacuccgcgaacaccaaggugcugcggaacaagggcguggacuacaccaagaaguuccugaccgucgacggggugcaguacuacugcuacacgagcaaggacacccucgacgacauccugcagcaggccaacaaguccgugggcaucaucagcaugccccugggguacgucucccacggccucgaccugauccaggccggcagcguggugcgccgggucaacgugcccuacgugugccugcucgccaacaaggagcaggaggccauccugaugagcgaggacgucaagcugaacccguccgaggacuucaucaagcacgugcgcaccaacgggggcuacaacagcuggcaccucguggagggggagcugcugguccaggaccugcggcucaacaagcugcugcacugguccgaccagaccaucugcuacaaggacagcguguucuacgucgugaagaacuccacggcguuccccuucgagacccucagcgccugccgcgccuaccuggacucccggaccacccagcagcugacgaucgaggugcucgucaccguggacggcgugaacuuccgcaccgucgugcugaacaacaagaacaccuaccggagccagcuggggugcguguucuucaacggcgccgacaucuccgacacgauccccgacgagaagcagaacggccacagccucuaccuggccgacaaccugaccgcggacgagaccaaggcccucaaggagcuguacgggcccgucgacccgaccuuccugcaccgcuucuacucccucaaggccgccgugcacgaguggaagaugguggucugcgacaaggugcggagccugaagcuguccgacaacaacugcuaccucaacgcggugaucaugacccuggaccugcucaaggacaucaaguucgucauccccgcccugcagcacgccuucaugaagcacaagggcggggacagcacggacuucaucgcccugaucauggccuacggcaacugcaccuucggggcgcccgacgacgccucccgccuccugcacaccgugcuggccaaggccgagcucugcugcagcgcccgcaugguguggcgggaguggugcaacgucugcggcaucaaggacguggugcugcagggccugaaggcgugcugcuacgucggggugcagaccguggaggaccuccgcgcccggaugacguacgucugccagugcggcggggagcgccaccggcagaucguggagcacaccaccccguggcugcugcucuccggcacccccaacgagaagcuggugacgaccagcaccgcccccgacuucgucgccuucaacguguuccagggcaucgagaccgccguggggcacuacguccacgcgcgccugaagggcgggcucauccugaaguucgacagcggcacgguguccaagaccagcgacuggaagugcaaggugaccgacguccuguuccccgggcagaaguacuccagcgacugcaacguggugcgguacucccucgacggcaacuuccgcaccgaggucgacccggaccugagcgccuucuacgugaaggacggcaaguacuucacguccgagccgcccgugaccuacagccccgccaccauccuggccggguccgucuacaccaacagcugccucguguccagcgacggccagcccgggggcgacgcgaucucccugagcuucaacaaccugcucggguucgacuccagcaagcccgugaucaagaaguacacguacuccuuccugcccaaggaggacggcgacguccugcucgccgaguucgacaccuacgaccccaucuacaagaacggcgccauguacaaggggaagccgauccugugggugaacaaggccagcuacgacaccaaccugaacaaguucaaccgggccucccuccgccagaucuucgacguggcgcccaucgagcuggagaacaaguucacgccccugagcgucgagagcacccccguggagccgcccaccguggacgucguggcccuccagcaggagaugaccaucgugaagugcaagggccugaacaagcccuucgucaaggacaacguguccuucgucgccgacgacagcgggacccccgugguggaguaccuguccaaggaggaccuccacacgcuguacgucgacccgaaguaccaggugaucgugcugaaggacaacguccucagcuucaugcugcggcugcacaccguggaguccggcgacaucaacguggucgccgccagcgggucccucacccgcaaggugaagcugcuguuccgggcgagcuucuacuucaaggaguucgccacccgcacguucaccgccaccaccgccgugggcuccugcaucaagagcgucgugcggcaccucggcgugacgaaggggauccugaccggcugcuucuccuucgucaagaugcuguucaugcucccccuggccuacuucagcgacuccaagcuggggaccaccgaggugaaggugagcgcgcucaagaccgccggcgucgugacggggaacguggucaagcagugcugcaccgccgccguggaccuguccauggacaagcugcgccggguggacuggaaguccacccuccgccugcugcucaugcugugcaccacgaugguccugcucagcagcguguaccaccuguacguguucaaccagguccuguccagcgacgugauguucgaggacgcccagggccucaagaaguucuacaaggaggugcgggcguaccugggcaucagcuccgccugcgacgggcuggccagcgccuaccgcgcgaacuccuucgacguccccaccuucugcgccaaccgcagcgccaugugcaacuggugccucaucucccaggacagcaucacccacuaccccgcccugaagauggugcagacccaccugucccacuacgugcucaacaucgacuggcugugguucgccuucgagacgggccuggcguacaugcucuacaccagcgccuucaacuggcugcugcucgccgggacccugcacuacuucuucgcccagaccuccaucuucgucgacuggcggagcuacaacuacgccguguccagcgcguucuggcuguucacgcacaucccgauggccggccuggugcgcauguacaaccuccuggccugccuguggcuccugcggaaguucuaccagcacgucaucaacggcugcaaggacaccgccugccugcucugcuacaagcgcaaccggcugacccgcguggaggccuccaccguggucugcgggggcaagcggacguucuacaucaccgcgaacgggggcaucagcuucugccgccggcacaacuggaacugcguggacugcgacaccgccggggugggcaacaccuucaucugcgaggaggucgccaacgaccugacgaccgcccuccgccggcccaucaacgcgaccgaccgcucccacuacuacguggacagcgugaccgucaaggagacgguggugcaguucaacuaccggcgcgacggccagcccuucuacgagcgguucccgcugugcgccuucaccaaccuggacaagcucaaguucaaggaggucugcaagaccaccacggggauccccgaguacaacuucaucaucuacgacuccagcgaccgcggccaggagucccuggcccggagcgccugcguguacuacagccaggugcugugcaaguccauccuccuggucgacagcucccuggugaccagcgucggggacuccagcgagaucgccaccaagauguucgacuccuucgugaacagcuucgugucccucuacaacgucacccgcgacaagcuggagaagcugaucagcacggcgcgggacggcgugcgccgcggggacaacuuccacuccgugcucaccaccuucaucgacgccgcccggggccccgccggcgucgagagcgacguggagaccaacgagaucguggacuccguccaguacgcccacaagcacgacauccagaucacgaacgagagcuacaacaacuacgugcccuccuacgugaagccggacagcgucuccaccagcgaccuggggucccugaucgacugcaacgcggccagcgugaaccagaucgugcuccgcaacagcaacggcgccugcaucuggaacgccgccgcguacaugaagcuguccgacgcccugaagcggcagauccgcaucgccugccggaagugcaaccucgccuuccgccugaccaccagcaagcugcgggcgaacgacaacauccucuccguccgcuucacggccaacaagaucgucgggggcuga

SEQ ID NO: 17598 - RNA, 5667 nt, Artificial Sequence
  MERS-CoV/Al-Hasa_4_2013__KF186564.1__non-structural protein 3 (NSP3) CDS gc
auggcccccgugaagaaggucgccuucggcggggaccaggugcacgagguggcggccguccgcagcgugaccguggaguacaacauccacgccguccuggacacccuccuggccuccagcucccugcggacguucgugguggacaagagccucuccaucgaggaguucgccgacgucgugaaggagcaggucagcgaccugcuggugaagcuccugcgcggcaugccgauccccgacuucgaccuggacgacuucaucgacgcgcccugcuacugcuucaacgccgagggggacgccuccuggagcuccaccaugaucuucagccuccaccccguggagugcgacgaggagugcuccgagguggaggccagcgaccuggaggagggcgaguccgagugcaucagcgagaccuccaccgagcaggucgacgugagccacgagguguccgacgacgagugggcggccgccgucgacgaggccuucccgcuggacgaggccgaggacgugacggagagcgugcaggaggaggcgcagcccgucgaggugcccguggaggacaucgcccaggucgugaucgccgacacccuccaggagacccccgucguguccgacaccguggaggucccgccccagguggugaagcugcccagcgagccccagacgauccagccggaggucaaggagguggcccccguguacgaggccgacaccgagcagacccagagcgucaccgugaagcccaagcggcugcgcaagaagcggaacguggacccccucuccaacuucgagcacaaggucaucacggagugcgugaccaucgugcugggggacgcgauccaggucgccaagugcuacggcgagagcgugcuggugaacgccgccaacacccaccucaagcacggcgggggcaucgccggggcgaucaacgccgccuccaagggcgccguccagaaggagagcgacgaguacauccuggccaaggggccgcuccaggugggcgacuccgugcugcugcagggccacagccuggcgaagaacauccuccacgucguggggcccgacgcccgcgccaagcaggacgugucccugcugagcaagugcuacaaggccaugaacgcguacccccucgucgugacgccccugguguccgccggcaucuucggggucaagccggccgugagcuucgacuaccugauccgggaggccaagacccgcgugcucgucguggugaacucccaggacgucuacaagagccugaccaucguggacaucccccagucccugaccuucagcuacgacggccuccggggcgccauccgcaaggcgaaggacuacggguucaccguguucgucugcacggacaacuccgccaacaccaaggugcugcggaacaagggcguggacuacaccaagaaguuccugaccgucgacggggugcaguacuacugcuacacgagcaaggacacccucgacgacauccugcagcaggccaacaaguccgugggcaucaucagcaugccccugggguacgucucccacggccucgaccugauccaggccggcagcguggugcgccgggucaacgugcccuacgugugccugcucgccaacaaggagcaggaggcgauccugaugagcgaggacgucaagcugaacccguccgaggacuucaucaagcacgugcgcaccaacgggggcuacaacagcuggcaccucguggagggggagcugcugguccaggaccugcggcucaacaagcugcugcacugguccgaccagaccaucugcuacaaggacagcguguucuacgucgugaagaacuccacggccuuccccuucgagacccucagcgccugccgcgccuaccuggacucccggaccacccagcagcugacgaucgaggugcucgucaccguggacggcgugaacuuccgcaccgucgugcugaacaacaagaacaccuaccggagccagcuggggugcguguucuucaacggcgccgacaucuccgacacgauccccgacgagaagcagaacggccacagccucuaccuggcggacaaccugaccgccgacgagaccaaggcccucaaggagcuguacgggcccgucgacccgaccuuccugcaccgcuucuacucccucaaggccgcggugcacaaguggaagaugguggucugcgacaaggugcggagccugaagcuguccgacaacaacugcuaccucaacgccgugaucaugacccuggaccugcucaaggacaucaaguucgucauccccgcccugcagcacgccuucaugaagcacaagggcggggacagcacggacuucaucgcccugaucauggcguacggcaacugcaccuucgggucccccgacgacgccagccgccuccugcacaccgugcuggccaaggccgagcucugcugcuccgcccgcaugguguggcgggaguggugcaacgucugcggcaucaaggacguggugcugcagggccugaaggcgugcugcuacgucggggugcagaccguggaggaccuccgcgcccggaugacguacgucugccagugcggcggggagcgccaccggcagaucguggagcacaccaccccguggcugcugcucagcggcacccccaacgagaagcuggugacgaccagcaccgcccccgacuucgucgccuucaacguguuccagggcaucgagaccgccguggggcacuacguccacgcgcgccugaagggcgggcucauccugaaguucgacuccggcacggugagcaagaccuccgacuggaagugcaaggugaccgacguccuguuccccgggcagaaguacagcuccgacugcaacguggugcgguacagccucgacggcaacuuccgcaccgaggucgacccggaccuguccgccuucuacgugaaggacggcaaguacuucacgagcgagccgcccgugaccuacucccccgccaccauccuggccgggagcgucuacaccaacuccugccucgugagcuccgacggccagcccgggggcgacgcgaucagccuguccuucaacaaccugcucggguucgacagcuccaagcccgugacgaagaaguacaccuacagcuuccugcccaaggaggacggcgacguccugcucgccgaguucgacaccuacgaccccaucuacaagaacggcgccauguacaaggggaagccgauccugugggugaacaaggccuccuacgacaccaaccugaacaaguucaaccgggccagccuccgccagaucuucgacguggcgcccaucgagcuggagaacaaguucacgccccugagcgucgaguccacccccguggagccgcccaccguggacgucguggcccuccagcaggagaugaccaucgugaagugcaagggccugaacaagcccuucgucaaggacaacgugagcuucgucgccgacgacuccgggacgcccgugguggaguaccugagcaaggaggaccuccacacccuguacgucgacccgaaguaccaggugaucgugcugaaggacaacguccucuccagcaugcugcggcugcacaccguggaguccggcgacaucaacguggucgccgccagcgggucccucacccgcaaggugaagcugcuguuccgggcgagcuucuacuucaaggaguucgccacgcgcaccuucaccgccaccacggccgugggcuccugcaucaagagcgucgugcggcaccucggcgugaccaaggggauccugaccggcugcuucuccuucgucaagaugcuguucaugcucccccuggccuacuucagcgacuccaagcuggggaccaccgaggugaaggugagcgcgcucaagacggccggcgucgugaccgggaacguggucaagcagugcugcaccgccgccguggaccuguccauggacaagcugcgccggguggacuggaaguccacccuccgccugcugcucaugcugugcacgaccaugguccugcucagcagcguguaccaccuguacguguucaaccagguccugagcuccgacgugauguucgaggacgcccagggccucaagaaguucuacaaggaggugcgggcguaccugggcaucagcuccgccugcgacgggcuggccagcgccuaccgcgcgaacuccuucgacguccccaccuucugcgccaaccgcagcgccaugugcaacuggugccucaucucccaggacagcaucacccacuaccccgcccugaagauggugcagacgcaccugucccacuacgugcucaacaucgacuggcugugguucgccuucgagaccggccuggcguacaugcucuacaccagcgccuucaacuggcugcugcucgccgggacccugcacuacuucuucgcccagacguccaucuucgucgacuggcggagcuacaacuacgccguguccagcgcguucuggcuguucacccacaucccgauggccggccuggugcgcauguacaaccuccuggccugccuguggcuccugcggaaguucuaccagcacgucaucaacggcugcaaggacaccgccugccugcucugcuacaagcgcaaccggcugacccgcguggaggccuccacgguggucugcgggggcaagcggaccuucuacaucaccgcgaacgggggcaucagcuucugccgccggcacaacuggaacugcguggacugcgacaccgccggggugggcaacacguucaucugcgaggaggucgccaacgaccugaccaccgcccuccgccggcccaucaacgcgaccgaccgcucccacuacuacguggacagcgugacggucaaggagaccguggugcaguucaacuaccggcgcgacggccagcccuucuacgagcgguucccgcugugcgccuucaccaaccuggacaagcucaaguucaaggaggucugcaagaccacgaccgggauccccgaguacaacuucaucaucuacgacuccagcgaccgcggccaggagagccuggcccgguccgccugcguguacuacagccaggugcugugcaaguccauccuccuggucgacagcucccugaucaccagcgugggggacuccagcgagaucgccaccaagauguucgacuccuucgucaacagcuucgugucccucuacaacgugacgcgcgacaagcuggagaagcugaucagcaccgcgcgggacggcguccgccgcggggacaacuuccacuccgugcucaccaccuucaucgacgccgcccggggccccgccggcguggagagcgacgucgagacgaacgagaucguggacuccgugcaguacgcccacaagcacgacauccagaucaccaacgagagcuacaacaacuacguccccuccuacgugaagccggacagcguguccaccagcgaccuggggagccugaucgacugcaacgcggccuccgucaaccagaucgugcuccgcaacagcaacggcgccugcaucuggaacgccgccgcguacaugaagcuguccgacgcccugaagcggcagauccgcaucgccugccggaagugcaaccucgccuuccgccugaccacgagcaagcugcgggcgaacgacaacauccucuccgugcgcuucaccgccaacaagaucgucgggggcuga

SEQ ID NO: 17599 - RNA, 5667 nt, Artificial Sequence
  MERS-CoV/Riyadh_14_2013__KJ156934.1__non-structural protein 3 (NSP3) CDS gc
auggcccccgugaagaagguggccuucggcggggaccaggugcacgagguggcggccguccgcagcgugaccguggaguacaacauccacgccguccuggacacccuccuggccuccagcucccugcggacguucgugguggacaagagccucuccaucgaggaguucgccgacgucgugaaggagcaggucagcgaccugcuggugaagcuccugcgcggcaugccgauccccgacuucgaccuggacgacuucaucgacgcgcccugcuacugcuucaacgccgagggggacgccuccugguacagcaccaugaucuucucccuccaccccguggagugcgacgaggagugcagcgagguggaggccuccgaccuggaggagggcgagagcgagugcaucuccgagaccagcaccgagcaggucgacgugucccacgaggugagcgacgacgagugggcggccgccgucgacgaggccuucccgcuggacgaggccgaggacgugacggaguccgugcaggaggaggcgcagcccgucgaggugcccguggaggacaucgcccaggucgugaucgccgacacccuccaggagacccccgucgugagcgacaccguggaggucccgccccagguggugaagcugcccuccgagccccagacgauccagccggaggucaaggagguggcccccguguacgaggccgacaccgagcagacccagagcgucaccgugaagcccaagcggcugcgcaagaagcggaacguggacccccucagcaacuucgagcacaaggucaucacggagugcgugaccaucgugcugggggacgcgauccaggucgccaagugcuacggcgaguccgugcuggugaacgccgccaacacccaccucaagcacggcgggggcaucgccggggcgaucaacgccgccagcaagggcgccguccagaaggaguccgacgaguacauccuggccaaggggccgcuccaggugggcgacagcgugcugcugcagggccacucccuggcgaagaacauccuccacgucguggggcccgacgcccgcgccaagcaggacgugagccugcuguccaagugcuacaaggccaugaacgcguacccccucgucgugacgccccuggugagcgccggcaucuucggggucaagccggccguguccuucgacuaccugauccgggaggccaagacccgcgugcucgucguggugaacagccaggacgucuacaagucccugaccaucguggacaucccccagagccugaccuucuccuacgacggccuccggggcgccauccgcaaggcgaaggacuacggguucaccguguucgucugcacggacaacagcgccaacaccaaggugcugcggaacaagggcguggacuacaccaagaaguuccugaccgucgacggggugcaguacuacugcuacacguccaaggacacccucgacgacauccugcagcaggccaacaagagcgugggcaucaucuccaugccccugggguacgucagccacggccucgaccugauccaggccggcuccguggugcgccgggucaacgugcccuacgugugccugcucgccaacaaggagcaggaggcgauccugaugagcgaggacgucaagcugaacccgagcgaggacuucaucaagcacgugcgcaccaacgggggcuacaacuccuggcaccucguggagggggagcugcugguccaggaccugcggcucaacaagcugcugcacuggagcgaccagaccaucugcuacaaggacuccguguucuacgucgugaagaacagcacggccuuccccuucgagacccucuccgccugccgcgccuaccuggacagccggaccacccagcagcugacgaucgaggugcucgucaccguggacggcgugaacuuccgcaccgucgugcugaacaacaagaacaccuaccggucccagcuggggugcguguucuucaacggcgccgacaucagcgacacgauccccgacgagaagcagaacggccacucccucuaccuggcggacaaccugaccgccgacgagaccaaggcccucaaggagcuguacgggcccgucgacccgaccuuccugcaccgcuucuacagccucaaggccgcggugcacaaguggaagaugguggucugcgacaaggugcggucccugaagcugagcgacaacaacugcuaccucaacgccgugaucaugacccuggaccugcucaaggacaucaaguucgucauccccgcccugcagcacgccuucaugaagcacaagggcggggacuccacggacuucaucgcccugaucauggcguacggcaacugcaccuucggggcccccgacgacgccagccgccuccugcacaccgugcuggccaaggccgagcucugcugcuccgcgcgcaugguguggcgggaguggugcaacgucugcggcaucaaggacguggugcugcagggccugaaggccugcugcuacgucggggugcagaccguggaggaccuccgcgcccggaugacguacgucugccagugcggcggggagcgccaccggcagaucguggagcacaccaccccguggcugcugcucagcggcacccccaacgagaagcuggugacgaccuccaccgcccccgacuucgucgccuucaacguguuccagggcaucgagaccgcgguggggcacuacguccacgcccgccugaagggcgggcucauccugaaguucgacagcggcacggugagcaagaccuccgacuggaagugcaaggugaccgacguccuguuccccgggcagaaguacagcuccgacugcaacguggugcgguacagccucgacggcaacuuccgcaccgaggucgacccggaccuguccgccuucuacgugaaggacggcaaguacuucacgagcgagccgcccgugaccuacucccccgccaccauccuggcggggagcgucuacaccaacuccugccucgugagcuccgacggccagcccgggggcgacgccaucagccuguccuucaacaaccugcucggguucgacagcuccaagcccgugacgaagaaguacaccuacagcuuccugcccaaggaggacggcgacguccugcucgccgaguucgacaccuacgaccccaucuacaagaacggcgccauguacaaggggaagccgauccugugggugaacaaggccuccuacgacaccaaccugaacaaguucaaccgggcgagccuccgccagaucuucgacguggcccccaucgagcuggagaacaaguucacgccccuguccgucgagagcacccccguggagccgcccaccguggacgucguggcccuccagcaggagaugaccaucgugaagugcaagggccugaacaagcccuucgucaaggacaacgugagcuucgucgccgacgacuccgggacgcccgugguggaguaccugagcaaggaggaccuccacacccuguacgucgacccgaaguaccaggugaucgugcugaaggacaacguccucuccagcaugcugcggcugcacaccguggaguccggcgacaucaacguggucgccgcgagcgggucccucacccgcaaggugaagcugcuguuccgggccagcuucuacuucaaggaguucgccacgcgcaccuucaccgccaccacggccgugggcuccugcaucaagagcgucgugcggcaccucggcgugaccaaggggauccugaccggcugcuucuccuucgucaagaugcuguucaugcucccccuggcguacuucagcgacuccaagcuggggaccaccgaggugaaggugagcgcccucaagacggccggcgucgugaccgggaacguggucaagcagugcugcaccgccgccguggaccuguccauggacaagcugcgccggguggacuggaaguccacccuccgccugcugcucaugcugugcacgaccaugguccugcucagcagcguguaccaccuguacguguucaaccagguccuguccagcgacgugauguucgaggacgcgcagggccucaagaaguucuacaaggaggugcgggccuaccugggcaucagcuccgccugcgacgggcuggccagcgcguaccgcgccaacuccuucgacguccccaccuucugcgccaaccgcagcgccaugugcaacuggugccucaucucccaggacagcaucacccacuaccccgcccugaagauggugcagacgcaccugucccacuacgugcucaacaucgacuggcugugguucgcguucgagaccggccuggccuacaugcucuacaccagcgccuucaacuggcugcugcucgccgggacccugcacuacuucuucgcccagacguccaucuucgucgacuggcggagcuacaacuacgcgguguccagcgccuucuggcuguucacccacaucccgauggccggccuggugcgcauguacaaccuccuggccugccuguggcuccugcggaaguucuaccagcacgucaucaacggcugcaaggacaccgccugccugcucugcuacaagcgcaaccggcugacccgcguggaggcguccacgguggucugcgggggcaagcggaccuucuacaucaccgccaacgggggcaucagcuucugccgccggcacaacuggaacugcguggacugcgacaccgccggggugggcaacacguucaucugcgaggaggucgccaacgaccugaccaccgcgcuccgccggcccaucaacgccaccgaccgcucccacuacuacguggacagcgugacggucaaggagaccguggugcaguucaacuaccggcgcgacggccagcccuucuacgagcgguucccgcugugcgccuucaccaaccuggacaagcucaaguucaaggaggucugcaagaccacgaccgggauccccgaguacaacuucaucaucuacgacuccagcgaccgcggccaggagucccuggcccggagcgccugcguguacuacagccaggugcugugcaaguccauccuccuggucgacagcucccuggugaccagcgucggggacuccagcgagaucgcgaccaagauguucgacuccuucgugaacagcuucgugucccucuacaacgucacgcgcgacaagcuggagaagcugaucagcaccgcccgggacggcgugcgccgcggggacaacuuccacuccgugcucaccaccuucaucgacgccgcccggggccccgccggcgucgagagcgacguggagacgaacgagaucguggacuccguccaguacgcgcacaagcacgacauccagaucaccaacgagagcuacaacaacuacgugcccuccuacgugaagccggacagcgucuccaccagcgaccuggggucccugaucgacugcaacgccgccagcgugaaccagaucgugcuccgcaacagcaacggcgccugcaucuggaacgccgcggccuacaugaagcuguccgacgcccugaagcggcagauccgcaucgccugccggaagugcaaccucgcguuccgccugaccacgagcaagcugcgggccaacgacaacauccucuccguccgcuucaccgccaacaagaucgucgggggcuga

SEQ ID NO: 17600 - RNA, 5667 nt, Artificial Sequence
  MERS-CoV/England 1__NC_038294.1__non-structural protein 3 (NSP3) CDS gc
auggcccccgugaagaaggucgccuucggcggggaccaggugcacgagguggcggccguccgcagcgugaccguggaguacaacauccacgccguccuggacacccuccuggccuccagcucccugcggacguucgugguggacaagagccucuccaucgaggaguucgccgacgucgugaaggagcaggucagcgaccugcuggugaagcuccugcgcggcaugccgauccccgacuucgaccuggacgacuucaucgacgcgcccugcuacugcuucaacgccgagggggacgccuccuggagcuccaccaugaucuucagccuccaccccguggagugcgacgaggagugcuccgagguggaggccagcgaccuggaggagggcgaguccgagugcaucagcgagaccuccaccgagcaggucgacgugagccacgagaucuccgacgacgagugggcggccgccguggacgaggccuucccgcuggacgaggccgaggacgucacggagagcgugcaggaggaggcgcagcccguggagguccccguggaggacaucgcccagguggucaucgccgacacccuccaggagacccccguggucuccgacaccguggaggugccgccccaggucgugaagcugcccagcgagccccagacgauccagccggaggugaaggaggucgcccccguguacgaggccgacaccgagcagacccagagcgugaccgucaagcccaagcggcugcgcaagaagcggaacguggacccccucuccaacuucgagcacaaggugaucacggagugcgucaccaucgugcugggggacgcgauccagguggccaagugcuacggcgagagcguccuggugaacgccgccaacacccaccucaagcacggcgggggcaucgccggggcgaucaacgccgccuccaagggcgccgugcagaaggagagcgacgaguacauccuggccaaggggccgcugcaggucggcgacuccgugcuccugcagggccacagccuggcgaagaacauccuccacguggucgggcccgacgcccgcgccaagcaggacgugucccugcugagcaagugcuacaaggccaugaacgcguacccccucguggucacgccccugguguccgccggcaucuucggggugaagccggccgucagcuucgacuaccugauccgggaggccaagacccgcgugcucguggucgugaacucccaggacguguacaagagccugaccaucgucgacaucccccagucccugaccuucagcuacgacggccuccggggcgccauccgcaaggcgaaggacuacggguucaccguguucgugugcacggacaacuccgccaacaccaagguccugcggaacaagggcguggacuacaccaagaaguuccugaccguggacgggguccaguacuacugcuacacgagcaaggacacccucgacgacauccugcagcaggccaacaaguccgugggcaucaucagcaugccccugggguacgugucccacggccucgaccugauccaggccggcagcgucgugcgccgggugaacguccccuacgugugccugcucgccaacaaggagcaggaggcgauccugaugagcgaggacgugaagcugaacccguccgaggacuucaucaagcacguccgcaccaacgggggcuacaacagcuggcaccucguggagggggagcugcuggugcaggaccugcggcucaacaagcugcugcacugguccgaccagaccaucugcuacaaggacagcgucuucuacguggucaagaacuccacggccuuccccuucgagacccucagcgccugccgcgccuaccuggacucccggaccacccagcagcugacgaucgaggugcucgugaccgucgacggcgugaacuuccgcaccgugguccugaacaacaagaacaccuaccggagccagcuggggugcguguucuucaacggcgccgacaucuccgacacgauccccgacgagaagcagaacggccacagccucuaccuggcggacaaccugaccgccgacgagaccaaggcccucaaggagcuguacgggcccguggacccgaccuuccugcaccgcuucuacucccucaaggccgcgguccacaaguggaagaugguggugugcgacaagguccggagccugaagcuguccgacaacaacugcuaccucaacgccgugaucaugacccuggaccugcucaaggacaucaaguucgugauccccgcccugcagcacgccuucaugaagcacaagggcggggacagcacggacuucaucgcccugaucauggcguacggcaacugcaccuucggggcccccgacgacgccucccgccuccugcacaccguccuggccaaggccgagcucugcugcagcgcgcgcaugguguggcgggaguggugcaacgugugcggcaucaaggacgucgugcugcagggccugaaggccugcugcuacguggggguccagaccguggaggaccuccgcgcccggaugacguacgugugccagugcggcggggagcgccaccggcagaucgucgagcacaccaccccguggcugcugcucuccggcacccccaacgagaagcuggugacgaccagcaccgcccccgacuucguggccuucaacgucuuccagggcaucgagaccgcgguggggcacuacgugcacgcccgccugaagggcgggcucauccugaaguucgacagcggcacggucuccaagaccagcgacuggaagugcaaggugaccgacgugcuguuccccgggcagaaguacuccagcgacugcaacgucgugcgguacucccucgacggcaacuuccgcaccgagguggacccggaccugagcgccuucuacgucaaggacggcaaguacuucacguccgagccgcccgugaccuacagccccgccaccauccuggcgggguccguguacaccaacagcugccucgucuccagcgacggccagcccgggggcgacgccaucucccugagcuucaacaaccugcucggguucgacuccagcaagcccgugacgaagaaguacaccuacuccuuccugcccaaggaggacggcgacgugcugcucgccgaguucgacaccuacgaccccaucuacaagaacggcgccauguacaaggggaagccgauccugugggucaacaaggccagcuacgacaccaaccugaacaaguucaaccgggcgucccuccgccagaucuucgacguggcccccaucgagcuggagaacaaguucacgccccugagcguggagagcacccccgucgagccgcccaccguggacguggucgcccuccagcaggagaugaccaucgugaagugcaagggccugaacaagcccuucgugaaggacaacgucuccuucguggccgacgacagcgggacgcccgucguggaguaccuguccaaggaggaccuccacacccuguacguggacccgaaguaccaggucaucgugcugaaggacaacgugcucagcuccaugcugcggcugcacaccgucgagagcggcgacaucaacgugguggccgcguccgggagccucacccgcaaggucaagcugcuguuccgggccuccuucuacuucaaggaguucgccacgcgcaccuucaccgccaccacggccgugggcagcugcaucaaguccgugguccggcaccucggcgugaccaaggggauccugaccggcugcuucagcuucgugaagaugcuguucaugcucccccuggcguacuucuccgacagcaagcuggggaccaccgaggucaagguguccgcccucaagacggccggcguggucaccgggaacguggugaagcagugcugcaccgccgccgucgaccugagcauggacaagcugcgccggguggacuggaaguccacccuccgccugcugcucaugcugugcacgaccauggugcugcucagcuccgucuaccaccuguacguguucaaccaggugcugagcagcgacgucauguucgaggacgcgcagggccucaagaaguucuacaaggaggugcgggccuaccugggcaucuccagcgccugcgacgggcuggccuccgcguaccgcgccaacagcuucgacgugcccaccuucugcgccaaccgcuccgccaugugcaacuggugccucaucagccaggacuccaucacccacuaccccgcccugaagaugguccagacgcaccugagccacuacgugcucaacaucgacuggcugugguucgcguucgagaccggccuggccuacaugcucuacaccuccgccuucaacuggcugcugcucgccgggacccugcacuacuucuucgcccagacgagcaucuucguggacuggcgguccuacaacuacgcggucagcuccgccuucuggcuguucacccacaucccgauggccggccuggugcgcauguacaaccuccuggccugccuguggcuccugcggaaguucuaccagcacgugaucaacggcugcaaggacaccgccugccugcucugcuacaagcgcaaccggcugacccgcgucgaggcgagcacgguggugugcgggggcaagcggaccuucuacaucaccgccaacgggggcaucuccuucugccgccggcacaacuggaacugcgucgacugcgacaccgccggggugggcaacacguucaucugcgaggagguggccaacgaccugaccaccgcgcuccgccggcccaucaacgccaccgaccgcagccacuacuacgucgacuccgugacggugaaggagaccgucgugcaguucaacuaccggcgcgacggccagcccuucuacgagcgguucccgcugugcgccuucaccaaccuggacaagcucaaguucaaggaggugugcaagaccacgaccgggauccccgaguacaacuucaucaucuacgacagcuccgaccgcggccaggagagccuggcccggagcgccugcgucuacuacucccaggugcugugcaagagcauccuccugguggacuccagccuggucaccuccgugggggacagcuccgagaucgcgaccaagauguucgacagcuucgucaacuccuucgugagccucuacaacgugacgcgcgacaagcuggagaagcugaucuccaccgcccgggacggcguccgccgcggggacaacuuccacagcgugcucaccaccuucaucgacgccgcccggggccccgccggcguggaguccgacgucgagacgaacgagaucguggacagcgugcaguacgcgcacaagcacgacauccagaucaccaacgaguccuacaacaacuacguccccagcuacgugaagccggacuccgugagcaccuccgaccuggggagccugaucgacugcaacgccgccagcgucaaccagaucgugcuccgcaacuccaacggcgccugcaucuggaacgccgcggccuacaugaagcugagcgacgcccugaagcggcagauccgcaucgccugccggaagugcaaccucgcguuccgccugaccacguccaagcugcgggccaacgacaacauccucagcgugcgcuucaccgccaacaagaucgucgggggcuga

SEQ ID NO: 17601 - RNA, 5772 nt, Artificial Sequence
  SARS-CoV/Tor2__NC_004718.3__non-structural protein 3 (NSP3) CDS gc
auggcccccaucaagggcgugaccuucggggaggacaccgucugggaggugcagggcuacaagaacgugcgcaucacguucgagcuggacgagcgggucgacaaggugcucaacgagaagugcagcguguacaccgucgaguccgggaccgaggugaccgaguucgccugcguggucgcggaggccguggugaagacgcugcagccggucagcgaccugcucaccaacaugggcaucgaccuggacgagugguccguggccaccuucuaccuguucgacgacgccggggaggagaacuucagcucccgcauguacugcagcuucuacccgcccgacgaggaggaggaggacgacgccgagugcgaggaggaggagaucgacgagaccugcgagcacgaguacggcacggaggacgacuaccagggccucccccuggaguucggggcguccgccgagaccgugcgggucgaggaggaggaggaggaggacuggcuggacgacaccaccgagcagagcgagaucgagcccgagcccgagcccacgcccgaggagccggugaaccaguucaccggcuaccucaagcugaccgacaacguggccaucaagugcgucgacaucgugaaggaggcccaguccgcgaaccccauggugaucgucaacgccgccaacauccaccugaagcacgggggcgggguggccggcgcccucaacaaggcgaccaacggcgccaugcagaaggagagcgacgacuacaucaagcugaacgggccccugacggugggcggguccugccuccugagcggccacaaccuggccaagaagugccuccacgucgugggccccaaccugaacgccggggaggacauccagcugcucaaggccgcguacgagaacuucaacucccaggacauccugcuggccccgcuccugagcgccggcaucuucggggccaagccccugcagucccuccaggucugcgugcagaccgugcgcacccaggucuacaucgccgugaacgacaaggcgcuguacgagcaggucgucauggacuaccuggacaaccucaagccccggguggaggcccccaagcaggaggagccgcccaacaccgaggacagcaagacggaggagaaguccgugguccagaagcccguggacgugaagcccaagaucaaggccugcaucgacgaggucaccaccacccuggaggagacgaaguuccugaccaacaagcuccugcuguucgccgacaucaacggcaagcucuaccacgacagccagaacaugcugcgcggggaggacauguccuuccuggagaaggacgccccguacauggugggcgacgugaucaccagcggcgacaucacgugcgucgugauccccagcaagaaggccgggggcacgaccgagaugcucucccgggcgcugaagaaggugcccgucgacgaguacaucaccaccuaccccgggcagggcugcgccggguacacgcuggaggaggccaagaccgcgcucaagaagugcaagagcgccuucuacgugcugccguccgaggcccccaacgccaaggaggagauccugggcaccgugagcuggaaccuccgcgagaugcuggcccacgcggaggagacccggaagcugaugcccaucugcauggacguccgcgccaucauggccacgauccagcggaaguacaagggcaucaagauccaggaggggaucguggacuacggcgugcgcuucuucuucuacaccuccaaggagcccgucgccagcaucaucaccaagcugaacucccucaacgagccgcuggugaccaugcccaucggguacgugacccacggcuucaaccuggaggaggccgcgcggugcaugcgcagccucaaggcccccgccgucguguccgugagcuccccggacgccgucaccaccuacaacggguaccugaccagcuccagcaagaccuccgaggagcacuucguggagacggugagccuggccggcuccuaccgggacuggagcuacuccggccagcggaccgagcucgggguggaguuccugaagcggggcgacaagaucguguaccacacccuggagagccccguggaguuccaccucgacggggagguccugagccuggacaagcucaagucccugcugagccuccgcgaggugaagaccaucaagguguucacgaccgucgacaacaccaaccugcacacccagcugguggacauguccaugacguacggccagcaguucggccccaccuaccucgacggggcggacgugaccaagaucaagccccacgucaaccacgagggcaagaccuucuucgugcugccgagcgacgacacgcugcgguccgaggccuucgaguacuaccacacccucgacgagagcuuccuggggcgcuacauguccgcccugaaccacaccaagaaguggaaguucccccaggugggcgggcucaccagcaucaagugggccgacaacaacugcuaccuguccagcguccugcucgcgcugcagcagcuggaggugaaguucaacgcccccgcccuccaggaggccuacuaccgggcccgcgcgggcgacgccgccaacuucugcgcccugauccuggccuacuccaacaagacggugggcgagcucggggacguccgcgagaccaugacccaccuccugcagcacgcgaaccucgagagcgccaagcgggugcugaacguggucugcaagcacugcggccagaagaccacgacccugaccgggguggaggccgucauguacaugggcacccucuccuacgacaaccugaagacgggggugagcauccccugcgugugcggccgcgacgccacccaguaccugguccagcaggaguccagcuucgugaugauguccgccccgcccgcggaguacaagcuccagcagggcaccuuccugugcgccaacgaguacaccgggaacuaccagugcggccacuacacgcacaucaccgccaaggagacccuguaccggaucgacggggcccaccucaccaagaugagcgaguacaagggccccgugacggacgucuucuacaaggagaccagcuacaccaccaccaucaagcccguguccuacaagcuggacggggugacguacaccgagaucgagccgaagcuggacggcuacuacaagaaggacaacgcguacuacaccgagcagcccaucgaccucguccccacccagccccugccgaacgccagcuucgacaacuucaagcugacgugcuccaacaccaaguucgccgacgaccucaaccagaugaccggcuucaccaagcccgccagccgcgagcuguccgugacguucuuccccgaccugaacggggacguggucgccaucgacuaccggcacuacagcgcguccuucaagaagggcgccaagcuccugcacaagcccaucguguggcacaucaaccaggccaccaccaagaccacguucaagccgaacaccuggugccugcgcugccucuggagcaccaagcccguggacaccuccaacagcuucgagguccuggccguggaggacacgcaggggauggacaaccuggccugcgagucccagcagcccaccagcgaggagguggucgagaaccccaccauccagaaggaggugaucgagugcgacgugaagaccacggaggucgugggcaacgugauccucaagccguccgacgagggggucaaggugacccaggagcugggccacgaggaccugauggcggccuacguggagaacaccagcaucaccaucaagaagcccaacgagcucucccuggcccugggccucaagacgaucgccacccacgggaucgccgcgaucaacagcguccccugguccaagauccuggccuacgugaagccguuccugggccaggccgccaucaccaccagcaacugcgccaagcggcucgcgcagcgcguguucaacaacuacaugcccuacgucuucacgcugcuguuccagcucugcaccuucaccaaguccaccaacagccggauccgcgccagccugcccacgaccaucgccaagaacuccgucaagagcguggccaagcugugccucgacgcggggaucaacuacgugaagucccccaaguucagcaagcuguucaccaucgccauguggcugcuccugcuguccaucugccucggcagccugaucugcgugaccgccgccuucggcgugcugcucuccaacuucggggccccgagcuacugcaacggcguccgggagcuguaccugaacuccagcaacgugacgaccauggacuucugcgagggguccuuccccugcagcaucugccucuccggccuggacagccuggacuccuaccccgcgcucgagaccauccaggugaccaucagcuccuacaagcuggaccugacgauccucgggcuggccgccgaguggguccuggccuacaugcuguucaccaaguucuucuaccugcugggccugagcgccaucaugcaggucuucuucggcuacuucgcgucccacuucaucagcaacagcuggcucaugugguucaucaucuccaucgugcagauggcccccgugagcgccauggugcgcauguacaucuucuucgccuccuucuacuacaucuggaaguccuacgugcacaucauggacgggugcaccagcuccacgugcaugaugugcuacaagcggaaccgcgccacccgggucgagugcaccaccaucgugaacggcaugaagcgcagcuucuacguguacgcgaacgggggccggggguucugcaagacccacaacuggaacugccugaacugcgacaccuucugcacgggcagcaccuucaucuccgacgaggucgcccgcgaccugagccuccaguucaagcggccgaucaaccccaccgaccaguccagcuacaucguggacuccguggccgucaagaacggcgcccugcaccuguacuucgacaaggcggggcagaagaccuacgagcgccacccccucagccacuucgugaaccuggacaaccugcgcgccaacaacacgaagggcucccuccccaucaacgucaucguguucgacggcaagagcaagugcgacgaguccgccagcaaguccgccagcguguacuacagccagcugaugugccagccgauccugcuccuggaccaggcccuggucuccgacgugggggacagcaccgagguguccgucaagauguucgacgcguacguggacaccuucagcgccaccuucuccgugcccauggagaagcucaaggcccuggucgccacggcccacagcgagcuggcgaaggggguggcccucgacggcgugcuguccaccuucgucagcgccgcccggcagggcgugguggacaccgacgucgacaccaaggacgugaucgagugccugaagcucucccaccacagcgaccuggaggugacgggggacuccugcaacaacuucaugcugaccuacaacaaggucgagaacaugacgccccgcgaccucggcgccugcaucgacugcaacgcgcggcacaucaacgcccagguggccaagagccacaacgugucccugaucuggaacgucaaggacuacaugagccuguccgagcagcuccgcaagcagauccggagcgccgcgaagaagaacaacauccccuuccgccugaccugcgccaccacccgccagguggugaacgucaucaccaccaagaucucccugaagggcggguga

SEQ ID NO: 17602 - RNA, 5703 nt, Artificial Sequence
  HCoV/OC43__NC_006213.1__non-structural protein 3 (NSP3) CDS gc
augggccgccgggugaccuucaaggagcagcccaccgucaaggagaucaucagcaugccgaagaucaucaagguguucuacgagcuggacaacgacuucaacacgauccucaacaccgccugcgggguguucgaggucgacgacaccguggacauggaggaguucuacgccguggucaucgacgcgaucgaggagaagcugucccccugcaaggagcuggagggcgugggggccaaggugagcgccuuccuccagaagcuggaggacaacccccuguuccucuucgacgaggccggcgaggagguccuggcccccaagcuguacugcgcguucaccgccccggaggacgacgacuuccucgaggaguccgacguggaggaggacgacguggagggggaggagacggaccugaccgucaccagcgccggccagcccugcguggccuccgagcaggaggagagcuccgaggugcuggaggacacccucgacgacggccccagcgucgagacguccgacagccagguggaggaggacguggagauguccgacuucgucgaccuggagagcgugauccaggacuacgagaacgugugcuucgaguucuacaccaccgagcccgaguucgucaaggugcuggggcucuacgugccgaaggcgacccgcaacaacugcuggcugcgguccguccuggccgugaugcagaagcuccccugccaguucaaggacaagaaccugcaggaccuguggguccucuacaagcagcaguacagccagcuguucguggacacgcuggugaacaagauccccgccaacaucguccucccccagggcggguacguggccgacuucgccuacugguuccugacccugugcgacuggcagugcguggcguacuggaagugcaucaagugcgaccucgcccugaagcugaagggccucgacgccauguucuucuacggggacgucgugucccacaucugcaagugcggcgagagcauggugcugaucgacgucgacgugccguucaccgcccacuucgcccugaaggacaagcuguucugcgcguucaucaccaagcgcaucguguacaaggccgccugcgucguggacgugaacgacucccacagcauggccgucguggacggcaagcagaucgacgaccaccggaucacguccaucaccagcgacaaguucgacuucaucaucgggcacggcaugagcuucuccaugaccaccuucgagaucgcccagcucuacgggagcugcaucacgcccaacgugugcuucgucaagggcgacaucaucaagguguccaagcuggugaaggcggaggucguggugaaccccgccaacggccacauggcccacgggggcggggucgccaaggccaucgcgguggccgccggccagcaguucgugaaggagaccaccgacauggucaagagcaagggggugugcgccaccggcgacugcuacguguccacgggcgggaagcucugcaagaccguccugaacguggugggccccgacgcgcgcacccaggggaagcagagcuacguccugcucgagcggguguacaagcaccugaacaacuacgacugcguggucaccacgcugaucuccgccggcaucuucagcgugccguccgacgugagccucaccuaccugcuggggaccgccaagaagcaggucgugcucguguccaacaaccaggaggacuucgaccugaucagcaagugccagaucaccgccgucgagggcacgaagaagcuggccgcgcgccuguccuucaacgugggccggagcaucguguacgagaccgacgccaacaagcucauccugaucaacgacgucgccuucguguccaccuucaacgugcugcaggacguccucagccugcgccacgacaucgcccuggacgacgacgcccggaccuucgugcaguccaacguggacgucgugcccgagggguggcgcgucgugaacaaguucuaccagaucaacggcgugcggacggucaaguacuucgagugcaccgggggcaucgacaucugcagccaggacaagguguucggguacgugcagcagggcaucuucaacaaggcgaccgucgcccagaucaaggcccucuuccuggacaagguggacauccugcucaccguggacggcgucaacuucaccaaccgcuucgugcccgugggggaguccuucggcaagagccuggggaacgucuucugcgacggcgugaacgugacgaagcacaagugcgacaucaacuacaagggcaaggucuucuuccaguucgacaaccugagcuccgaggaccucaaggccgugcggagcuccuucaacuucgaccagaaggagcugcuggccuacuacaacaugcucgugaacugcuucaaguggcaggucguggugaacgggaaguacuucaccuucaagcaggcgaacaacaacugcuucgucaacgugagcugccugaugcugcagucccuccaccugaccuucaagaucgugcaguggcaggaggccuggcuggaguuccgcagcggccggcccgcccgcuucgucgcccucgugcuggcgaagggcggguucaaguucggggacccggccgacucccgggacuuccugcgcguggucuucagccagguggaccucaccggcgccaucugcgacuucgagaucgccugcaagugcggcgugaagcaggagcagcggacggggcuggacgccgucaugcacuucggcacccugucccgcgaggaccucgagaucggguacaccguggacugcagcugcggcaagaagcugauccacugcgugcgcuucgacguccccuuccugaucugcuccaacacccccgcgagcgugaagcuccccaagggggugggcuccgccaacaucuucaucggcgacaaggucgggcacuacgugcacgugaagugcgagcagagcuaccagcuguacgacgccuccaacgucaagaaggugacggacgugaccggcaagcugagcgacugccucuaccugaagaaccugaagcagaccuucaaguccguccucaccacguacuaccuggacgacgugaagaagaucgaguacaagccggaccugagccaguacuacugcgacgggggcaaguacuacacccagcggaucaucaaggcccaguucaagaccuucgagaagguggacggggucuacaccaacuucaagcucaucggccacacggugugcgacagccugaacgccaagcugggcuucgacuccagcaaggaguucguggaguacaagaucaccgaguggcccaccgcgaccggggacgucgugcucgccacggacgaccuguacgugaagcgcuacgagcggggcugcaucaccuucgggaagcccgucaucuggcugucccacgagaaggccagccucaacucccugaccuacuucaaccgccccagccugguggacgacaacaaguucgacguccucaagguggacgacguggacgacggcggggacuccagcgaguccggcgccaaggagaccaaggagaucaacaucaucaagcugagcggcgucaagaagccguucaagguggaggacuccgugaucgucaacgacgacacgagcgagaccaaguacgugaagucccugagcaucguggacgucuacgacauguggcucaccgggugcaaguacguggugcggaccgccaacgcgcugucccgcgccgucaacgugcccacgauccggaaguucaucaaguucggcaugacccuggugagcauccccaucgaccuccugaaccugcgcgagaucaagccggccgucaacguggugaaggccguccggaacaagaucuccgugugcuucaacuucaucaaguggcuguucgugcuccuguucggguggaucaagaucagcgcggacaacaaggucaucuacaccaccgagaucgccuccaagcucacgugcaagcugguggcccuggccuucaagaacgccuuccucaccuucaaguggagcaugguggcgcgcggcgccugcaucaucgccaccaucuuccugcugugguucaacuucaucuacgccaacgucaucuucagcgacuucuaccuccccaagaucggcuuccugcccaccuucguggggaagaucgcccaguggaucaagaacacguucucccuggugaccaucugcgaccucuacagcauccaggacgucggcuucaagaaccaguacugcaacggguccaucgcgugccaguucugccuggccggcuucgacaugcuggacaacuacaaggccaucgacguggugcaguacgaggccgaccggcgcgccuucgucgacuacaccggggugcucaagaucgugaucgagcugaucgucagcuacgcgcuguacaccgccugguucuacccccucuucgcccugaucuccauccagauccugaccacguggcucccggagcuguucaugcugagcacccuccacugguccuuccggcugcugguggcccucgccaacaugcugcccgcgcacguguucaugcgcuucuacaucaucaucgccagcuucaucaagcuguucucccucuuccggcacgucgccuacggcugcagcaaguccggcugccuguucugcuacaagcgcaaccggagccugcgcgugaagugcuccaccaucgucgggggcaugauccgguacuacgacgugauggccaacgggggcaccggguucugcagcaagcaccaguggaacugcaucgacugcgacuccuacaagcccggcaacacguucaucaccguggaggcggcccucgaccugagcaaggagcugaagcgccccauccagccgaccgacguggccuaccacaccgucacggacgugaagcaggucggcugcuccaugcgccucuucuacgaccgggacgggcagcgcaccuacgacgacgugaacgccagccuguucguggacuacuccaaccugcuccacagcaaggucaagagcgugcccaacaugcacgugguggucguggagaacgacgccgacaaggcgaacuuccugaacgccgccgucuucuacgcccagucccuguuccggcccauccugaugguggacaagaaccucaucaccaccgccaacacgggcaccagcgugaccgagaccauguucgacgucuacguggacacguuccuguccauguucgacguggacaagaagucccugaacgcgcucaucgccaccgcccacagcagcaucaagcaggggacccagaucuacaagguccuggacaccuuccuguccugcgcccgcaagagcugcuccaucgacagcgacguggacacgaagugccucgccgacuccgugaugagcgcggucuccgccggccuggagcugaccgacgagagcugcaacaaccucgugcccaccuaccugaaguccgacaacaucguggccgccgaccuggggguccucauccagaacagcgcgaagcacgugcagggcaacguggccaagaucgccggcgucuccugcaucuggagcguggacgccuucaaccaguucuccagcgacuuccagcacaagcugaagaaggccugcugcaagaccgggcugaagcucaagcugacguacaacaagcagauggcgaacgugagcguccugaccaccccguucucccucaagggcggguga

SEQ ID NO: 17603 - RNA, 6093 nt, Artificial Sequence
  HCoV/HKU1__NC_006577.2__non-structural protein 3 (NSP3) CDS gc
augggccgcaaggugaacuucaacgagaagcccgucgugauggagaucccgagccugaugaccgugaaggucauguucgaccucgacuccaccuucgacgacauccuggggaaggugugcagcgaguucgagguggagaagggcgucacgguggacgacuucguggccgucgugugcgacgccaucgagaacgcgcugaacuccugcaaggagcaccccguggucggguaccaggugcgggccuuccucaacaagcugaacgagaacguggucuaccuguucgacgaggccggcgacgaggccauggccagccgcauguacugcaccuucgcgaucgaggacguggaggacgugaucuccagcgaggccgucgaggacaccaucgacggggugguggaggacaccaucaacgacgacgaggacgucgugacgggcgacaacgacgacgaggacguggucaccggcgacaacgacgacgaggacguggucaccggggacaacgacgacgaggacguggugaccggcgacaacgacgacgaggacgucgugacgggggacaacgacgacgaggacguggucaccggcgacaacgacgacgaggacguggugaccggggacaacgacgacgaggacgucgugaccggcgacaacgacgacgaggacguggucacgggcgacaacgacgacgaggacguggugaccggggacaacgacgacgaggacgucgugaccggcgacaacgacgacgaggacguggucaccggggacaacgacgacgaggacguggugacgggcgacaacgacgacgaggacgucgugaccggcgacaacaacgacgaggagaucgugaccggggacaacgacgaccagaucgucgugaccggcgacgacguggacgacaucgaguccaucuacgacuucgacacguacaaggcccuccuggucuucaacgacguguacaacgacgcccuguucgugagcuacggguccagcgucgagaccgagaccuacuucaaggugaacggccucuggucccccaccaucacgcacaccaacugcuggcugcggagcgugcugcucgucaugcagaagcugcccuucaaguucaaggaccuggcgaucgagaacauguggcucuccuacaaggugggguacaaccagagcuucguggacuaccugcugaccaccaucccgaaggccaucguccucccccagggcggcuucguggccgacuucgccuacugguuccugaaccaguucgacaucaacgccuacgcgaacuggugcugccugaagugcggguucuccuucgaccucaacggccuggacgcccuguucuucuacggggacaucgugagccacgucugcaagugcggccacaacaugacgcucaucgccgccgaccugcccugcacccugcacuucucccucuucgacgacaacuucugcgccuucugcacccccaagaagaucuucaucgcggccugcgccguggacgugaacgucugccacagcguggccgugaucggggacgagcagaucgacggcaaguucgucaccaaguucuccggcgacaaguucgacuucaucgugggguacggcaugagcuucagcauguccagcuucgagcugccgcagcuguacgggcucugcaucacgcccaacgugugcuucgucaagggcgacaucaucaacguggcccgccuggugaaggcggacgucaucgugaaccccgccaacgggcacaugcugcacggcggcggggucgccaaggccaucgccguggcggccggcaagaaguucuccaaggagaccgccgccauggucaagagcaagggggugugccaggugggcgacugcuacguguccaccggcgggaagcucugcaagaccauccugaacaucgucggccccgacgcgcggcaggacgggcgccagagcuacgugcugcucgcccgggccuacaagcaccugaacaacuacgacugcugccuguccacgcucaucagcgccggcaucuucuccgugccggccgacgucagccugaccuaccugcucggggugguggacaagcaggucauccugguguccaacaacaaggaggacuucgacaucauccagaagugccagaucaccagcguggucggcaccaaggcgcuggccgugcgccucaccgccaacgugggccgggucaucaaguucgagacggacgccuacaagcuguuccuguccggggacgacugcuucgugagcaacuccagcgugauccaggagguccugcuccugcgccacgacauccagcugaacaacgacgugcgggacuaccuccuguccaagaugaccagccugcccaaggacuggcgccucaucaacaaguucgacgugaucaacggcgucaagaccgugaaguacuucgagugccccaacuccaucuacaucugcagccaggggaaggacuucggcuacgugugcgacgggagcuucuacaaggccaccgucaaccaggugugcgugcugcuggcgaagaagaucgacguccuccugacgguggacggcgugaacuucaaguccaucagccugaccgucggcgagguguucgggaagauccucggcaacguguucugcgacgggaucgacgucaccaagcugaagugcuccgacuucuacgccgacaagauccuguaccaguacgagaaccucagccuggccgacaucuccgccgugcagagcuccuucggcuucgaccagcagcagcugcucgccuacuacaacuuccugaccgugugcaaguggagcgucguggugaacgggcccuucuucuccuucgagcagagccacaacaacugcuacgucaacguggcgugccugaugcuccagcacaucaaccugaaguucaacaaguggcaguggcaggaggccugguacgaguuccgggccggccgcccgcaccggcugguggcccucguccuggcgaagggccacuucaaguucgacgagcccuccgacgccacggacuucauccgcguggugcugaagcaggccgaccucagcggggccaucugcgagcuggagcugaucugcgacugcggcaucaagcaggagucccgggucgggguggacgccgugaugcacuucggcacccucgcgaagaccgaccuguucaacggguacaagaucggcugcaacugcgccggccgcaucguccacugcaccaagcugaacgugcccuuccucaucugcagcaacacgccccuguccaaggaccugccggacgacgucguggccgccaacauguucaugggggugggcgucgggcacuacacccaccucaagugcggcagccccuaccagcacuacgacgccugcuccgugaagaaguacaccggcgugagcgggugccugaccgacugccuguaccucaagaaccugacgcagaccuucaccagcaugcugaccaacuacuuccucgacgacgucgagaugguggcguacaaccccgaccugucccaguacuacugcgacaacggcaaguacuacacgaagcccaucaucaaggcccaguucaagccguucgccaagguggacggggucuacaccaacuucaagcuggugggccacgacaucugcgcccagcucaacgacaagcugggguucaacguggaccugcccuucgucgaguacaaggugaccguguggcccgucgccaccggcgacguggugcucgcgagcgacgaccuguacgucaagcgguacuucaagggcugcgagacguucgggaagcccgugaucugguucugccacgacgaggccucccugaacagccucaccuacuucaacaagccguccuucaagagcgagaaccgcuacuccgugcugagcgucgacuccgugagcgaggagucccagggcaacguggucaccagcgugauggagucccagaucagcaccaaggaggugaagcugaaggggguccggaagacggugaagaucgaggacgccaucaucgugaacgacgagaacuccagcaucaaggucgugaagucccucagccugguggacgucugggacauguaccugaccggcugcgacuacguggugugggucgccaacgagcucucccgccuggucaagagccccaccgugcgcgaguacauccgguacgggaucaagcccaucaccaucccgaucgaccugcucugccugcgcgacgacaaccagacgcugcucgugcccaagaucuucaaggcgcgggccaucgaguucuacggcuuccugaaguggcuguucaucuacguguucagccuccugcacuucaccaacgacaagaccaucuucuacaccacggagaucgccuccaaguucaccuucaaccuguucugccucgcccugaagaacgccuuccagaccuuccgcuggagcaucuucaucaagggcuuccugguggucgcgaccguguuccucuucugguucaacuuccuguacaucaacgugaucuucuccgacuucuaccugcccaacaucagcgucuuccccaucuucguggggcggaucgugauguggaucaaggccaccuucggccucgucacgaucugcgacuucuacuccaagcugggggugggcuucaccagccacuucugcaacggguccuucaucugcgagcugugccacagcggcuucgacaugcucgacaccuacgccgccaucgacuucgugcaguacgaggucgaccgccgggugcuguucgacuacgucucccuggugaagcucaucguggagcuggucaucggcuacagccuguacaccgugugguucuacccccucuucugccugaucgggcugcagcuguucacgaccuggcucccggaccuguucaugcucgagaccaugcacuggcugauccgcuucaucguguucgucgccaacaugcugcccgcguucgugcuccugcgguucuacaucguggucaccgccauguacaagguggugggcuucauccgccacaucgucuacgggugcaacaaggccggcugccuguucugcuacaagcggaacugcuccgugcgcgugaagugcagcacgaucgucggcggggugauccgguacuacgacaucaccgccaacggcgggaccggcuucugcgugaagcaccaguggaacugcuucaacugccacuccuucaagcccgggaacaccuucaucacggucgaggccgcgaucgagcucagcaaggagcugaagcgcccggugaaccccaccgacgccucccacuacguggucaccgacaucaagcaggucggcugcaugaugcggcuguucuacgaccgcgacggccagcggguguacgacgacguggacgccagccuguucguggacaucaacaaccuccugcacuccaaggugaaggucgugcccaaccuguacguggucgugguggagagcgacgccgaccgcgccaacuuccucaacgcggucguguucuacgcccagucccuguaccggcccauccugcucguggacaagaagcugaucaccacggccugcaacgggaucagcgucacccagaccauguucgacguguacguggacaccuucaugagccacuucgacgucgaccgcaaguccuucaacaacuucgugaacaucgcccacgcgagccugcgcgagggcgugcagcucgagaagguccuggacacguucguggggugcgugcggaagugcugcuccaucgacagcgacgucgagacccgcuucaucaccaaguccaugaucagcgccguggccgccggccuggaguucaccgacgagaacuacaacaaccucgugccgacguaccugaaguccgacaacaucgucgccgcggaccugggggugcucauccagaacggcgccaagcacgugcagggcaacgucgccaaggccgccaacaucagcugcaucugguucaucgacgcguucaaccagcugaccgccgaccugcagcacaagcucaagaaggccugcgugaagaccgggcugaagcugaagcucaccuucaacaagcaggaggccuccguccccauccugacgacccccuucagccugaagggcggguga

SEQ ID NO: 17604 - RNA, 4782 nt, Artificial Sequence
  HCoV/229E/BN1/GER/2015__KU291448.1__non-structural protein 3 (NSP3) CDS gc
augggcaaggugagcuucuccgacgacgucgaggugaaggacaucgagcccguguaccgcgucaagcugugcuucgaguucgaggacgagaagcucguggacgugugcgagaaggccaucgggaagaagaucaagcacgagggcgacugggacagcuucugcaagaccauccaguccgcccugagcgucguguccugcuacgugaaccugccgaccuacuacaucuacgacgaggagggcgggaacgaccucagccugcccgucaugaucuccgaguggccccuguucgagagcgacaaggaggaggacgugcagcaggcgcagcaggaggccacgcacaucgccgaggacguggucgaccagguggaggaggugaacuccaucuucgacaucgagaccgucgacgugaagcacgagaugagccccuucgagaugccguucgaggagcucaacgggcugaagauccugaagcagcucgacaacaacugcugggugaacuccgucaugcugcagauccagcugaccggcauccucgacggcgacuacgccaugcaguucuucaagauggggcggguggccaagaugaucgagcgcugcuacaccgcggagcagugcauccggggcgccaugggggacgugggccugugcauguaccgccugcucaaggaccugcacacgggguucauggucauggacuacaagugcagcugcaccuccggccggcuggaggagagcggcgccguccucuucugcacccccaccaagaaggccuuccccuacgggacgugccugaacugcaacgcgccccgcaugugcaccauccggcagcugcagggcaccaucaucuucgugcagcagaagccggagcccgugaaccccguguccuucgucgugaagcccgugugcagcuccaucuuccgcggggccgucagcugcggccacuaccagaccaacaucuacucccagaaccucugcguggacggcuucggggugaacaagauccagccguggacgaacgacgcccugaacaccaucugcaucaaggacgccgacuacaacgccaaggacgagaucagcgucacccccaucaagaacaccguggacacgauccccaaggaggaguucguggucaaggagaagcugaacgcguuccucgugcacggcaacguggucuucuaccagggggacguggacaccguggucaacggcguggacuucgacuucaucgugaacgccgccaacgagaaccuggcccacgggggcggccuggccaaggcgcucgacgucuacaccaaggggaagcugcagcggcugagcaaggagcacaucggccucgccgggaaggugcgcgugggcaccggggucaugguggagugcgacucccugcggaucuucaacguggucggcccccgcaagggcaagcacgagcgggaccugcucgugaaggccuacaacacgaucaacaacgagcaggggaccccgcugacccccauccugagcugcggcaucuucggggugaagcucgagaccucccuggagguccugcucgacgugugcaacacgaaggaguucaagguguucgucuacaccgacaccgaggugugcaaggugaaggacuucgucagcggccuggugaacgugcagaaggucgcccagcccaagaucgagcagaagcccgugucccugaucaagguggccccgaagcccuaccgcgucgacgggaaguucagcuacuucaccgaggaccuccugugcguggcggacgacaagcccaucgugcuguucacggacuccaugcucacccuggacgaccggggccuggcccuggacaacgcccucagcggcguccuguccgccgccaucaaggacugcguggacaucaacaaggcgauccccagcgggaaccugaucaaguucgacaucgacuccguggucguguacaugugcguggucccgagcgagaaggacaagcaccucgacaacaacgugcagcgcugcacccggaagcugaaccgccugaugugcgacaucgugugcaccauccccgccgacuacauccucccccugguccuguccagccucacgugcaacguguccuucgucggcgagcugaaggccgccgaggcgaaggugaucaccaucaaggugaccgaggacggggucaacgugcacgacgugaccgucacgaccgacaagagcuucgagcagcaggucggcgugaucgccgacaaggacaaggaccuguccggcgccgugcccagcgaccucaacaccuccgagcugcugaccaaggccaucgacguggacuggguggaguucuacggguucaaggacgccgucaccuucgcgacgguggaccacagcgccuucgccuacgagagcgccguggucaacggcauccgggugcucaagaccuccgacaacaacugcugggugaacgccgucugcaucgcgcugcaguaccugaagccgcacuucaucagccaggggcucgacgccgccuggaacaaguucgugcugggcgacguggagaucuucgucgccuucguguacuacguggcccgccuggucaagggggacaagggcgacgcggaggacacccucaacaagcuguccaaguaccuggugaacgaggcccaggugcagcucgagcacuacagcuccugcgucgagugcgacgccaaguucaagaacagcgugaccuccaucaacagcgccaucgugugcgcguccgucaagcgggacggcguccaggugggguacugcgugcacggcaucaaguacuacagccgcgugaaguccgugcgcgggcgggccaucaucgucagcguggagcagcuggagcccugcgugcagucccgccugcucagcggcgucgccuacacggccuucuccgggcccguggacaagggccacuacaccguguacgacaccgccaagaaguccauguacgacggcgaccgguucgucaagcacgaccugagccugcucagcgugaccagcguggucauggugggggacuacguggcgccggucuccacggugaagcccaagcccgugaucagccagcuggacgagaacgcccagaaguucuucgacuucggcgacuuccugguccacaacuucgugaucuucuucaccuggcuccuguccauguucacccugugcaagaccgccgucacgaccugcgacgugaagaucauggccaaggcgccccagcgcaccggggugguccucaagcggagccugaaguacaaccugaaggccuccgccgccgugcucaagagcaagugguggcugcuggccaaguucaccaagcuccugcugcucaucuacacgcuguacuccgugguccuguucugcgugcgcuucggcccguucgaguucugcagcgagaccgugaacggguacgccaaguccaacuucgucaaggacgacuacugcgacggcagccucggcugcaagaugugccuguucggguaccaggagcugucccaguucagccaccucgacgugguguggaagcacaucaccgacccccuguucuccaacauccagcccuucaucgucauggugcugcuccugaucuucggcgacaacuaccugcggugcuuccuccuguacuucguggcgcagaugaucagcaccgucgggguguuccugggcuacaaggagacgaacugguuccuccacuucauccccuucgacgugaucugcgacgagcuguucgucaccgugaucgugaucaaggucaucuccuucgugcgccacgugcuguucgggugcgagaacccggacugcaucgccugcagcaaguccgcccggcucaagcgcuuccccgucaacaccaucgugaacggcgugcagcggagcuucuacgucaacgccaacggcggguccaaguucugcaagaagcaccgcuucuucugcguggacugcgacagcuacggcuacgggagcaccuucaucacgcccgaggugucccgggagcugggcaacaucaccaagaccaacguccagcccaccggcccggcguacgugaugaucgacaagguggaguucgagaacggguucuaccgccuguacagcggcgagacguucuggcgguacaacuucgacaucaccgaguccaaguacagcugcaaggaggucuucaagaacugcaacgugcucgacgacuucaucguguucaacaacaacgggaccaacgucacccaggugaagaacgccuccguguacuucagccagcugcugugccgccccaucaagcucgucgacuccgagcugcugagcacgcucuccguggacuucaacggcgugcugcacaaggccuacaucgacguccugcggaacagcuucgggaaggaccucaacgccaacaugucccuggccgacugcaagagcgcgcugggccucuccaucagcgaccacgaguucaccuccgccaucagcaacgcccaccgcugcgacgugcugcuguccgaccucagcuucaacaacuucguguccagcuacgccaagcccgaggagaagcugagcgccuacgaccuggcgugcugcaugcgggccggcgccaaggucgugaacgccaacgugcucaccaaggaccagacccccaucgucuggcacgccaaggacuucaacucccugagcgcggaggggcgcaaguacaucgugaagacguccaaggccaagggccugaccuuccuccugaccaucaacgagaaccaggccgugacccagaucccggccaccagcaucgucgccaagcagggggcguga

SEQ ID NO: 17605 - RNA, 4698 nt, Artificial Sequence
  HCoV/NL63/RPTEC/2004__JX504050.1__non-structural protein 3 (NSP3) CDS gc
augggcaagaucagcuucuccgacgacgugaucguccacgacguggagcccacccacaaggugaagcugaucuucgaguucgaggacgacgucgugaccagccucugcaagaaguccuucggcaagagcaucaucuacacgggggacugggaggggcugcacgaggugcugaccuccgccaugaacgucaucggccagcacaucaagcucccgcaguucuacaucuacgacgaggagggcggguacgacgugagcaagcccgugaugaucucccaguggcccaucagcaacgacuccaacggcugcgucguggaggccagcaccgacuuccaccagcuggagugcaucguggacgacuccguccgcgaggagguggacaucaucgagcagcccuucgaggagguggagcacguccugagcaucaagcagccguucuccuucagcuuccgggacgagcucggggugcgcgugcuggaccaguccgacaacaacugcuggaucagcaccacgcugguccagcuccagcugaccaagcugcucgacgacuccaucgagaugcagcuguucaaggugggcaagguggacagcaucguccagaagugcuacgagcugucccaccucaucagcgggagccugggcgacuccgggaagcugcucagcgagcugcugaaggagaaguacacgugcuccaucaccuucgagaugagcugcgacugcggcaagaaguucgacgaccaggugggcugccucuucuggaucaugcccuacaccaagcuguuccagaagggggagugcugcaucugccacaagaugcagaccuacaagcugguguccaugaagggcaccggggucuucgugcaggaccccgcgcccaucgacaucgacgccuucccggucaagcccaucugcagcuccguguaccucggcgugaagggcagcgggcacuaccagaccaaccuguacuccuucaacaaggccaucgacggcuucggggucuucgacaucaagaacagcuccgugaacacggugugcuucgucgacguggacuuccacagcguggagaucgaggccggcgaggucaagcccuucgccguguacaagaacgugaaguucuaccugggggacaucucccaccucgucaacugcgugagcuucgacuucguggucaacgcggccaacgagaaccugcugcacggcggcgggguggcccgggccaucgacauccucaccgagggccagcugcagucccugagcaaggacuacaucuccagcaacgggccccucaaggugggcgcgggggucaugcuggagugcgagaaguucaacguguucaacguggucggcccgcgcaccggcaagcacgagcacucccugcucguggaggccuacaacagcauccuguucgagaacgggaucccccugaugccccuccugagcugcggcaucuucggggugcggaucgagaacucccugaaggcccucuucagcugcgacaucaacaagccccugcaggucuucguguacuccagcaacgaggagcaggccgugcugaaguuccucgacggccuggaccugaccccggucaucgacgacguggacguggucaagcccuuccgcguggaggggaacuucuccuucuucgacugcggcgugaacgcccuggacggcgacaucuaccuccuguucacgaacagcauccugaugcucgacaagcaggggcagcugcuggacaccaagcucaacggcauccugcagcaggcggcccuggacuaccucgccaccgucaagaccgugcccgccgggaaccuggugaagcuggucguggaguccugcacgaucuacaugugcgugguccccagcaucaacgaccucuccuucgacaagaaccugggccggugcgugcgcaagcugaaccggcucaagaccugcgugaucgccaacgucccggcgaucgacgugcugaagaagcugcucagcucccugacccugaccgugaaguucgucguggagagcaacgugauggacgucaacgacugcuucaagaacgacaacguggugcucaagaucacggaggacggcaucaacgucaaggacguggucguggaguccagcaagucccuggggaagcagcugggcguggucagcgacgggguggacuccuucgagggcgugcuccccaucaacaccgacaccguccugagcguggcccccgagguggacugggucgccuucuacggguucgagaaggccgcccuguucgcgagccucgacgugaagcccuacggcuacccgaacgacuucgugggcggguuccgcguccugggcaccacggacaacaacugcugggugaacgcgaccugcaucauccugcaguaccucaagcccaccuucaaguccaaggggcugaacgugcuguggaacaaguucgucaccggcgacguggggcccuucgugagcuucaucuacuucaucacgauguccagcaagggccagaagggcgacgccgaggaggcccucuccaagcugagcgaguaccugaucuccgacagcaucgucacccucgagcaguacuccacgugcgacaucugcaagagcaccgugguggaggucaaguccgccaucgugugcgccagcgugcugaaggacgggugcgacgucggcuucugcccccaccggcacaagcugcgcucccgggugaaguucgugaacgggcgcgucgugaucaccaacgugggcgagccgaucaucagccagcccuccaagcuccugaacgggaucgccuacaccaccuucagcggcuccuucgacaacggccacuacgucguguacgacgccgccaacaacgcgguguacgacggggcccggcuguucagcuccgaccucagcacccuggccgucaccgccaucgugguggucggcgggugcgugacgagcaacgugcccaccaucgucuccgagaagaucagcgugauggacaagcuggacaccggcgcccagaaguucuuccaguucggggacuucgugaugaacaacaucguccucuuccugaccuggcugcucuccauguucagccugcugcgcacguccaucaugaagcacgacaucaaggugaucgcgaaggccccgaagcggaccggcgugauccucacccgcagcuucaaguacaacauccgguccgcccuguucgucaucaagcagaaguggugcgugaucgugacccuguucaaguuccuccugcugcucuacgccaucuacgcccuggucuucaugaucgugcaguucagccccuucaacucccugcucugcggcgacaucgugagcggguacgagaaguccacguucaacaaggacaucuacugcggcaacagcauggucugcaagaugugccuguucuccuaccaggaguucaacgaccuggaccacaccagccucguguggaagcacauccgcgaccccauccugaucucccugcagcccuucgucauccucgugauccugcugaucuucgggaacauguaccuccgguucggccugcuguacuucguggcgcaguucaucagcaccuucggcuccuuccucggguuccaccagaagcagugguuccugcacuucgucccguucgacgugcugugcaacgaguuccucgccaccuucaucgugugcaagaucguccuguucgugcgccacaucaucgugggcugcaacaacgccgacugcgucgccugcagcaaguccgcccgccugaagcgggugccccuccagacgaucaucaacgggaugcacaagagcuucuacgugaacgcgaacggcgggaccugcuucugcaacaagcacaacuucuucugcgucaacugcgacagcuucggccccggcaacaccuucaucaacggggacaucgcccgcgagcugggcaacguggugaagaccgccguccagcccacggccccggcguacgugaucaucgacaagguggacuucgucaacggguucuaccggcuguacuccggcgacaccuucuggcgcuacgacuucgacaucaccgagagcaaguacuccugcaaggaggugcucaagaacugcaacgugcuggagaacuucaucgucuacaacaacagcggguccaacaucacccagaucaagaacgccugcguguacuucagccagcugcucugcgagcccaucaagcuggugaacuccgagcugcucagcacgcuguccgucgacuucaacggcgugcugcacaaggccuacguggacguccucugcaacagcuucuucaaggagcugaccgccaacauguccauggccgagugcaaggcgacccugggccucaccgugagcgacgacgacuucguguccgccgucgccaacgcccaccgguacgacgugcugcugagcgaccucuccuucaacaacuucuucaucagcuacgccaagcccgaggacaagcuguccguguacgacaucgcgugcugcaugcgcgccgggagcaaggucgugaaccacaacgugcugaucaaggaguccauccccaucgucuggggcgugaaggacuucaacacgcugagccaggaggggaagaaguaccucgugaagaccaccaaggccaagggccugaccuuccugcucacguucaacgacaaccaggccaucacccaggucccggccaccagcaucguggcgaagcagggggccuga

SEQ ID NO: 17606 - RNA, 5772 nt, Artificial Sequence
  Bat SARS-like CoV/WIV1__KF367457.1__non-structural protein 3 (NSP3) CDS gc
auggcccccaccaagggcgugaccuucggggaggacacgguccuggaggugcagggcuacaagaacgugcgcaucaccuucgagcucgacgagcgggucgacaaggugcugaacgagaagugcagcguguacaccgucgaguccgggaccgaggugacggaguucgccugcguggucgcggaggccguggugaagacccugcagccggucagcgaccuccugaccaacaugggcaucgaccuggacgagugguccguggccaccuucuaccucuucgacgacgccggggaggagaagcugagcucccgcauguacugcagcuucuacccgcccgacgacgaggaggacugcgacgaguacgacgaggaggaggaggugcuggaggaguccugcgcccacgaguacggcacggaggaggacuaccagggccucagccuggaguucggggcguccaccgagaugcaggucgaggaggaggaggaggaggacuggcugggcgacgccaccgagcucagcgagcacgagcccgagcccgagcugacccccgaggagcccgugaaccaguucacgggguaccugaagcucaccgacaacguggccaucaagugcgucgacaucgugaaggaggcccagaacgcgaaccccaccgugaucgucaacgccgccaacauccaccugaagcacggcgggggcguggccggcgcccugaacaaggcgaccaacggggccaugcagaaggaguccgacgacuacaucaagcucaacggcccgcugguggucgggggcagcugccugcucuccggccacaaccuggccaagaagugccugcacguggucgggcccaaccucaacgccggcgaggacauccagcugcugaaggccgcguacgagaacuucaacagccaggacacgcuccuggcgccccugcucuccgccgggaucuucggcgccaagccccugcagagccugcaggucugcgugcagaccguccggacccagguguacaucgccgugaacgacaaggcccucuacgagcaggucgugauggacuaccuggacucccugaagccgcgcguggaggcccccaagcaggaggagccgccccggaccgaggaccccaagaucgaggagaaguccgucgugcagaagcccaucgacgugaagcccaagaucaaggccugcaucgacgaggucacgaccacccucgaggagaccaaguuccugacgaacaagcugcuccuguucgccgacaucaacgggaagcuguaccacgacucccacaacaugcuccgcggcgaggacaugagcuuccuggagaaggacgcccccuacguggugggcgacgucaucaccagcggggacaucacgugcguggugaucccguccaagaaggcgggcgggaccacggagaugcugagccgggcccucaagaagguccccguggacgaguacaucaccaccuaccccggccaggggugcgccggcuacacccuggaggaggccaagacggcgcugaagaagugcaaguccgccuucuacgugcugcccagcgagaccccgaacgccaaggaggagauccucggcaccgucuccuggaaccugcgcgagaugcuggcccacgccgaggagacccggaagcucaugcccaucugcauggacgugcgcgcgaucauggccacgauccagcggaaguacaaggggaucaaggugcaggagggcaucgucgacuacggggugcgcuucuucuucuacaccagcaaggagcccguggccuccaucaucaccaagcugaacagccugaacgagccccucgucaccaugccgaucggcuacgugacccacggguucaaccuggaggaggccgcccggugcaugcgcucccugaaggcgcccgccguggucagcguguccagccccgacgccgugaccaccuacaacggcuaccucaccagcagcuccaagaccagcgaggagcacuucguggagacggugucccuggccggcagcuaccgggacugguacuacuccgggcagcggaccgagcugggcguggaguuccucaagcgcggggacaagaucgucuaccacacccuggagagcccgguggaguuccaccuggacggcgaggugcucccccuggacaagcugaagucccuccugagccugcgggaggucaagaccaucaagguguucacgaccguggacaacaccaaccuccacacccagcuggucgacaugagcaugacguacggccagcaguucgggcccaccuaccuggacggcgccgacgugaccaagaucaagccccacgugaaccacgaggggaagaccuucuucguccucccguccgacgacacgcugcggagcgaggcguucgaguacuaccacacccuggacgaguccuuccucggccgcuacaugagcgcccugaaccacaccaagaaguggaaguucccccaggucgggggccugaccuccaucaagugggccgacaacaacugcuaccucagcuccgugcugcuggcccuccagcagaucgaggugaaguucaacgcgcccgcccugcaggaggccuacuaccgggcccgcgccggcgacgcggccaacuucugcgcccugauccucgccuacagcaacaagacggugggggagcugggcgacgugcgcgagaccaugacccaccuccugcagcacgccaaccuggaguccgcgaagcggguccugaacguggucugcaagcacugcgggcagaagaccacgacccucaccggcguggaggccgugauguacauggggacccugagcuacgacaaccugaagacgggcgucuccauccccugcgugugcggccgcgacgccacccaguaccucgugcagcaggagagcuccuucgucaugaugagcgccccgcccgccgaguacaagcugcagcaggggaccuuccugugcgcgaacgaguacaccggcaacuaccagugcgggcacuacacgcacaucaccgccaaggagacccucuaccggaucgacggcgcccaccugaccaagauguccgaguacaaggggcccgugacggacguguucuacaaggagaccagcuacaccaccaccaucaagcccgucagcuacaagcuggacggcgugacguacaccgagaucgagccgaagcucgacggcuacuacaagaaggacaacgccuacuacaccgagcagcccaucgaccuggugcccacccagccccugccgaacgcguccuucgacaacuucaagcucacgugcagcaacaccaaguucgccgacgaccugaaccagaugaccggguucaccaagcccgccucccgcgagcuguacgucacguucuuccccgaccucaacggcgacgugguggccaucgacuaccggcacuacagcgccuccuucaagaagggggcgaagcugcugcacaagcccaucgucuggcacaucaaccaggccaccaccaagaccacguucaagccgaacaccuggugccuccgcugccuguggagcaccaagcccguggacaccuccaacagcuucgaggugcuggccgucgaggacacgcagggcauggacaaccucgccugcgagucccagcagcccaccagcgaggaggugguggagaaccccaccauccagaaggaggucaucgagugcgacgugaagaccacggagguggucgggaacgugauccugaagccguccgacgagggcgugaaggucacccaggagcuggaccacgaggaccucauggccgcguacguggagaacaccagcaucaccaucaagaagcccaacgagcugucccuggcccucggccugaagacgaucgccacccacgggaucgccgccaucaacagcgugcccugguccaagauccuggcguacgucaagccguuccucggccaggccgccaucaccaccagcaacugcgccaagcggcuggcccagcgcguguucaacaacuacaugcccuacgugcugacgcuccuguuccagcugugcaccuucaccaaguccaccaacagccggauccgcgcgucccuccccacgaccaucgccaagaacagcguccgcgggguggcccggcugugccuggacgccggcaucaacuacgucaagagccccaaguucuccaagcuguucaccaucgcgauguggcuccugcuccugagcaucugccugggcucccucaucuacgugaccgccgcccugggggugcugcucagcaacuucggcgccccguccuacugcagcggggugcgggaguccuaccugaacagcuccaacgucacgaccauggacuucugcgagggcagcuuccccugcuccgugugccugagcgggcucgacucccuggacagcuaccccgcccuggagaccauccaggugaccaucuccagcuacaagcucgaccugacgauccugggccuggcggccgagugguuccucgccuacaugcuguucaccaaguucuucuaccugcucggccuguccgccaucaugcaggucuucuucggguacuucgccagccacuucaucuccaacagcuggcugaugugguucaucaucagcaucgugcagauggcgcccguguccgccaugguccgcauguacaucuucuucgccagcuucuacuacaucuggaaguccuacgugcacaucauggacggcugcaccagcuccacgugcaugaugugcuacaagcggaaccgcgccacccggguggagugcaccaccaucgucaacgggaugaagcgcagcuucuacguguacgccaacggcgggcggggcuucugcaagacccacaacuggaacugccucaacugcgacaccuucugcacgggcuccaccuucaucagcgacgagguggcgcgcgaccugucccugcaguucaagcgcccgaucaaccccaccgaccagagcuccuacaucgucgacagcguggccgucaagaacggggcccuccaccuguacuucgacaaggccggccagaagaccuacgagcggcacccccugucccacuucaucaaccucgacaaccugcgcgcgaacaacacgaaggggagccugcccaucaacgugaucguguucgacggcaaguccaagugcgacgagagcgccgcccgguccgccagcgucuacuacucccagcucaugugccagccgauccugcugcucgaccaggcccugaucagcgacgugggggacagcaccgagguguccgucaagauguucgacgcguacguggacaccuucagcgccaccuucuccgugcccauggagaagcugcgcgcccucgucgccacggcccacagcgagcuggcgaagggcguggcccuggacggcgugcucuccaccuucgucagcgccgcccggcagggggugguggacaccgacgucgacaccaaggacgugaucgagugccugaagcugucccaccacagcgaccucgaggugacgggcgacuccugcaacaacuucaugcugaccuacaacaaggucgagaacaugacgccccgcgaccugggggccugcaucgacugcaacgcgcggcacaucaacgcccagguggccaagagccacaacgugucccucaucuggaacgucaaggacuacaugagccuguccgagcagcugcgcaagcagauccggagcgccgcgaagaagaacaacauccccuuccgccugaccugcgccaccacccgccagguggugaacgucaucaccaccaagaucucccucaagggcggcuga

SEQ ID NO: 17607 - RNA, 5517 nt, Artificial Sequence
  BatCoV/HKU9-1 BF_005I__NC_009021.1__non-structural protein 3 (NSP3) CDS gc
augggcgugagcaaggucaccuucggggacgaggaggugcacaccauccccaacacggugaccgucaacuucuccuacgacgugugcgagggccuggacgccauccucgacaaggugauggccccguuccaggucgaggaggggaccaagcuggaggaccuggcgugcguggugcagaaggccgucuacgagcgccucagcgaccuguucuccgacugccccgccgagcugcggcccaucaaccucgaggacuuccugaccagcgagugcuucguguacuccaaggacuacgagaagauccugaugcccgagauguacuucagccucgaggacgccgugccggucgacgacgagaugguggacgacaucgaggacacgguggagcaggccuccgacagcgacgaccaguggcugggcgacgagggggcggaggacugcgacaacaccauccaggacgucgacguggccaccuccaugaccacgcccugcggcuacaccaagaucgccgagcacguguacaucaagugcgccgacaucguccaggaggcgcgcaacuacagcuacgccgugcuggugaacgccgccaacgucaaccuccaccacggcgggggcguggccggggcgcugaaccgggccaccaacaacgccaugcagaaggaguccagcgaguacaucaaggccaacggcucccugcagcccgggggccacgugcuccugagcucccacggccuggccagccacgggauccuccacgucgugggccccgacaagcgccuggggcaggaccuggcgcuccuggacgccgucuacgccgccuacaccggcuucgacuccgugcugacgccgcucgugagcgccggcaucuucggguucaccgucgaggagucccugugcagccuggugaagaacguggcgugcaccaccuacgucgugguguacgaccggcagcucuacgagcgcgcccuggccacgagcuucgacguccccggcccccaguccagcgugcagcacgugcccgccaucgacugggccgaggcggucgaggugcaggaguccaucguggaccaggucgagaccccgagccugggggccguggacaccguggacuccaacgccgacagcggccucaacgagaccgcccggucccccgagaacgucguggggagcgugcccgacgacgucguggcggacguggaguccugcguccgcgaccuggugcgccagguggucaagaaggugaagcgggacaagcggcccccgcccaucgugccccagcagacggucgagcagcagccccaggagaucagcuccccgggcgacugcaacaccgugcugguggacgucgugagcauguccuucagcgccauggugaacuucggcaaggagaaggggcuccugauccccgucgugaucgacuaccccgccuuccugaaggugcucaagcgcuucucccccaaggagggccuguucagcuccaacggguacgaguucuacggcuacagccgggacaagccgcugcacgaggucuccaaggaccucaacagccuggggcgcccccugaucaugauccccuucggcuucaucgugaacggccagacccucgccgugagcgccgucuccaugcgggggcugaccgugccccacacgguggucgugccgagcgaguccagcgugccccuguaccgcgcguacuucaacggcgucuucuccggggacaccaccgccgugcaggacuucguggucgacauccuccugaacggcgcccgggacugggacgugcugcagaccacgugcaccgucgaccgcaagguguacaagaccaucugcaagcgggggaacaccuaccugugcuucgacgacacgaaccucuacgccaucaccggcgacgugguccugaaguucgccaccgugagcaaggcgcgcgccuaccuggagaccaagcucugcgcccccgagccgcugaucaaggugcugacgaccgucgacggcaucaacuacuccaccgugcucgugagcaccgcccaguccuaccgggcccagaucgggaccgucuucugcgacggccacgacuggagcaacaagaaccccaugcccacggacgaggggacccaccuguacaagcaggacaacuucuccagcgcggaggugaccgccauccgcgaguacuacggcguggacgacuccaacaucaucgcccgcgccaugagcauccggaagaccguccagacguggcccuacaccgugguggacggccgcguccugcucgcgcagcgggacuccaacugcuaccugaacguggccaucagccugcuccaggacaucgacguguccuucagcaccccgugggucugccgcgccuacgacgcccugaagggcgggaacccccugcccauggccgaggugcucaucgcgcuggggaaggccacccccggcgugagcgacgacgcccacaugguccuguccgccgugcucaaccacgggacggugaccgcccggcgcgucaugcagaccgugugcgagcacugcggcgugagccagauggucuucaccggcacggacgcgugcaccuucuacggguccguggugcuggacgaccuguacgccccggucagcguggugugccagugcggccggcccgccauccgcuacgucuccgagcagaagucccccuggcuccugaugagcugcacccccacccaggugccgcuggacacgagcgggaucuggaagaccgccaucguguuccggggccccgucaccgccgggcacuacauguacgcggugaacggcacccucaucuccguguacgacgccaacacgcgccggcgcaccagcgaccugaagcugcccgccaccgacauccucuacggccccaccuccuucacgagcgacuccaaggucgagaccuacuaccuggacggggugaagcggaccaccaucgacccggacuucagcaaguacgugaagcgcggcgacuacuacuucacgaccgcccccaucgaggucguggcggcccccaagcuggugaccuccuacgacggguucuaccucagcuccugccagaacccccagcuggccgagagcuucaacaaggccaucaacgccaccaagacgggcccgaugaagcugcucaccauguaccccaacgucgcgggggacgugguggccaucuccgacgacaacgucguggcccaccccuacggcagccugcacaugggcaagcccgugcuguucgucacccggccgaacaccuggaagaagcucgugccccugcugagcacggucguggugaacacccccaacaccuacgacguccucgccguggacccgcugcccgugaacaacgagaccuccgaggagcccaucagcgucaaggcccccaucccgcuguacgggcucaaggcgaccauggugcugaacggcacgaccuacgugcccgggaacaagggccaccuccucugccugaaggaguucacccugaccgaccuccagacguucuacgucgagggggugcagcccuucgugcugcugaaggccucccaccucagcaagguccugggccugcgcguguccgacagcucccuccacgugaaccaccugagcaagggcgucguguacgccuacgccgccacccggcugaccacccgcgugacgaccucccuccucgggggccuggucacccggagcgugcgcaagaccgcggacuucgugcgcuccacgaaccccgggagcaagugcgucggccugcugugccuguucuaccagcuguucaugcgguucuggcugcuggugaagaagccgcccaucgugaaggucuccggcaucaucgccuacaacaccgggugcggcgugacgaccugcgugcucaacuaccugcgcagccggugcgggaacaucuccuggagccgccugcucaagcugcugcgguacaugcucuacaucugguucgucuggaccugccugaccaucugcggcguguggcuguccgagcccuacgcccccagccucgugacccgcuucaaguacuuccuggggaucgucaugccgugcgacuacgugcuggugaacgagaccggcacgggcuggcuccaccaccugugcauggccgggauggacucccuggacuaccccgcccuccggaugcagcagcaccgcuacggcagccccuacaacuacaccuacauccugaugcugcucgaggcguucuucgccuaccugcuguacacccccgcccucccgaucgucgggauccuggccgugcugcaccucaucgugcuguaccugcccaucccccucggcaacagcuggcuggucguguuccuguacuacaucauccggcucgugcccuucaccuccaugcugcgcauguacaucgucaucgcguuccuguggcugugcuacaagggguuccuccacgugcgguacggcugcaacaacguggccugccugaugugcuacaagaagaacgucgccaagcgcaucgagugcagcacgguggugaacggcgucaagcggauguucuacgugaacgccaacgggggcacccacuucugcaccaagcacaacuggaacugcguguccugcgacaccuacacggucgacagcaccuucaucugccgccagguggcccuggaccucuccgcgcaguucaagcggccgaucauccacaccgacgaggccuacuacgaggugaccagcgucgaggugcgcaacggguacgucuacugcuacuucgaguccgacggccagcggagcuacgagcgcuuccccauggacgccuucacgaacguguccaagcugcacuacagcgagcugaagggggccgcccccgcguucaacgugcucgucuucgacgccaccaaccggaucgaggagaacgccgugaagaccgccgccaucuacuacgcgcagcuggccugcaagcccauccugcucguggacaagcgcauggucggcguggugggcgacgacgccaccaucgcccgggcgauguucgaggccuacgcccagaacuaccugcugaaguacuccaucgccauggacaaggucaagcaccucuacagcacggcccugcagcagaucuccagcgggaugaccguggaguccgugcugaaggucuucgugggcagcacccgcgcggaggccaaggaccucgaguccgacguggacaccaacgaccuggucagcugcauccgccugugccaccaggaggggugggaguggacgaccgacuccuggaacaaccucgugccgaccuacaucaagcaggacacccugagcacccuggaggugggccaguucaugacggccaacgccaaguacgucaacgccaacaucgcgaagggcgccgccgugaaccucaucuggcgguacgccgacuucaucaagcugagcgaguccaugcgccggcagcugaagguggccgcgcgcaagaccgggcucaaccugcuggucaccaccagcucccucaaggccgacgugcccugcauggugacgcccuucaagaucaucggcuga

SEQ ID NO: 17608 - RNA, 4869 nt, Artificial Sequence
  PEDV/NPL-PEDv/2013/P10__KJ778616.1__non-structural protein 3 (NSP3) CDS gc
augggcgacgugaaguucagcgacgaggucuccgugaagaccaucgaccccguguacaaggucagccuggaguucgaguucgaguccgagaccaucauggccgugcucaacaaggccguggggaacugcaucaaggucacgggcgggugggacgacgugguggaguacaucaacgucgcgaucgaggugcugaaggaccacaucgacgugccgaaguacuacaucuacgacgaggagggcgggaccgaccccaaccugcccgucauggugagccaguggccccucaacgacgacaccaucucccaggaccugcuggacguggaggucgugaccgacgccccgguggacuucgagggcgacgaggucgacagcuccgaccccgacaagguggccgacguggccaacagcgagcccgaggacgacggccucaacgucgcccccgagacgaacguggaguccgagguggaggaggucgcggccacccugagcuucaucaaggacaccccguccaccgugacgaaggaccccuucgccuucgacuucgccagcuacgggggccugaagguccuccgccagucccacaacaacugcugggugaccagcacccuggugcagcugcagcuccuggggaucgucgacgaccccgcgauggagcuguucuccgccggccggguggggcccauggugcgcaagugcuacgagagccagaaggccauccucggcucccugggcgacgucagcgccugccuggagucccucaccaaggaccugcacacgcugaagaucacgugcagcguggugugcgggugcggcaccggggagcggaucuacgacggcugcgccuuccgcaugaccccgacccucgagcccuuccccuacggcgcgugcgcccagugcgcccagguccugaugcacaccuucaagagcaucguggggaccggcaucuucugccgggacaccacggcccugucccucgacagccugguggucaagccccugugcgccgcggccuucaucgggaaggacuccggccacuacgugaccaacuucuacgacgccgccauggccaucgacggguacggccgccaccagaucaaguacgacacccucaacaccaucugcgugaaggacgucaacuggacggcgccguucgugcccgacguggagcccguccuggagcugguggugaagcccuucuacagcuacaagaacgucgacuucuaccagggcgacuucuccgaccucgugaagcugccgugcgacuucguggucaacgccgccaacgagaaccugagccacgggggcgggaucgccaaggccaucgacguguacaccaagggcaugcuccagaagugcuccaacgacuacaucaaggcgcacgggcccaucaaggugggccggggcgucaugcuggaggcccuggggcucaagguguucaacguggucggcccccgcaaggggaagcacgcccccgagcugcuggugaaggccuacaagagcguguucgcgaacuccggcgucgcccucaccccgcugaucagcguggggaucuucuccgugccccuggaggagagccucuccgccuuccuggccugcgucggcgaccggcacugcaagugcuucugcuacagcgacaaggagcgcgaggccaucaucaacuacauggacggccugguggacgcgaucuucaaggacgcccucguggacaccacgcccguccaggaggacgugcagcaggucucccagaagcccgugcugccgaacuucgagcccuuccggaucgagggggcccacgccuucuacgagugcaaccccgagggccugaugagccugggggccgacaagcucgugcuguucaccaacuccaaccuggacuucugcagcgugggcaagugccucaacaacgucaccggcggggcgcugcuggaggccaucaacguguucaagaaguccaacaagaccgugccggccggcaacugcgucacguucgagugcgccgacaugaucagcaucaccaugguggugcuccccagcgacggggacgccaacuacgacaagaacuacgcgcgcgccgucgugaaggucuccaagcugaagggcaagcugcuccuggccgugggggacgccaugcuguacagcaagcucucccaccugagcgugcugggcuucgucuccacccccgacgacguggagcgguucuacgcgaacaagagcguggucaucaaggugaccgaggacacgcgcuccgugaagaccgucaagguggagagcaccgugaccuacggccagcagaucgggcccugccucgucaacgacaccguggugacggacaacaagccggucguggccgacguggucgccaagguggugcccuccgccaacugggacagccacuacggcuucgacaaggccggggaguuccacaugcuggaccacaccggcuucgcguuccccuccgaggucgugaacgggcggcgcgugcugaagaccaccgacaacaacugcugggucaacgugacgugccuccagcugcaguucgcccgguuccgcuucaagagcgccggccugcaggccaugugggaguccuacugcaccggcgacguggccauguucguccacuggcucuacuggcugaccgggguggacaagggccagcccagcgacuccgagaacgcgcugaacaugcucagcaaguacaucgugccggccggguccgucaccaucgagcgggugacgcacgacggcugcugcugcagcaagcgcguggucaccgcccccguggugaacgccagcguccugaagcuggggguggaggacggccucugcccccacggccugaacuacaucgacaagguggucguggugaaggggaccaccaucgucgugaacgugggcaagcccgucguggccccgucccaccuguuccucaagggggugagcuacacgaccuuccuggacaacggcaacggggucgcgggccacuacaccguguucgaccacgacaccggcauggugcacgacggggacgucuucgugcccggcgaccugaacgucucccccgugacgaacguggucgugagcgagcagaccgccguggucaucaaggaccccgugaagaagguggagcucgacgccaccaagcugcuggacaccaugaacuacgccuccgagcgguucuucagcuucggggacuucaugucccgcaaccucaucacggucuuccuguacauccugagcauccucggccugugcuuccgcgcguuccggaagcgcgacgugaaggugcuggccggcgucccgcagcggaccgggaucauccuccgcaaguccgugcgguacaacgccaaggcccugggcguguucuucaagcugaagcucuacugguucaagguccuggggaaguucagccugggcaucuacgcccucuacgcgcugcuguucaugaccauccgcuucacccccaucgggggccccgugugcgacgacguggucgccggcuacgccaacuccagcuucgacaagaacgaguacugcaacuccgugaucugcaaggugugccucuacggguaccaggagcugagcgacuucucccacacgcaggucguguggcagcaccuccgggacccccugaucggcaacgugaugccguucuucuaccuggccuuccuggccaucuucgggggcgucuacgugaaggcgaucacccucuacuucaucuuccaguaccugaacauccuggggguguuccucggccugcagcagagcaucugguuccugcagcucguccccuucgacguguucggcgacgagaucguggucuucuucaucgugacccgcgugcugauguuccugaagcacgucuuccucgggugcgacaaggccuccugcguggccugcagcaaguccgcccggcugaagcgcgugcccguccagaccaucuuccagggcacgagcaagagcuucuacgugcacgccaacgggggcuccaaguucugcaagaagcacaacuucuucugccugaacugcgacagcuacgggcccggcugcaccuucaucaacgacgugaucgcgaccgaggucggcaacguggugaagcucaacguccagccgaccgggcccgccacgauccugaucgacaagguggaguucuccaacggcuucuacuaccuguacagcggggacaccuucuggaaguacaacuucgacaucaccgacaacaaguacacgugcaaggagucccucaagaacugcagcaucaucaccgacuucaucguguucaacaacaacggcuccaacgucaaccaggugaagaacgccugcguguacuucagccagaugcugugcaagcccgucaagcugguggacuccgcccuccuggccagccuguccguggacuucggcgcgagccuccacuccgccuucgucagcgugcuguccaacagcuucgggaaggaccuguccagcugcaacgacaugcaggacugcaaguccacccucggcuucgacgacgucccgcuggacaccuucaacgccgccguggcggaggcccaccgguacgacgugcugcucaccgacaugagcuucaacaacuucaccacgagcuacgccaagcccgaggagaagcugcccguccacgacaucgcgaccugcaugcgcgugggggccaagaucgugaaccacaacguccuggugaaggacuccauccccguggucuggcucgugcgggacuucaucgcccugagcgaggagacccgcaaguacaucauccggaccacgaaggugaagggcaucaccuucaugcugaccuucaacgacugccgcaugcacaccacgaucccgaccgucugcaucgccaacaagaagggguga

SEQ ID NO: 17609 - RNA, 6021 nt, Artificial Sequence
  MHV/A59__NC_048217.1__non-structural protein 3 (NSP3) CDS gc
augggcaagaagguggaguucaacgacaagcccaagguccgcaagaucccgagcacccggaagaucaagaucaccuucgcccuggacgccacguucgacuccgugcucagcaaggcgugcuccgaguucgagguggacaaggacgucacccuggacgagcugcucgacguggugcuggacgccgucgagagcacccugucccccugcaaggagcacgacgugaucgggaccaaggugugcgcccuccuggaccgccuggccggcgacuacgucuaccucuucgacgagggcggggacgaggugaucgcgccccggauguacugcagcuucuccgcccccgacgacgaggacugcguggccgccgacgucguggacgccgacgagaaccaggacgacgacgcggaggacagcgccgugcuggucgccgacacgcaggaggaggacgggguggccaagggccagguggaggccgacuccgagaucugcgucgcgcacaccggcagccaggaggagcuggccgagccggacgccguggggucccagacccccaucgccagcgccgaggagaccgaggugggcgaggcguccgaccgcgaggggaucgccgaggccaaggccacggucugcgccgacgcgguggacgccugccccgaccagguggaggccuucgagaucgagaaggucgaggacagcauccucgacgagcugcagaccgagcugaacgcccccgccgacaagaccuacgaggacgugcucgcguucgacgccgucugcuccgaggcccugagcgccuucuacgcggugccguccgacgagacccacuucaaggugugcggcuucuacagccccgccaucgagcggacgaacugcuggcugcgcuccacccucaucgucaugcagagccugccccuggaguucaaggaccucgagaugcagaagcuguggcugagcuacaaggccggguacgaccagugcuucguggacaagcucgugaaguccguccccaagagcaucauccugccgcagggcggcuacguggccgacuucgccuacuucuuccugucccagugcagcuucaaggcguacgccaacuggcggugccucgagugcgacauggagcugaagcugcaggggcucgacgccauguucuucuacggcgacguggucucccacaugugcaagugcgggaacagcaugacccugcuguccgccgacauccccuacacccuccacuucggcgugcgcgacgacaaguucugcgccuucuacacgccccggaagguguuccgcgcggccugcgccgucgacgugaacgacugccacagcauggccguggucgagggcaagcagaucgacgggaagguggugaccaaguucaucggcgacaaguucgacuucauggucggguacggcaugaccuucuccaugagccccuucgagcuggcccagcuguacggguccugcaucaccccgaacgugugcuucgugaagggcgacgucaucaagguggugcggcucgucaacgcggaggugaucgugaaccccgccaacggccgcauggcccacggggccggcgucgcgggggccaucgccgagaaggccggcagcgccuucaucaaggagacguccgacauggugaaggcgcagggggugugccaggucggcgagugcuacgagagcgccggcgggaagcugugcaagaaggugcugaacaucgugggccccgacgcccgggggcacggcaagcagugcuacucccuccuggagcgcgccuaccagcacaucaacaagugcgacaacgucgugaccacccugaucagcgccgggaucuucuccgugcccaccgacgucagccucacguaccugcugggcguggugaccaagaacgucauccucguguccaacaaccaggacgacuucgacgugaucgagaagugccaggucaccagcguggcgggcaccaaggcccugagccugcagcuggccaagaaccucugccgggacgugaaguucgucacgaacgccugcuccagccuguucuccgagagcugcuucguguccagcuacgacgugcugcaggaggucgaggcccuccgccacgacauccagcuggacgacgacgcgcggguguucgugcaggccaacauggacugccugccgaccgacuggcgccucgucaacaaguucgacuccguggacgggguccggaccaucaaguacuucgagugccccggcgggaucuucgugagcucccagggcaagaaguucggcuacgugcagaacgggagcuucaaggaggccuccgucagccagauccgcgcccugcuggcgaacaagguggacgugcucugcaccgucgacggcgugaacuuccgguccugcugcguggccgagggggaggucuucggcaagacgcuggggagcguguucugcgacggcaucaacgugaccaagguccgcugcuccgccaucuacaagggcaagguguucuuccaguacagcgaccuguccgaggccgaccucguggccgucaaggacgcguucggguucgacgagccccagcugcugaaguacuacaccaugcucggcaugugcaaguggcccgugguggucugcgggaacuacuucgccuucaagcagagcaacaacaacugcuacaucaacguggccugccugaugcugcagcaccucagccugaaguucccgaaguggcaguggcaggaggccuggaacgaguuccgcuccggcaagccccugcgguucgugagccucguccuggccaagggguccuucaaguucaacgagcccagcgacuccaucgacuucaugcgcguggugcugcgggaggcggaccucagcggcgcgaccugcaaccuggaguucgucugcaagugcggcgugaagcaggagcagcgcaaggggguggacgccgucaugcacuucggcacgcuggacaagggggaccucgugcggggcuacaacaucgccugcacgugcggguccaagcuggugcacugcacccaguucaacguccccuuccugaucugcagcaacaccccggagggccgcaagcuccccgacgacgugguggccgccaacaucuucaccggcggguccgucggccacuacacccacgugaagugcaagcccaaguaccagcuguacgacgccugcaacgugaacaaggucagcgaggccaaggggaacuucaccgacugccuguaccucaagaaccugaagcagaccuucuccagcgugcugaccacguucuaccucgacgacgugaagugcgucgaguacaagccggaccugucccaguacuacugcgagagcggcaaguacuacaccaagcccaucaucaaggcccaguuccggaccuucgagaagguggacgggguguacaccaacuucaagcuggucggccacuccaucgccgagaagcucaacgcgaagcugggcuucgacugcaacagccccuucguggaguacaagaucacggaguggcccaccgccaccggggacgugguccuggccuccgacgaccucuacgugagccgcuaccuguccggcugcaucaccuucgggaagccgguggucuggcugggccacgaggaggccagccucaagagccugacguacuucaaccggcccuccguggugugcgagaacaaguucaacguccugcccguggacgucagcgagcccaccgacaagggcccggugcccgcggccgugcucgucaccggggugcccggcgccgacgccuccgccggggcgggcaucgccaaggagcagaaggccugcgccagcgccuccguggaggaccaggucgugaccgaggugcgccaggagcccagcgucuccgcggccgacgugaaggaggugaagcugaacggggucaagaagccggugaagguggagggcagcgucguggugaacgaccccacguccgagaccaaggucgucaagagccuguccaucguggacguguacgacauguuccucaccggcugcaaguacgugguguggaccgccaacgagcugagccggcuggucaacucccccacggugcgcgaguacgugaagugggggaugggcaagaucgucacccccgccaagcuccugcugcuccgggacgagaagcaggaguucguggccccgaagguggucaaggcgaaggccaucgccugcuacugcgccgugaagugguuccugcuguacugcuucagcuggaucaaguucaacaccgacaacaaggugaucuacaccacggaggucgcguccaagcucaccuucaagcugugcugccuggccuucaagaacgcccuccagaccuucaacuggagcguggugucccgcggguucuuccuggucgccaccguguuccugcucugguucaacuuccuguacgccaacgugauccugagcgacuucuaccuccccaacaucggcccccugcccacguucgucgggcagaucguggcgugguucaagaccaccuucggcguguccaccaucugcgacuucuaccaggucacggaccugggcuaccggagcagcuucugcaacggguccauggugugcgagcucugcuucagcggcuucgacaugcuggacaacuacgacgccaucaacgugguccagcacgugguggaccgccggcuguccuucgacuacaucagccucuucaagcuggucguggagcuggugaucggguacucccucuacaccgucugcuucuacccgcuguucgugcugaucggcaugcagcuccugaccaccuggcugcccgaguucuucaugcucgagacgaugcacuggagcgcccgccuguucgucuucguggccaacaugcugcccgccuucacccuccugcgguucuacaucguggucaccgcgauguacaagguguacugccugugccgccacgugauguacgggugcuccaagcccggcugccucuucugcuacaagcgcaaccggagcguccgcgugaagugcuccaccguggucggcgggagccugcgguacuacgacgugauggccaacggcgggaccggcuucugcacgaagcaccaguggaacugccugaacugcaacuccuggaagccgggcaacaccuucaucacccacgaggccgccgccgaccucagcaaggagcugaagcgccccgugaaccccaccgacuccgcguacuacagcgucacggaggugaagcaggucgggugcuccaugcggcuguucuacgagcgcgacggccagcggguguacgacgacgugaacgccagccucuucguggacaugaacgggcugcugcacuccaaggucaagggcgugccggagacccacguggucgugguggagaacgaggccgacaaggccggguuccugggcgcggccgucuucuacgcccagagccucuaccgccccaugcugaugguggagaagaagcugaucaccaccgccaacacgggccucuccgugagccggaccauguucgaccuguacgucgacagccugcucaacgugcuggacguggaccgcaagucccugaccagcuucgucaacgccgcgcacaacucccucaaggagggggugcagcuggagcaggucauggacaccuucaucggcugcgcccggcgcaagugcgccaucgacagcgacguggagacgaaguccaucaccaagagcgugauguccgccgugaacgccggggucgacuucaccgacgagagcugcaacaaccuggugcccaccuacgugaaguccgacacgaucgucgcggccgaccucggcgugcugauccagaacaacgccaagcacgugcaggccaacgucgccaaggcggccaacguggccugcaucuggagcguggacgccuucaaccagcuguccgccgaccuccagcaccggcugcgcaaggcgugcagcaagaccgggcugaagaucaagcucaccuacaacaagcaggaggccaacguccccauccugaccacgccguucucccugaagggcggcuga

SEQ ID NO: 17610 - RNA, 5841 nt, Artificial Sequence
  SARS-CoV-2/Wuhan-Hu-1__NC_045512.2/MN908947.2__non-structural protein 3 (NSP3) CDS gc
auggcccccaccaaggugaccuucggcgacgacaccgucaucgaggugcagggguacaagagcgugaacaucaccuucgagcuggacgagcgcaucgacaagguccucaacgagaagugcuccgccuacaccguggagcugggcaccgaggugaacgaguucgcgugcgucguggccgacgccgugaucaagacgcugcagccggucagcgagcuccugacgccccuggggaucgaccucgacgagugguccauggccaccuacuaccuguucgacgagagcggcgaguucaagcuggccucccacauguacugcagcuucuacccgcccgacgaggacgaggaggagggggacugcgaggaggaggaguucgagcccuccacccaguacgaguacggcacggaggacgacuaccagggcaagccccucgaguucggggcgaccagcgccgcccugcagcccgaggaggagcaggaggaggacuggcuggacgacgacucccagcagaccgugggccagcaggacgggagcgaggacaaccagaccacgaccauccagaccaucguggagguccagccccagcucgagauggagcugaccccgguggugcagacgaucgaggucaacuccuucagcggcuaccugaagcucaccgacaacguguacaucaagaacgccgacaucguggaggaggcgaagaaggucaagcccaccgugguggucaacgccgccaacguguaccugaagcacgggggcggcguggccggggcccugaacaaggcgaccaacaacgccaugcaggucgaguccgacgacuacaucgccacgaacggcccccucaaggucgggggcagcugcgugcuguccggccacaaccuggccaagcacugccuccacgugguggggcccaacgucaacaagggcgaggacauccagcugcucaagagcgccuacgagaacuucaaccagcacgaggugcugcuggcgccgcugcucuccgccgggaucuucggcgccgaccccauccacagccugcgggugugcgucgacaccgugcgcaccaacguguaccuggccgucuucgacaagaaccucuacgacaagcugguguccagcuuccuggagaugaaguccgagaagcaggucgagcagaagaucgccgagauccccaaggaggaggugaagcccuucaucaccgagagcaagccgagcguggagcagcggaagcaggacgacaagaagaucaaggcgugcguggaggaggucacgaccacccucgaggagaccaaguuccugacggagaaccugcuccuguacaucgacaucaacgggaaccugcaccccgacuccgccacccucgugagcgacaucgacaucaccuuccugaagaaggacgcccccuacaucgugggcgacgucgugcaggagggcgugcugaccgccgucgugauccccacgaagaaggccgggggcaccaccgagaugcucgcgaaggcccugcgcaaggugccgaccgacaacuacaucacgaccuaccccgggcagggccugaacggguacaccgucgaggaggccaagaccgugcucaagaagugcaaguccgccuucuacauccugcccagcaucaucuccaacgagaagcaggagauccugggcaccgugagcuggaaccugcgggagaugcucgcgcacgccgaggagacgcgcaagcugaugcccgucugcguggagaccaaggccaucguguccaccauccagcggaaguacaagggcaucaagauccaggagggggucguggacuacggcgcccgcuucuacuucuacaccagcaagacgaccguggccucccugaucaacacccucaacgaccugaacgagacccuggucacgaugccgcucggguacgugacccacggccugaaccuggaggaggcggcccgguacaugcgcagccucaaggugcccgccaccgucuccgugagcucccccgacgccgugaccgccuacaacggguaccugacgagcuccagcaagacccccgaggagcacuucaucgagaccaucucccuggcgggcagcuacaaggacuggagcuacuccggccagagcacccagcucgggaucgaguuccugaagcggggcgacaaguccgucuacuacacgagcaacccgaccaccuuccaccuggacggggaggugaucaccuucgacaaccucaagacgcugcugucccuccgcgaggugcggaccaucaaggucuucaccaccguggacaacaucaaccugcacacccagguggucgacaugagcaugaccuacggccagcaguucggccccaccuaccuggacggggccgacgugaccaagaucaagccccacaacucccacgagggcaagacguucuacgugcucccgaacgacgacacccugcgcgucgaggccuucgaguacuaccacaccaccgaccccagcuuccuggggcgguacauguccgcccucaaccacacgaagaaguggaaguacccccaggugaacggccugaccagcaucaagugggccgacaacaacugcuaccuggcgaccgcccuccugacccugcagcagaucgagcucaaguucaacccgcccgcccugcaggacgccuacuaccgcgcgcgggccggggaggccgccaacuucugcgcccugauccucgcguacugcaacaagacggugggcgagcugggcgacguccgcgagaccauguccuaccuguuccagcacgccaaccucgacagcugcaagcgggugcugaacgucgugugcaagaccugcgggcagcagcagaccacccugaagggcguggaggccgucauguacauggggacgcucuccuacgagcaguucaagaagggcgugcagauccccugcacgugcgggaagcaggccaccaaguaccuggugcagcaggagagccccuucgucaugauguccgcgcccccggcccaguacgagcugaagcacggcaccuucacgugcgccagcgaguacaccggcaacuaccagugcgggcacuacaagcacaucaccuccaaggagacccucuacugcaucgacggcgcccugcugaccaagagcagcgaguacaaggggcccaucaccgacguguucuacaaggagaacuccuacaccaccacgaucaagcccgugaccuacaagcucgacggcgucgugugcaccgagaucgaccccaagcuggacaacuacuacaagaaggacaacagcuacuucaccgagcagccgaucgaccuggugcccaaccagcccuaccccaacgccuccuucgacaacuucaaguucgucugcgacaacaucaaguucgccgacgaccucaaccagcugacgggguacaagaagccggcgagccgcgagcugaaggugaccuucuuccccgaccucaacggcgacguggucgccaucgacuacaagcacuacacccccuccuucaagaagggcgccaagcugcugcacaagcccaucguguggcacgugaacaacgccaccaacaaggcgacguacaagccgaacaccuggugcauccggugccucuggagcaccaagcccgucgagaccuccaacagcuucgacgugcugaaguccgaggacgcccaggggauggacaaccuggccugcgaggaccucaagcccgugagcgaggaggucguggagaaccccacgauccagaaggacgugcuggagugcaacgucaagaccaccgagguggugggcgacaucauccugaagccggccaacaacucccucaagaucaccgaggaggucgggcacacggaccugauggccgcguacguggacaacagcucccugaccaucaagaagcccaacgagcucagccgcgugcugggccugaagacccucgccacccacgggcuggccgccgucaacuccgugcccugggacacgaucgccaacuacgcgaagccguuccugaacaagguggucagcaccaccaccaacaucgugacgcgcugccucaaccgggugugcaccaacuacaugcccuacuucuucacccugcugcuccagcugugcaccuucacgcgcuccaccaacagccggaucaaggccuccaugcccaccaccaucgccaagaacaccgucaagagcgugggcaaguucugccuggaggccagcuucaacuaccucaagucccccaacuucagcaagcugaucaacaucaucaucugguuccugcuccuguccgugugccugggcagccucaucuacuccacggccgcgcuggggguccugaugagcaaccucggcaugccguccuacugcaccggguaccgcgagggcuaccugaacagcaccaacgugaccaucgccacguacugcaccggcuccauccccugcagcgugugccuguccgggcucgacagccuggacaccuaccccucccuggagaccauccagaucacgaucagcuccuucaagugggaccucaccgccuucggccuggucgccgagugguuccuggccuacauccucuucacccgguucuucuacgugcuggggcuggcggccaucaugcagcuguucuucagcuacuucgccgugcacuucaucuccaacagcuggcucauguggcugaucaucaaccugguccagauggcccccaucuccgcgauggugcgcauguacaucuucuucgccagcuucuacuacguguggaaguccuacguccacgugguggacggcugcaacagcagcacgugcaugaugugcuacaagcggaaccgcgccacgcgggucgagugcaccaccaucgugaacgggguccgccgguccuucuacguguacgccaacggcggcaagggguucugcaagcuccacaacuggaacugcgugaacugcgacaccuucugcgccggcagcacguucaucuccgacgaggucgcgcgcgaccugagccugcaguucaagcggccgaucaaccccaccgaccaguccagcuacaucguggacuccgugaccgucaagaacgggagcauccaccucuacuucgacaaggccggccagaagaccuacgagcgccacucccugagccacuucgugaaccuggacaaccuccgggccaacaacacgaaggggucccugcccaucaacgugaucgucuucgacggcaagagcaagugcgaggaguccagcgccaaguccgccagcguguacuacucccagcugaugugccagcccauccuccugcuggaccaggcgcucgugagcgacgucggcgacagcgccgagguggccgugaagauguucgacgccuacgucaacaccuucuccagcaccuucaacgugccgauggagaagcugaagacccugguggccacggcggaggccgagcucgccaagaacgucucccuggacaacgugcugagcaccuucaucuccgccgcgcgccagggguucguggacagcgacgucgagaccaaggacgugguggagugccucaagcugucccaccagagcgacaucgaggucaccggcgacuccugcaacaacuacaugcugacguacaacaagguggagaacaugacgccccgggaccucggggccugcaucgacugcagcgcccgccacaucaacgcccagguggccaagucccacaacaucgcgcugaucuggaacgucaaggacuucaugagccuguccgagcagcuccggaagcagauccgcagcgccgccaagaagaacaaccugcccuucaagcugaccugcgccaccacccgccagguggugaacgucgugaccaccaagaucgcccucaagggcggguga

SEQ ID NO: 17611 - RNA, 5841 nt, Artificial Sequence
  SARS-CoV-2/Wuhan/WIV05/2019__EPI_ISL_402128__non-structural protein 3 (NSP3) CDS gc
auggcccccaccaaggugaccuucggcgacgacacggucaucgaggugcagggguacaagagcgugaacaucaccuucgagcuggacgagcgcaucgacaagguccucaacgagaagugcuccgccuacaccguggagcugggcaccgaggugaacgaguucgcgugcgucguggccgacgccgugaucaagacgcugcagccggucagcgagcuccugaccccccuggggaucgaccucgacgagugguccauggccaccuacuaccuguucgacgagagcggcgaguucaagcuggccucccacauguacugcagcuucuacccccccgacgaggacgaggaggagggggacugcgaggaggaggaguucgagccguccacccaguacgaguacggcacggaggacgacuaccagggcaagccccucgaguucggggcgaccagcgccgcccugcagcccgaggaggagcaggaggaggacuggcuggacgacgacucccagcagaccgugggccagcaggacgggagcgaggacaaccagaccacgaccauccagaccaucguggagguccagccccagcucgagauggagcugaccccgguggugcagacgaucgaggucaacuccuucagcggcuaccugaagcucaccgacaacguguacaucaagaacgccgacaucguggaggaggcgaagaaggucaagcccaccgugguggucaacgccgccaacguguaccugaagcacgggggcggcguggccggggcccugaacaaggcgaccaacaacgccaugcaggucgaguccgacgacuacaucgccacgaacggcccccucaagguggggggcagcugcguccuguccggccacaaccuggccaagcacugccuccacgugguggggcccaacgucaacaagggcgaggacauccagcugcugaagagcgccuacgagaacuucaaccagcacgaggugcuccuggcgccgcugcucuccgccgggaucuucggcgccgaccccauccacagccugcgggugugcgucgacaccgugcgcaccaacguguaccuggccgucuucgacaagaaccucuacgacaagcugguguccagcuuccuggagaugaagagcgagaagcagguggagcagaagaucgccgagauccccaaggaggaggucaagcccuucaucaccgaguccaagccgagcguggagcagcggaagcaggacgacaagaagaucaaggcgugcguggaggaggucacgaccacccucgaggagaccaaguuccugacggagaaccugcuccuguacaucgacaucaacgggaaccugcaccccgacuccgccacccucgugagcgacaucgacaucaccuuccugaagaaggacgcccccuacaucgugggcgacgucgugcaggagggcgugcugaccgccgucgugauccccacgaagaaggccgggggcaccaccgagaugcucgcgaaggcccugcgcaaggugccgaccgacaacuacaucacgaccuaccccgggcagggccugaacggguacaccgucgaggaggccaagaccgugcucaagaagugcaaguccgccuucuacauccugcccagcaucaucuccaacgagaagcaggagauccugggcaccgugagcuggaaccugcgggagaugcucgcgcacgccgaggagacgcgcaagcugaugcccgucugcguggagaccaaggccaucguguccaccauccagcggaaguacaagggcaucaagauccaggagggggucguggacuacggcgcccgcuucuacuucuacaccagcaagacgaccguggccucccugaucaacacccucaacgaccugaacgagacccuggucacgaugccgcucggguacgugacccacggccugaaccuggaggaggcggcccgguacaugcgcagccucaaggugcccgccaccgucuccgugagcucccccgacgccgugaccgccuacaacggguaccugacgagcuccagcaagacccccgaggagcacuucaucgagaccaucucccuggcgggcagcuacaaggacuggagcuacuccggccagagcacccagcucgggaucgaguuccugaagcggggcgacaaguccgucuacuacacgagcaacccgaccaccuuccaccuggacggggaggugaucaccuucgacaaccucaagacgcugcugucccuccgcgaggugcggaccaucaaggucuucaccaccguggacaacaucaaccugcacacgcagguggucgacaugagcaugaccuacggccagcaguucggccccaccuaccuggacggggccgacgugaccaagaucaagccccacaacucccacgagggcaagacguucuacgugcucccgaacgacgacacccugcgcgucgaggccuucgaguacuaccacaccaccgaccccagcuuccuggggcgguacauguccgcccucaaccacacgaagaaguggaaguacccccaggugaacggccugaccagcaucaagugggccgacaacaacugcuaccuggcgaccgcccuccugacccugcagcagaucgagcucaaguucaaccccccggcccugcaggacgccuacuaccgcgcgcgggccggggaggccgccaacuucugcgcccugauccucgcguacugcaacaagacggugggcgagcugggcgacguccgcgagaccauguccuaccuguuccagcacgccaaccucgacagcugcaagcgggugcugaacgucgugugcaagaccugcgggcagcagcagaccacccugaagggcguggaggccgucauguacauggggacgcucuccuacgagcaguucaagaagggcgugcagauccccugcaccugcgggaagcaggccaccaaguaccuggugcagcaggagagccccuucgucaugauguccgcccccccggcgcaguacgagcugaagcacggcaccuucacgugcgccagcgaguacaccggcaacuaccagugcgggcacuacaagcacaucaccuccaaggagacccucuacugcaucgacggcgcccugcugacgaagagcagcgaguacaaggggcccaucaccgacguguucuacaaggagaacuccuacaccaccacgaucaagcccgugaccuacaagcucgacggcgucgugugcaccgagaucgaccccaagcuggacaacuacuacaagaaggacaacagcuacuucaccgagcagccgaucgaccuggugcccaaccagcccuaccccaacgccuccuucgacaacuucaaguucgucugcgacaacaucaaguucgccgacgaccucaaccagcugacgggguacaagaagccggcgagccgcgagcugaaggugaccuucuuccccgaccucaacggcgacguggucgccaucgacuacaagcacuacacccccuccuucaagaagggcgccaagcugcugcacaagcccaucguguggcacgugaacaacgccaccaacaaggcgacguacaagccgaacaccuggugcauccggugccucuggagcaccaagcccgucgagaccuccaacagcuucgacgugcugaaguccgaggacgcccaggggauggacaaccuggccugcgaggaccucaagcccgugagcgaggaggucguggagaaccccacgauccagaaggacgugcuggagugcaacgucaagaccaccgagguggugggcgacaucauccugaagccggccaacaacucccucaagaucaccgaggaggucgggcacacggaccugauggccgcguacguggacaacagcucccugaccaucaagaagcccaacgagcucagccgcgugcugggccugaagacccucgccacccacgggcuggccgccgucaacuccgugcccugggacacgaucgccaacuacgcgaagccguuccugaacaagguggucagcaccaccaccaacaucgugacgcgcugccucaaccgggugugcaccaacuacaugcccuacuucuucacccugcugcuccagcugugcaccuucacgcgcuccaccaacagccggaucaaggccuccaugcccaccaccaucgccaagaacaccgucaagagcgugggcaaguucugccuggaggccagcuucaacuaccucaagucccccaacuucagcaagcugaucaacaucaucaucugguuccugcuccuguccgugugccugggcagccucaucuacuccacggccgcgcugagcguccugauguccaaccucgggaugccgagcuacugcaccggcuaccgcgagggguaccugaacuccaccaacgugaccaucgccacguacugcaccggcagcauccccugcuccgugugccugagcggccucgacucccuggacaccuaccccagccuggagaccauccagaucacgaucuccagcuucaagugggaccucaccgccuucgggcuggucgccgagugguuccuggccuacauccucuucacccgguucuucuacgugcugggccuggcggccaucaugcagcucuucuucuccuacuucgccgugcacuucaucagcaacuccuggcugauguggcugaucaucaaccugguccagauggcccccaucagcgcgauggugcgcauguacaucuucuucgccagcuucuacuacguguggaaguccuacguccacgugguggacgggugcaacagcuccaccugcaugaugugcuacaagcggaaccgcgccacgcgggucgagugcaccaccaucgugaacggcguccgccggagcuucuacguguacgccaacgggggcaagggcuucugcaagcuccacaacuggaacugcgugaacugcgacaccuucugcgccggguccacguucaucagcgacgaggucgcgcgcgaccugucccugcaguucaagcggccgaucaaccccaccgaccagagcuccuacaucguggacagcgugaccgucaagaacggcuccauccaccucuacuucgacaaggccgggcagaagaccuacgagcgccacagccugucccacuucgugaaccuggacaaccuccgggccaacaacacgaagggcagccugcccaucaacgugaucgucuucgacgggaaguccaagugcgaggagagcuccgccaagagcgccuccguguacuacagccagcugaugugccagcccauccuccugcuggaccaggcgcucgugagcgacgucggcgacuccgccgagguggccgugaagauguucgacgccuacgucaacaccuucagcuccaccuucaacgugccgauggagaagcugaagacccugguggccacggcggaggccgagcucgccaagaacgucagccuggacaacgugcuguccaccuucaucagcgccgcgcgccagggcuucguggacuccgacgucgagaccaaggacgugguggagugccucaagcugagccaccaguccgacaucgaggucaccggggacagcugcaacaacuacaugcugacguacaacaagguggagaacaugaccccccgggaccucggcgccugcaucgacugcuccgcccgccacaucaacgcccagguggccaagagccacaacaucgcgcugaucuggaacgucaaggacuucaugucccugagcgagcagcuccggaagcagauccgcuccgccgccaagaagaacaaccugcccuucaagcugaccugcgccaccacgcgccagguggugaacgucgugaccaccaagaucgcccucaaggggggcuga

SEQ ID NO: 17612 - RNA, 5841 nt, Artificial Sequence
  SARS-CoV-2__MT919525.1__non-structural protein 3 (NSP3) CDS gc
auggcccccaccaaggugaccuucggcgacgacacggucaucgaggugcagggguacaagagcgugaacaucaccuucgagcuggacgagcgcaucgacaagguccucaacgagaagugcuccgccuacaccguggagcugggcaccgaggugaacgaguucgcgugcgucguggccgacgccgugaucaagacgcugcagccggucagcgagcuccugaccccccuggggaucgaccucgacgagugguccauggccaccuacuaccuguucgacgagagcggcgaguucaagcuggccucccacauguacugcagcuucuacccccccgacgaggacgaggaggagggggacugcgaggaggaggaguucgagccguccacccaguacgaguacggcacggaggacgacuaccagggcaagccccucgaguucggggcgaccagcgccgcccugcagcccgaggaggagcaggaggaggacuggcuggacgacgacucccagcagaccgugggccagcaggacgggagcgaggacaaccagaccacgaccauccagaccaucguggagguccagccccagcucgagauggagcugaccccgguggugcagacgaucgaggucaacuccuucagcggcuaccugaagcucaccgacaacguguacaucaagaacgccgacaucguggaggaggcgaagaaggucaagcccaccgugguggucaacgccgccaacguguaccugaagcacgggggcggcguggccggggcccugaacaaggcgaccaacaacgccaugcaggucgaguccgacgacuacaucgccacgaacggcccccucaagguggggggcagcugcguccuguccggccacaaccuggccaagcacugccuccacgugguggggcccaacgucaacaagggcgaggacauccagcugcugaagagcgccuacgagaacuucaaccagcacgaggugcuccuggcgccgcugcucuccgccgggaucuucggcgccgaccccauccacagccugcgggugugcgucgacaccgugcgcaccaacguguaccuggccgucuucgacaagaaccucuacgacaagcugguguccagcuuccuggagaugaagagcgagaagcagguggagcagaagaucgccgagauccccaaggaggaggucaagcccuucaucaccgaguccaagccgagcguggagcagcggaagcaggacgacaagaagaucaaggcgugcguggaggaggucacgaccacccucgaggagaccaaguuccugacggagaaccugcuccuguacaucgacaucaacgggaaccugcaccccgacuccgccacccucgugagcgacaucgacaucaccuuccugaagaaggacgcccccuacaucgugggcgacgucgugcaggagggcgugcugaccgccgucgugauccccacgaagaaggccgggggcaccaccgagaugcucgcgaaggcccugcgcaaggugccgaccgacaacuacaucacgaccuaccccgggcagggccugaacggguacaccgucgaggaggccaagaccgugcucaagaagugcaaguccgccuucuacauccugcccagcaucaucuccaacgagaagcaggagauccugggcaccgugagcuggaaccuccgggagaugcuggcgcacgccgaggagacgcgcaagcugaugcccgucugcguggagaccaaggccaucguguccaccauccagcggaaguacaagggcaucaagauccaggagggggucguggacuacggcgcccgcuucuacuucuacaccagcaagacgaccguggccucccugaucaacacccucaacgaccugaacgagacccuggucacgaugccgcucggguacgugacccacggccugaaccuggaggaggcggcccgguacaugcgcagccucaaggugcccgccaccgucuccgugagcucccccgacgccgugaccgccuacaacggguaccugacgagcuccagcaagacccccgaggagcacuucaucgagaccaucucccuggcgggcagcuacaaggacuggagcuacuccggccagagcacccagcucgggaucgaguuccugaagcggggcgacaaguccgucuacuacacgagcaacccgaccaccuuccaccuggacggggaggugaucaccuucgacaaccucaagacgcugcugucccuccgcgaggugcggaccaucaaggucuucaccaccguggacaacaucaaccugcacacgcagguggucgacaugagcaugaccuacggccagcaguucggccccaccuaccuggacggggccgacgugaccaagaucaagccccacaacucccacgagggcaagacguucuacgugcucccgaacgacgacacccugcgcgucgaggccuucgaguacuaccacaccaccgaccccagcuuccuggggcgguacauguccgcccucaaccacacgaagaaguggaaguacccccaggugaacggccugaccagcaucaagugggccgacaacaacugcuaccuggcgaccgcccuccugacccugcagcagaucgagcucaaguucaaccccccggcccugcaggacgccuacuaccgcgcgcgggccggggaggccgccaacuucugcgcccugauccucgcguacugcuccaagacggugggcgagcugggcgacguccgcgagaccaugagcuaccuguuccagcacgccaaccucgacuccugcaagcgggugcugaacgucgugugcaagaccugcgggcagcagcagaccacccugaagggcguggaggccgucauguacauggggacgcucagcuacgagcaguucaagaagggcgugcagauccccugcaccugcgggaagcaggccaccaaguaccuggugcagcaggagucccccuucgucaugaugagcgcccccccggcgcaguacgagcugaagcacggcaccuucacgugcgccuccgaguacaccggcaacuaccagugcgggcacuacaagcacaucaccagcaaggagacccucuacugcaucgacggcgcccugcugacgaagagcuccgaguacaaggggcccaucaccgacguguucuacaaggagaacagcuacaccaccacgaucaagcccgugaccuacaagcucgacggcgucgugugcaccgagaucgaccccaagcuggacaacuacuacaagaaggacaacuccuacuucaccgagcagccgaucgaccuggugcccaaccagcccuaccccaacgccagcuucgacaacuucaaguucgucugcgacaacaucaaguucgccgacgaccucaaccagcugacgggguacaagaagccggcgucccgcgagcugaaggugaccuucuuccccgaccucaacggcgacguggucgccaucgacuacaagcacuacacccccagcuucaagaagggcgccaagcugcugcacaagcccaucguguggcacgugaacaacgccaccaacaaggcgacguacaagccgaacaccuggugcauccggugccucugguccaccaagcccgucgagaccagcaacuccuucgacgugcugaagagcgaggacgcccaggggauggacaaccuggccugcgaggaccucaagcccguguccgaggaggucguggagaaccccacgauccagaaggacgugcuggagugcaacgucaagaccaccgagguggugggcgacaucauccugaagccggccaacaacagccucaagaucaccgaggaggucgggcacacggaccugauggccgcguacguggacaacuccagccugaccaucaagaagcccaacgagcucucccgcgugcugggccugaagacccucgccacccacgggcuggccgccgucaacagcgugcccugggacacgaucgccaacuacgcgaagccguuccugaacaagguggucuccaccaccaccaacaucgugacgcgcugccucaaccgggugugcaccaacuacaugcccuacuucuucacccugcugcuccagcugugcaccuucacccgcagcacgaacucccggaucaaggccagcaugcccaccaccaucgccaagaacaccgucaagagcgugggcaaguucugccuggaggccuccuucaacuaccucaagagccccaacuucuccaagcugaucaacaucaucaucugguuccugcuccugagcgugugccugggcucccucaucuacagcacggccgcgcuggggguccugauguccaaccucggcaugccgagcuacugcaccggguaccgcgagggcuaccugaacuccaccaacgugaccaucgccacguacugcaccggcagcauccccugcuccgugugccugagcgggcucgacucccuggacaccuaccccagccuggagaccauccagaucacgaucuccagcuucaagugggaccucaccgccuucggccuggucgccgagugguuccuggccuacauccucuucacccgguucuucuacgugcuggggcuggcggccaucaugcagcucuucuucuccuacuucgccgugcacuucaucagcaacuccuggcugauguggcugaucaucaaccugguccagauggcccccaucagcgcgauggugcgcauguacaucuucuucgccagcuucuacuacguguggaaguccuacguccacgugguggacggcugcaacagcuccaccugcaugaugugcuacaagcggaaccgcgccacgcgggucgagugcaccaccaucgugaacgggguccgccggagcuucuacguguacgccaacggcggcaagggguucugcaagcuccacaacuggaacugcgugaacugcgacaccuucugcgccggcuccacguucaucagcgacgaggucgcgcgcgaccugucccugcaguucaagcggccgaucaaccccaccgaccagagcuccuacaucguggacagcgugaccgucaagaacggguccauccaccucuacuucgacaaggccggccagaagaccuacgagcgccacagccugucccacuucgugaaccuggacaaccuccgggccaacaacacgaaggggagccugcccaucaacgugaucgucuucgacggcaaguccaagugcgaggagagcuccgccaagagcgccuccguguacuacagccagcugaugugccagcccauccuccugcuggaccaggcgcucgugagcgacgucggcgacuccgccgagguggccgugaagauguucgacgccuacgucaacaccuucagcuccaccuucaacgugccgauggagaagcugaagacccugguggccacggcggaggccgagcucgccaagaacgucagccuggacaacgugcuguccaccuucaucagcgccgcgcgccagggguucguggacuccgacgucgagaccaaggacgugguggagugccucaagcugagccaccaguccgacaucgaggucaccggcgacagcugcaacaacuacaugcugacguacaacaagguggagaacaugaccccccgggaccucggggccugcaucgacugcuccgcccgccacaucaacgcccagguggccaagagccacaacaucgcgcugaucuggaacgucaaggacuucaugucccugagcgagcagcuccggaagcagauccgcuccgccgccaagaagaacaaccugcccuucaagcugaccugcgccaccacgcgccagguggugaacgucgugaccaccaagaucgcccucaagggcggguga

SEQ ID NO: 17613 - RNA, 5841 nt, Artificial Sequence
  SARS-CoV-2__MT919768.1__non-structural protein 3 (NSP3) CDS gc
auggcccccaccaaggugaccuucggcgacgacacggucaucgaggugcagggguacaagagcgugaacaucaccuucgagcuggacgagcgcaucgacaagguccucaacgagaagugcuccgccuacaccguggagcugggcaccgaggugaacgaguucgcgugcgucguggccgacgccgugaucaagacgcugcagccggucagcgagcuccugaccccccuggggaucgaccucgacgagugguccauggccaccuacuaccuguucgacgagagcggcgaguucaagcuggccucccacauguacugcagcuucuacccccccgacgaggacgaggaggagggggacugcgaggaggaggaguucgagccguccacccaguacgaguacggcacggaggacgacuaccagggcaagccccucgaguucggggcgaccagcgccgcccugcagcccgaggaggagcaggaggaggacuggcuggacgacgacucccagcagaccgugggccagcaggacgggagcgaggacaaccagaccacgaccauccagaccaucguggagguccagccccagcucgagauggagcugaccccgguggugcagacgaucgaggucaacuccuucagcggcuaccugaagcucaccgacaacguguacaucaagaacgccgacaucguggaggaggcgaagaaggucaagcccaccgugguggucaacgccgccaacguguaccugaagcacgggggcggcguggccggggcccugaacaaggcgaccaacaacgccaugcaggucgaguccgacgacuacaucgccacgaacggcccccucaagguggggggcagcugcguccuguccggccacaaccuggccaagcacugccuccacgugguggggcccaacgucaacaagggcgaggacauccagcugcugaagagcgccuacgagaacuucaaccagcacgaggugcuccuggcgccgcugcucuccgccgggaucuucggcgccgaccccauccacagccugcgggugugcgucgacaccgugcgcaccaacguguaccuggccgucuucgacaagaaccucuacgacaagcugguguccagcuuccuggagaugaagagcgagaagcagguggagcagaagaucgccgagauccccaaggaggaggucaagcccuucaucaccgaguccaagccgagcguggagcagcggaagcaggacgacaagaagaucaaggcgugcguggaggaggucacgaccacccucgaggagaccaaguuccugacggagaaccugcuccuguacaucgacaucaacgggaaccugcaccccgacuccgccacccucgugagcgacaucgacaucaccuuccugaagaaggacgcccccuacaucgugggcgacgucgugcaggagggcgugcugaccgccgucgugauccccacgaagaaggccgggggcaccaccgagaugcucgcgaaggcccugcgcaaggugccgaccgacaacuacaucacgaccuaccccgggcagggccugaacggguacaccgucgaggaggccaagaccgugcucaagaagugcaaguccgccuucuacauccugcccagcaucaucuccaacgagaagcaggagauccugggcaccgugagcuggaaccuccgggagaugcuggcgcacgccgaggagacgcgcaagcugaugcccgucugcguggagaccaaggccaucguguccaccauccagcggaaguacaagggcaucaagauccaggagggggucguggacuacggcgcccgcuucuacuucuacaccagcaagacgaccguggccucccugaucaacacccucaacgaccugaacgagacccuggucacgaugccgcucggguacgugacccacggccugaaccuggaggaggcggcccgguacaugcgcagccucaaggugcccgccaccgucuccgugagcucccccgacgccgugaccgccuacaacggguaccugacgagcuccagcaagacccccgaggagcacuucaucgagaccaucucccuggcgggcagcuacaaggacuggagcuacuccggccagagcacccagcucgggaucgaguuccugaagcggggcgacaaguccgucuacuacacgagcaacccgaccaccuuccaccuggacggggaggugaucaccuucgacaaccucaagacgcugcugucccuccgcgaggugcggaccaucaaggucuucaccaccguggacaacaucaaccugcacacgcagguggucgacaugagcaugaccuacggccagcaguucggccccaccuaccuggacggggccgacgugaccaagaucaagccccacaacucccacgagggcaagacguucuacgugcucccgaacgacgacacccugcgcgucgaggccuucgaguacuaccacaccaccgaccccagcuuccuggggcgguacauguccgcccucaaccacacgaagaaguggaaguacccccaggugaacggccugaccagcaucaagugggccgacaacaacugcuaccuggcgaccgcccuccugacccugcagcagaucgagcucaaguucaaccccccggcccugcaggacgccuacuaccgcgcgcgggccggggaggccgccaacuucugcgcccugauccucgcguacugcaacaagacggugggcgagcugggcgacguccgcgagaccauguccuaccuguuccagcacgccaaccucgacagcugcaagcgggugcugaacgucgugugcaagaccugcgggcagcagcagaccacccugaagggcguggaggccgucauguacauggggacgcucuccuacgagcaguucaagaagggcgugcagauccccugcaccugcgggaagcaggccaccaaguaccuggugcagcaggagagccccuucgucaugauguccgcccccccggcgcaguacgagcugaagcacggcaccuucacgugcgccagcgaguacaccggcaacuaccagugcgggcacuacaagcacaucaccuccaaggagacccucuacugcaucgacggcgcccugcugacgaagagcagcgaguacaaggggcccaucaccgacguguucuacaaggagaacuccuacaccaccacgaucaagcccgugaccuacaagcucgacggcgucgugugcaccgagaucgaccccaagcuggacaacuacuacaagaaggacaacagcuacuucaccgagcagccgaucgaccuggugcccaaccagcccuaccccaacgccuccuucgacaacuucaaguucgucugcgacaacaucaaguucgccgacgaccucaaccagcugacgggguacaagaagccggcgagccgcgagcugaaggugaccuucuuccccgaccucaacggcgacguggucgccaucgacuacaagcacuacacccccuccuucaagaagggcgccaagcugcugcacaagcccaucguguggcacgugaacaacgccaccaacaaggcgacguacaagccgaacaccuggugcauccggugccucuggagcaagaagcccgucgagaccuccaacagcuucgacgugcugaaguccgaggacgcccaggggauggacaaccuggccugcgaggaccucaagcccgugagcgaggaggucguggagaaccccaccauccagaaggacgugcuggagugcaacgucaagacgaccgagguggugggcgacaucauccugaagccggccaacaacucccucaagaucaccgaggaggucgggcacaccgaccugauggccgcguacguggacaacagcucccugacgaucaagaagcccaacgagcucagccgcgugcugggccugaagacccucgccacccacgggcuggccgccgucaacuccgugcccugggacaccaucgccaacuacgcgaagccguuccugaacaagguggucagcacgaccaccaacaucgugacccgcugccucaaccgggugugcacgaacuacaugcccuacuucuucacccugcugcuccagcugugcaccuucacccgcuccaccaacagccggaucaaggccuccaugcccacgaccaucgccaagaacaccgucaagagcgugggcaaguucugccuggaggccagcuucaacuaccucaagucccccaacuucagcaagcugaucaacaucaucaucugguuccugcuccuguccgugugccugggcagccucaucuacuccaccgccgcgcuggggguccugaugagcaaccucggcaugccguccuacugcacgggguaccgcgagggcuaccugaacagcaccaacgugaccaucgccaccuacugcacgggcuccauccccugcagcgugugccuguccgggcucgacagccuggacaccuaccccucccuggagaccauccagaucaccaucagcuccuucaagugggaccucacggccuucggccuggucgccgagugguuccuggccuacauccucuucacccgguucuucuacgugcuggggcuggcggccaucaugcagcucuucuucagcuacuucgccgugcacuucaucuccaacagcuggcugauguggcugaucaucaaccugguccagauggcccccaucuccgcgauggugcgcauguacaucuucuucgccagcuucuacuacguguggaagagcuacguccacgugguggacggcugcaacuccagcaccugcaugaugugcuacaagcggaaccgcgccacccgggucgagugcacgaccaucgugaacgggguccgccgguccuucuacguguacgccaacggcggcaagggguucugcaagcuccacaacuggaacugcgugaacugcgacaccuucugcgccggcagcaccuucaucuccgacgaggucgcgcgcgaccugagccugcaguucaagcggccgaucaaccccacggaccaguccagcuacaucguggacuccgugaccgucaagaacgggagcauccaccucuacuucgacaaggccggccagaagaccuacgagcgccacucccugagccacuucgugaaccuggacaaccuccgggccaacaacaccaaggggucccugcccaucaacgugaucgucuucgacggcaagagcaagugcgaggaguccagcgccaaguccgccagcguguacuacucccagcugaugugccagcccauccuccugcuggaccaggcgcucgugagcgacgucggcgacagcgccgagguggccgugaagauguucgacgccuacgucaacacguucuccagcaccuucaacgugccgauggagaagcugaagacccugguggccaccgcggaggccgagcucgccaagaacgucucccuggacaacgugcugagcacguucaucuccgccgcgcgccagggguucguggacagcgacgucgagaccaaggacgugguggagugccucaagcugucccaccagagcgacaucgaggucaccggcgacuccugcaacaacuacaugcugaccuacaacaagguggagaacaugacgccccgggaccucggggccugcaucgacugcagcgcccgccacaucaacgcccagguggccaagucccacaacaucgcgcugaucuggaacgucaaggacuucaugagccuguccgagcagcuccggaagcagauccgcagcgccgccaagaagaacaaccugcccuucaagcugaccugcgccaccacccgccagguggugaacgucgugacgaccaagaucgcccucaagggcggguga

SEQ ID NO: 17614 - RNA, 5841 nt, Artificial Sequence
  SARS-CoV-2__MT919771.1__non-structural protein 3 (NSP3) CDS gc
auggcccccaccaaggugaccuucggcgacgacacggucaucgaggugcagggguacaagagcgugaacaucaccuucgagcuggacgagcgcaucgacaagguccucaacgagaagugcuccgccuacaccguggagcugggcaccgaggugaacgaguucgcgugcgucguggccgacgccgugaucaagacgcugcagccggucagcgagcuccugaccccccuggggaucgaccucgacgagugguccauggccaccuacuaccuguucgacgagagcggcgaguucaagcuggccucccacauguacugcagcuucuacccccccgacgaggacgaggaggagggggacugcgaggaggaggaguucgagccguccacccaguacgaguacggcacggaggacgacuaccagggcaagccccucgaguucggggcgaccagcgccgcccugcagcccgaggaggagcaggaggaggacuggcuggacgacgacucccagcagaccgugggccagcaggacgggagcgaggacaaccagaccacgaccauccagaccaucguggagguccagccccagcucgagauggagcugaccccgguggugcagacgaucgaggucaacuccuucagcggcuaccugaagcucaccgacaacguguacaucaagaacgccgacaucguggaggaggcgaagaaggucaagcccaccgugguggucaacgccgccaacguguaccugaagcacgggggcggcguggccggggcccugaacaaggcgaccaacaacgccaugcaggucgaguccgacgacuacaucgccacgaacggcccccucaagguggggggcagcugcguccuguccggccacaaccuggccaagcacugccuccacgugguggggcccaacgucaacaagggcgaggacauccagcugcugaagagcgccuacgagaacuucaaccagcacgaggugcuccuggcgccgcugcucuccgccgggaucuucggcgccgaccccauccacagccugcgggugugcgucgacaccgugcgcaccaacguguaccuggccgucuucgacaagaaccucuacgacaagcugguguccagcuuccuggagaugaagagcgagaagcagguggagcagaagaucgccgagauccccaaggaggaggucaagcccuucaucaccgaguccaagccgagcguggagcagcggaagcaggacgacaagaagaucaaggcgugcguggaggaggucacgaccacccucgaggagaccaaguuccugacggagaaccugcuccuguacaucgacaucaacgggaaccugcaccccgacuccgccacccucgugagcgacaucgacaucaccuuccugaagaaggacgcccccuacaucgugggcgacgucgugcaggagggcgugcugaccgccgucgugauccccacgaagaaggccgggggcaccaccgagaugcucgcgaaggcccugcgcaaggugccgaccgacaacuacaucacgaccuaccccgggcagggccugaacggguacaccgucgaggaggccaagaccgugcucaagaagugcaaguccgccuucuacauccugcccagcaucaucuccaacgagaagcaggagauccugggcaccgugagcuggaaccuccgggagaugcuggcgcacgccgaggagacgcgcaagcugaugcccgucugcguggagaccaaggccaucguguccaccauccagcggaaguacaagggcaucaagauccaggagggggucguggacuacggcgcccgcuucuacuucuacaccagcaagacgaccguggccucccugaucaacacccucaacgaccugaacgagacccuggucacgaugccgcucggguacgugacccacggccugaaccuggaggaggcggcccgguacaugcgcagccucaaggugcccgccaccgucuccgugagcucccccgacgccgugaccgccuacaacggguaccugacgagcuccagcaagacccccgaggagcacuucaucgagaccaucucccuggcgggcagcuacaaggacuggagcuacuccggccagagcacccagcucgggaucgaguuccugaagcggggcgacaaguccgucuacuacacgagcaacccgaccaccuuccaccuggacggggaggugaucaccuucgacaaccucaagacgcugcugucccuccgcgaggugcggaccaucaaggucuucaccaccguggacaacaucaaccugcacacgcagguggucgacaugagcaugaccuacggccagcaguucggccccaccuaccuggacggggccgacgugaccaagaucaagccccacaacucccacgagggcaagacguucuacgugcucccgaacgacgacacccugcgcgucgaggccuucgaguacuaccacaccaccgaccccagcuuccuggggcgguacauguccgcccucaaccacacgaagaaguggaaguacccccaggugaacggccugaccagcaucaagugggccgacaacaacugcuaccuggcgaccgcccuccugacccugcagcagaucgagcucaaguucaaccccccggcccugcaggacgccuacuaccgcgcgcgggccggggaggccgccaacuucugcgcccugauccucgcguacugcaacaagacggugggcgagcugggcgacguccgcgagaccauguccuaccuguuccagcacgccaaccucgacagcugcaagcgggugcugaacgucgugugcaagaccugcgggcagcagcagaccacccugaagggcguggaggccgucauguacauggggacgcucuccuacgagcaguucaagaagggcgugcagauccccugcaccugcgggaagcaggccaccaaguaccuggugcagcaggagagccccuucgucaugauguccgcccccccggcgcaguacgagcugaagcacggcaccuucacgugcgccagcgaguacaccggcaacuaccagugcgggcacuacaagcacaucaccuccaaggagacccucuacugcaucgacggcgcccugcugacgaagagcagcgaguacaaggggcccaucaccgacguguucuacaaggagaacuccuacaccaccacgaucaagcccgugaccuacaagcucgacggcgucgugugcaccgagaucgaccccaagcuggacaacuacuacaagaaggacaacagcuacuucaccgagcagccgaucgaccuggugcccaaccagcccuaccccaacgccuccuucgacaacuucaaguucgucugcgacaacaucaaguucgccgacgaccucaaccagcugacgggguacaagaagccggcgagccgcgagcugaaggugaccuucuuccccgaccucaacggcgacguggucgccaucgacuacaagcacuacacccccuccuucaagaagggcgccaagcugcugcacaagcccaucguguggcacgugaacaacgccaccaacaaggcgacguacaagccgaacaccuggugcauccggugccucuggagcaccaagcccgucgagaccuccaacagcuucgacgugcugaaguccgaggacgcccaggggauggacaaccuggccugcgaggaccucaagcccgugagcgaggaggucguggagaaccccacgauccagaaggacgugcuggagugcaacgucaagaccaccgagguggugggcgacaucauccugaagccggccaacaacucccucaagaucaccgaggaggucgggcacacggaccugauggccgcguacguggacaacagcucccugaccaucaagaagcccaacgagcucagccgcgugcugggccugaagacccucgccacccacgggcuggccgccgucaacuccgugcccugggacacgaucgccaacuacgcgaagccguuccugaacaagguggucagcaccaccaucaacaucgugacccgcugccucaaccgggugugcacgaacuacaugcccuacuucuucacccugcugcuccagcugugcaccuucacccgcuccaccaacagccggaucaaggccuccaugcccacgaccaucgccaagaacaccgucaagagcgugggcaaguucugccuggaggccagcuucaacuaccucaagucccccaacuucagcaagcugaucaacaucaucaucugguuccugcuccuguccgugugccugggcagccucaucuacuccaccgccgcgcuggggguccugaugagcaaccucggcaugccguccuacugcacgggguaccgcgagggcuaccugaacagcaccaacgugaccaucgccaccuacugcacgggcuccauccccugcagcgugugccuguccgggcucgacagccuggacaccuaccccucccuggagaccauccagaucaccaucagcuccuucaagugggaccucacggccuucggccuggucgccgagugguuccuggccuacauccucuucacccgguucuucuacgugcuggggcuggcggccaucaugcagcucuucuucagcuacuucgccgugcacuucaucuccaacagcuggcugauguggcugaucaucaaccugguccagauggcccccaucuccgcgauggugcgcauguacaucuucuucgccagcuucuacuacguguggaagagcuacguccacgugguggacggcugcaacuccagcaccugcaugaugugcuacaagcggaaccgcgccacccgggucgagugcacgaccaucgugaacgggguccgccgguccuucuacguguacgccaacggcggcaagggguucugcaagcuccacaacuggaacugcgugaacugcgacaccuucugcgccggcagcaccuucaucuccgacgaggucgcgcgcgaccugagccugcaguucaagcggccgaucaaccccacggaccaguccagcuacaucguggacuccgugaccgucaagaacgggagcauccaccucuacuucgacaaggccggccagaagaccuacgagcgccacucccugagccacuucgugaaccuggacaaccuccgggccaacaacaccaaggggucccugcccaucaacgugaucgucuucgacggcaagagcaagugcgaggaguccagcgccaaguccgccagcguguacuacucccagcugaugugccagcccauccuccugcuggaccaggcgcucgugagcgacgucggcgacagcgccgagguggccgugaagauguucgacgccuacgucaacacguucuccagcaccuucaacgugccgauggagaagcugaagacccugguggccaccgcggaggccgagcucgccaagaacgucucccuggacaacgugcugagcacguucaucuccgccgcgcgccagggguucguggacagcgacgucgagaccaaggacgugguggagugccucaagcugucccaccagagcgacaucgaggucaccggcgacuccugcaacaacuacaugcugaccuacaacaagguggagaacaugacgccccgggaccucggggccugcaucgacugcagcgcccgccacaucaacgcccagguggccaagucccacaacaucgcgcugaucuggaacgucaaggacuucaugagccuguccgagcagcuccggaagcagauccgcagcgccgccaagaagaacaaccugcccuucaagcugaccugcgccaccacccgccagguggugaacgucgugacgaccaagaucgcccucaagggcggguga

SEQ ID NO: 17615 - RNA, 5841 nt, Artificial Sequence
  SARS-CoV-2__MT919775.1__non-structural protein 3 (NSP3) CDS gc
auggcccccaccaaggugaccuucggcgacgacacggucaucgaggugcagggguacaagagcgugaacaucaccuucgagcuggacgagcgcaucgacaagguccucaacgagaagugcuccgccuacaccguggagcugggcaccgaggugaacgaguucgcgugcgucguggccgacgccgugaucaagacgcugcagccggucagcgagcuccugaccccccuggggaucgaccucgacgagugguccauggccaccuacuaccuguucgacgagagcggcgaguucaagcuggccucccacauguacugcagcuucuacccccccgacgaggacgaggaggagggggacugcgaggaggaggaguucgagccguccacccaguacgaguacggcacggaggacgacuaccagggcaagccccucgaguucggggcgaccagcgccgcccugcagcccgaggaggagcaggaggaggacuggcuggacgacgacucccagcagaccgugggccagcaggacgggagcgaggacaaccagaccacgaccauccagaccaucguggagguccagccccagcucgagauggagcugaccccgguggugcagacgaucgaggucaacuccuucagcggcuaccugaagcucaccgacaacguguacaucaagaacgccgacaucguggaggaggcgaagaaggucaagcccaccgugguggucaacgccgccaacguguaccugaagcacgggggcggcguggccggggcccugaacaaggcgaccaacaacgccaugcaggucgaguccgacgacuacaucgccacgaacggcccccucaagguggggggcagcugcguccuguccggccacaaccuggccaagcacugccuccacgugguggggcccaacgucaacaagggcgaggacauccagcugcugaagagcgccuacgagaacuucaaccagcacgaggugcuccuggcgccgcugcucuccgccgggaucuucggcgccgaccccauccacagccugcgggugugcgucgacaccgugcgcaccaacguguaccuggccgucuucgacaagaaccucuacgacaagcugguguccagcuuccuggagaugaagagcgagaagcagguggagcagaagaucgccgagauccccaaggaggaggucaagcccuucaucaccgaguccaagccgagcguggagcagcggaagcaggacgacaagaagaucaaggcgugcguggaggaggucacgaccacccucgaggagaccaaguuccugacggagaaccugcuccuguacaucgacaucaacgggaaccugcaccccgacuccgccacccucgugagcgacaucgacaucaccuuccugaagaaggacgcccccuacaucgugggcgacgucgugcaggagggcgugcugaccgccgucgugauccccacgaagaaggccgggggcaccaccgagaugcucgcgaaggcccugcgcaaggugccgaccgacaacuacaucacgaccuaccccgggcagggccugaacggguacaccgucgaggaggccaagaccgugcucaagaagugcaaguccgccuucuacauccugcccagcaucaucuccaacgagaagcaggagauccugggcaccgugagcuggaaccuccgggagaugcuggcgcacgccgaggagacgcgcaagcugaugcccgucugcguggagaccaaggccaucguguccaccauccagcggaaguacaagggcaucaagauccaggagggggucguggacuacggcgcccgcuucuacuucuacaccagcaagacgaccguggccucccugaucaacacccucaacgaccugaacgagacccuggucacgaugccgcucggguacgugacccacggccugaaccuggaggaggcggcccgguacaugcgcagccucaaggugcccgccaccgucuccgugagcucccccgacgccgugaccgccuacaacggguaccugacgagcuccagcaagacccccgaggagcacuucaucgagaccaucucccuggcgggcagcuacaaggacuggagcuacuccggccagagcacccagcucgggaucgaguuccugaagcggggcgacaaguccgucuacuacacgagcaacccgaccaccuuccaccuggacggggaggugaucaccuucgacaaccucaagacgcugcugucccuccgcgaggugcggaccaucaaggucuucaccaccguggacaacaucaaccugcacacgcagguggucgacaugagcaugaccuacggccagcaguucggccccaccuaccuggacggggccgacgugaccaagaucaagccccacaacucccacgagggcaagacguucuacgugcucccgaacgacgacacccugcgcgucgaggccuucgaguacuaccacaccaccgaccccagcuuccuggggcgguacauguccgcccucaaccacacgaagaaguggaaguacccccaggugaacggccugaccagcaucaagugggccgacaacaacugcuaccuggcgaccgcccuccugacccugcagcagaucgagcucaaguucaaccccccggcccugcaggacgccuacuaccgcgcgcgggccggggaggccgccaacuucugcgcccugauccucgcguacugcaacaagacggugggcgagcugggcgacguccgcgagaccauguccuaccuguuccagcacgccaaccucgacagcugcaagcgggugcugaacgucgugugcaagaccugcgggcagcagcagaccacccugaagggcguggaggccgucauguacauggggacgcucuccuacgagcaguucaagaagggcgugcagauccccugcaccugcgggaagcaggccaccaaguaccuggugcagcaggagagccccuucgucaugauguccgcccccccggcgcaguacgagcugaagcacggcaccuucacgugcgccagcgaguacaccggcaacuaccagugcgggcacuacaagcacaucaccuccaaggagacccucuacugcaucgacggcgcccugcugacgaagagcagcgaguacaaggggcccaucaccgacguguucuacaaggagaacuccuacaccaccacgaucaagcccgugaccuacaagcucgacggcgucgugugcaccgagaucgaccccaagcuggacaacuacuacaagaaggacaacagcuacuucaccgagcagccgaucgaccuggugcccaaccagcccuaccccaacgccuccuucgacaacuucaaguucgucugcgacaacaucaaguucgccgacgaccucaaccagcugacgggguacaagaagccggcgagccgcgagcugaaggugaccuucuuccccgaccucaacggcgacguggucgccaucgacuacaagcacuacacccccuccuucaagaagggcgccaagcugcugcacaagcccaucguguggcacgugaacaacgccaccaacaaggcgacguacaagccgaacaccuggugcauccggugccucuggagcaccaagcccgucgagaccuccaacagcuucgacgugcugaaguccgaggacgcccaggggauggacaaccuggccugcgaggaccucaagcccgugagcgaggaggucguggagaaccccacgauccagaaggacgugcuggagugcaacgucaagaccaccgagguggugggcgacaucauccugaagccggccaacaacucccucaagaucaccgaggaggucgggcacacggaccugauggccgcguacguggacaacagcucccugaccaucaagaagcccaacgagcucagccgcgugcugggccugaagacccucgccacccacgggcuggccgccgucaacuccgugcccugggacacgaucgccaacuacgcgaagccguuccugaacaagguggucagcaccaccaccaacaucgugacgcgcugccucaaccgggugugcaccaacuacaugcccuacuucuucacccugcugcuccagcugugcaccuucacccgcuccacgaacagccggaucaaggccuccaugcccaccaccaucgccaagaacaccgucaagagcgugggcaaguucugccuggaggccagcuucaacuaccucaagucccccaacuucagcaagcugaucaacaucaucaucugguuccugcuccuguccgugugccugggcagccucaucuacuccacggccgcgcuggggguccugaugagcaaccucggcaugccguccuacugcaccggguaccgcgagggcuaccugaacagcaucaacgugaccaucgccaccuacugcacgggcuccauccccugcagcgugugccuguccgggcucgacagccuggacaccuaccccucccuggagaccauccagaucaccaucagcuccuucaagugggaccucacggccuucggccuggucgccgagugguuccuggccuacauccucuucacccgguucuucuacgugcuggggcuggcggccaucaugcagcucuucuucagcuacuucgccgugcacuucaucuccaacagcuggcugauguggcugaucaucaaccugguccagauggcccccaucuccgcgauggugcgcauguacaucuucuucgccagcuucuacuacguguggaagagcuacguccacgugguggacggcugcaacuccagcaccugcaugaugugcuacaagcggaaccgcgccacccgggucgagugcacgaccaucgugaacgggguccgccgguccuucuacguguacgccaacggcggcaagggguucugcaagcuccacaacuggaacugcgugaacugcgacaccuucugcgccggcagcaccuucaucuccgacgaggucgcgcgcgaccugagccugcaguucaagcggccgaucaaccccacggaccaguccagcuacaucguggacuccgugaccgucaagaacgggagcauccaccucuacuucgacaaggccggccagaagaccuacgagcgccacucccugagccacuucgugaaccuggacaaccuccgggccaacaacaccaaggggucccugcccaucaacgugaucgucuucgacggcaagagcaagugcgaggaguccagcgccaaguccgccagcguguacuacucccagcugaugugccagcccauccuccugcuggaccaggcgcucgugagcgacgucggcgacagcgccgagguggccgugaagauguucgacgccuacgucaacacguucuccagcaccuucaacgugccgauggagaagcugaagacccugguggccaccgcggaggccgagcucgccaagaacgucucccuggacaacgugcugagcacguucaucuccgccgcgcgccagggguucguggacagcgacgucgagaccaaggacgugguggagugccucaagcugucccaccagagcgacaucgaggucaccggcgacuccugcaacaacuacaugcugaccuacaacaagguggagaacaugacgccccgggaccucggggccugcaucgacugcagcgcccgccacaucaacgcccagguggccaagucccacaacaucgcgcugaucuggaacgucaaggacuucaugagccuguccgagcagcuccggaagcagauccgcagcgccgccaagaagaacaaccugcccuucaagcugaccugcgccaccacccgccagguggugaacgucgugacgaccaagaucgcccucaagggcggguga

SEQ ID NO: 17616 - RNA, 5841 nt, Artificial Sequence
  SARS-CoV-2__MT919776.1__non-structural protein 3 (NSP3) CDS gc
auggcccccaccaaggugaccuucggcgacgacacggucaucgaggugcagggguacaagagcgugaacaucaccuucgagcuggacgagcgcaucgacaagguccucaacgagaagugcuccgccuacaccguggagcugggcaccgaggugaacgaguucgcgugcgucguggccgacgccgugaucaagacgcugcagccggucagcgagcuccugaccccccuggggaucgaccucgacgagugguccauggccaccuacuaccuguucgacgagagcggcgaguucaagcuggccucccacauguacugcagcuucuacccccccgacgaggacgaggaggagggggacugcgaggaggaggaguucgagccguccacccaguacgaguacggcacggaggacgacuaccagggcaagccccucgaguucggggcgaccagcgccgcccugcagcccgaggaggagcaggaggaggacuggcuggacgacgacucccagcagaccgugggccagcaggacgggagcgaggacaaccagaccacgaccauccagaccaucguggagguccagccccagcucgagauggagcugaccccgguggugcagacgaucgaggucaacuccuucagcggcuaccugaagcucaccgacaacguguacaucaagaacgccgacaucguggaggaggcgaagaaggucaagcccaccgugguggucaacgccgccaacguguaccugaagcacgggggcggcguggccggggcccugaacaaggcgaccaacaacgccaugcaggucgaguccgacgacuacaucgccacgaacggcccccucaagguggggggcagcugcguccuguccggccacaaccuggccaagcacugccuccacgugguggggcccaacgucaacaagggcaaggacauccagcugcugaagagcgccuacgagaacuucaaccagcacgaggugcuccuggcgccgcugcucuccgccgggaucuucggcgccgaccccauccacagccugcgggugugcgucgacaccgugcgcaccaacguguaccuggccgucuucgacaagaaccucuacgacaagcugguguccagcuuccuggagaugaagagcgagaagcagguggagcagaagaucgccgagauccccaaggaggaggucaagcccuucaucaccgaguccaagccgagcguggagcagcggaagcaggacgacaagaagaucaaggcgugcguggaggaggucacgaccacccucgaggagaccaaguuccugacggagaaccugcuccuguacaucgacaucaacgggaaccugcaccccgacuccgccacccucgugagcgacaucgacaucaccuuccugaagaaggacgcccccuacaucgugggcgacgucgugcaggagggcgugcugaccgccgucgugauccccacgaagaaggccgggggcaccaccgagaugcucgcgaaggcccugcgcaaggugccgaccgacaacuacaucacgaccuaccccgggcagggccugaacggguacaccgucgaggaggccaagaccgugcucaagaagugcaaguccgccuucuacauccugcccagcaucaucuccaacgagaagcaggagauccugggcaccgugagcuggaaccuccgggagaugcuggcgcacgccgaggagacgcgcaagcugaugcccgucugcguggagaccaaggccaucguguccaccauccagcggaaguacaagggcaucaagauccaggagggggucguggacuacggcgcccgcuucuacuucuacaccagcaagacgaccguggccucccugaucaacacccucaacgaccugaacgagacccuggucacgaugccgcucggguacgugacccacggccugaaccuggaggaggcggcccgguacaugcgcagccucaaggugcccgccaccgucuccgugagcucccccgacgccgugaccgccuacaacggguaccugacgagcuccagcaagacccccgaggagcacuucaucgagaccaucucccuggcgggcagcuacaaggacuggagcuacuccggccagagcacccagcucgggaucgaguuccugaagcggggcgacaaguccgucuacuacacgagcaacccgaccaccuuccaccuggacggggaggugaucaccuucgacaaccucaagacgcugcugucccuccgcgaggugcggaccaucaaggucuucaccaccguggacaacaucaaccugcacacgcagguggucgacaugagcaugaccuacggccagcaguucggccccaccuaccuggacggggccgacgugaccaagaucaagccccacaacucccacgagggcaagacguucuacgugcucccgaacgacgacacccugcgcgucgaggccuucgaguacuaccacaccaccgaccccagcuuccuggggcgguacauguccgcccucaaccacacgaagaaguggaaguacccccaggugaacggccugaccagcaucaagugggccgacaacaacugcuaccuggcgaccgcccuccugacccugcagcagaucgagcucaaguucaaccccccggcccugcaggacgccuacuaccgcgcgcgggccggggaggccgccaacuucugcgcccugauccucgcguacugcaacaagacggugggcgagcugggcgacguccgcgagaccauguccuaccuguuccagcacgccaaccucgacagcugcaagcgggugcugaacgucgugugcaagaccugcgggcagcagcagaccacccugaagggcguggaggccgucauguacauggggacgcucuccuacgagcaguucaagaagggcgugcagauccccugcaccugcgggaagcaggccaccaaguaccuggugcagcaggagagccccuucgucaugauguccgcccccccggcgcaguacgagcugaagcacggcaccuucacgugcgccagcgaguacaccggcaacuaccagugcgggcacuacaagcacaucaccuccaaggagacccucuacugcaucgacggcgcccugcugacgaagagcagcgaguacaaggggcccaucaccgacguguucuacaaggagaacuccuacaccaccacgaucaagcccgugaccuacaagcucgacggcgucgugugcaccgagaucgaccccaagcuggacaacuacuacaagaaggacaacagcuacuucaccgagcagccgaucgaccuggugcccaaccagcccuaccccaacgccuccuucgacaacuucaaguucgucugcgacaacaucaaguucgccgacgaccucaaccagcugacgggguacaagaagccggcgagccgcgagcugaaggugaccuucuuccccgaccucaacggcgacguggucgccaucgacuacaagcacuacacccccuccuucaagaagggcgccaagcugcugcacaagcccaucguguggcacgugaacaacgccaccaacaaggcgacguacaagccgaacaccuggugcauccggugccucuggagcaccaagcccgucgagaccuccaacagcuucgacgugcugaaguccgaggacgcccaggggauggacaaccuggccugcgaggaccucaagcccgugagcgaggaggucguggagaaccccacgauccagaaggacgugcuggagugcaacgucaagaccaccgagguggugggcgacaucauccugaagccggccaacaacucccucaagaucaccgaggaggucgggcacacggaccugauggccgcguacguggacaacagcucccugaccaucaagaagcccaacgagcucagccgcgugcugggccugaagacccucgccacccacgggcuggccgccgucaacuccgugcccugggacacgaucgccaacuacgcgaagccguuccugaacaagguggucagcaccaccaccaacaucgugacgcgcugccucaaccgggugugcaccaacuacaugcccuacuucuucacccugcugcuccagcugugcaccuucacccgcuccacgaacagccggaucaaggccuccaugcccaccaccaucgccaagaacaccgucaagagcgugggcaaguucugccuggaggccagcuucaacuaccucaagucccccaacuucagcaagcugaucaacaucaucaucugguuccugcuccuguccgugugccugggcagccucaucuacuccacggccgcgcuggggguccugaugagcaaccucggcaugccguccuacugcaccggguaccgcgagggcuaccugaacagcaccaacgugaccaucgccacguacugcaccggcuccauccccugcagcgugugccuguccgggcucgacagccuggacaccuaccccucccuggagaccauccagaucacgaucagcuccuucaagugggaccucaccgccuucggccuggucgccgagugguuccuggccuacauccucuucacccgguucuucuacgugcuggggcuggcggccaucaugcagcucuucuucagcuacuucgccgugcacuucaucuccaacagcuggcugauguggcugaucaucaaccugguccagauggcccccaucuccgcgauggugcgcauguacaucuucuucgccagcuucuacuacguguggaagagcuacguccacgugguggacggcugcaacuccagcaccugcaugaugugcuacaagcggaaccgcgccacgcgggucgagugcaccaccaucgugaacgggguccgccgguccuucuacguguacgccaacggcggcaagggguucugcaagcuccacaacuggaacugcgugaacugcgacaccuucugcgccggcagcacguucaucuccgacgaggucgcgcgcgaccugagccugcaguucaagcggccgaucaaccccaccgaccaguccagcuacaucguggacuccgugaccgucaagaacgggagcauccaccucuacuucgacaaggccggccagaagaccuacgagcgccacucccugagccacuucgugaaccuggacaaccuccgggccaacaacacgaaggggucccugcccaucaacgugaucgucuucgacggcaagagcaagugcgaggaguccagcgccaaguccgccagcguguacuacucccagcugaugugccagcccauccuccugcuggaccaggcgcucgugagcgacgucggcgacagcgccgagguggccgugaagauguucgacgccuacgucaacaccuucuccagcaccuucaacgugccgauggagaagcugaagacccugguggccacggcggaggccgagcucgccaagaacgucucccuggacaacgugcugagcaccuucaucuccgccgcgcgccagggguucguggacagcgacgucgagaccaaggacgugguggagugccucaagcugucccaccagagcgacaucgaggucaccggcgacuccugcaacaacuacaugcugacguacaacaagguggagaacaugaccccccgggaccucggggccugcaucgacugcagcgcccgccacaucaacgcccagguggccaagucccacaacaucgcgcugaucuggaacgucaaggacuucaugagccuguccgagcagcuccggaagcagauccgcagcgccgccaagaagaacaaccugcccuucaagcugaccugcgccaccacgcgccagguggugaacgucgugaccaccaagaucgcccucaagggcggguga

SEQ ID NO: 17617 - RNA, 5841 nt, Artificial Sequence
  SARS-CoV-2__MT919777.1__non-structural protein 3 (NSP3) CDS gc
auggcccccaccaaggugaccuucggcgacgacacggucaucgaggugcagggguacaagagcgugaacaucaccuucgagcuggacgagcgcaucgacaagguccucaacgagaagugcuccgccuacaccguggagcugggcaccgaggugaacgaguucgcgugcgucguggccgacgccgugaucaagacgcugcagccggucagcgagcuccugaccccccuggggaucgaccucgacgagugguccauggugaccuacuaccuguucgacgagagcggcgaguucaagcuggccucccacauguacugcagcuucuacccccccgacgaggacgaggaggagggggacugcgaggaggaggaguucgagccguccacccaguacgaguacggcacggaggacgacuaccagggcaagccccucgaguucggggccaccagcgcggcccugcagcccgaggaggagcaggaggaggacuggcuggacgacgacucccagcagaccgugggccagcaggacgggagcgaggacaaccagaccacgaccauccagaccaucgucgaggugcagccccagcucgagauggagcugaccccggugguccagacgaucgaggugaacuccuucagcggcuaccugaagcucaccgacaacguguacaucaagaacgccgacaucgucgaggaggugaagaaggugaagcccaccgucguggugaacgccgcgaacgucuaccugaagcacgggggcggcguggccggggcccugaacaaggccaccaacaacgccaugcaggucgaguccgacgacuacaucgcgacgaacggcccccucaagguggggggcagcugcgugcuguccggccacaaccuggccaagcacugccuccacgucguggggcccaacgugaacaagggcgaggacauccagcugcugaagagcgccuacgagaacuucaaccagcacgagguccuccuggccccgcugcucuccgccgggaucuucggcgcggaccccauccacagccugcgggugugcguggacaccguccgcaccaacguguaccuggccguguucgacaagaaccucuacgacaagcuggucuccagcuuccuggagaugaagagcgagaagcagguggagcagaagaucgccgagauccccaaggaggaggugaagcccuucaucaccgaguccaagccgagcgucgagcagcggaagcaggacgacaagaagaucaaggccugcguggaggaggugacgaccacccucgaggagaccaaguuccugacggagaaccugcuccuguacaucgacaucaacgggaaccugcaccccgacuccgccacccucgucagcgacaucgacaucaccuuccugaagaaggacgcgcccuacaucgugggcgacgugguccaggagggcgugcugaccgccguggucauccccacgaagaaggccgggggcaccaccgagaugcucgccaaggcccugcgcaaggugccgaccgacaacuacaucacgaccuaccccgggcagggccugaacggguacaccguggaggaggcgaagaccguccucaagaagugcaaguccgccuucuacauccugcccagcaucaucuccaacgagaagcaggagauccugggcaccgugagcuggaaccuccgggagaugcuggcccacgccgaggagacgcgcaagcugaugcccgugugcgucgagaccaaggcgaucguguccaccauccagcggaaguacaagggcaucaagauccaggaggggguggucgacuacggcgcccgcuucuacuucuacaccagcaagacgaccguggccucccugaucaacacccucaacgaccugaacgagacccuggugacgaugccgcucggguacgucacccacggccugaaccuggaggaggccgcccgguacaugcgcagccucaaggugcccgcgaccguguccgucagcucccccgacgccgugaccgccuacaacggguaccugacgagcuccagcaagacccccgaggagcacuucaucgagaccaucucccuggccggcagcuacaaggacuggagcuacuccggccagagcacccagcucgggaucgaguuccugaagcggggcgacaaguccguguacuacacgagcaacccgaccaccuuccaccuggacggggaggucaucaccuucgacaaccucaagacgcugcugucccuccgcgaggugcggaccaucaagguguucaccaccgucgacaacaucaaccugcacacgcaggugguggacaugagcaugaccuacggccagcaguucggccccaccuaccuggacggggccgacgucaccaagaucaagccccacaacucccacgagggcaagacguucuacgugcucccgaacgacgacacccugcgcguggaggcguucgaguacuaccacaccaccgaccccagcuuccuggggcgguacauguccgcccucaaccacacgaagaaguggaaguacccccaggucaacggccugaccagcaucaagugggccgacaacaacugcuaccuggccaccgcccuccugacccugcagcagaucgagcucaaguucaaccccccggcgcugcaggacgccuacuaccgcgcccgggccggggaggcggccaacuucugcgcccugauccucgccuacugcaacaagacggugggcgagcugggcgacguccgcgagaccauguccuaccuguuccagcacgccaaccucgacagcugcaagcgggugcugaacguggucugcaagaccugcgggcagcagcagaccacccugaagggcguggaggcggugauguacauggggacgcucuccuacgagcaguucaagaagggcguccagauccccugcaccugcgggaagcaggccaccaaguaccuggugcagcaggagagccccuucgugaugauguccgcccccccggcccaguacgagcugaagcacggcaccuucacgugcgccagcgaguacaccggcaacuaccagugcgggcacuacaagcacaucaccuccaaggagacccucuacugcaucgacggcgcgcugcugacgaagagcagcgaguacaaggggcccaucaccgacgucuucuacaaggagaacuccuacaccaccacgaucaagcccgugaccuacaagcucgacggcguggucugcaccgagaucgaccccaagcuggacaacuacuacaagaaggacaacagcuacuucaccgagcagccgaucgaccuggugcccaaccagcccuaccccaacgccuccuucgacaacuucaaguucgugugcgacaacaucaaguucgccgacgaccucaaccagcugacgggguacaagaagccggccagccgcgagcugaaggucaccuucuuccccgaccucaacggcgacgugguggccaucgacuacaagcacuacacccccuccuucaagaagggcgcgaagcugcugcacaagcccaucgucuggcacgugaacaacgccaccaacaaggccacguacaagccgaacaccuggugcauccggugccucuggagcaccaagcccguggagaccuccaacagcuucgacguccugaaguccgaggacgcccaggggauggacaaccuggcgugcgaggaccucaagcccgugagcgaggagguggucgagaaccccacgauccagaaggacgugcuggagugcaacgugaagaccaccgaggucgugggcgacaucauccugaagccggccaacaacucccucaagaucaccgaggagguggggcacacggaccugauggccgccuacgucgacaacagcucccugaccaucaagaagcccaacgagcucagccgcgugcugggccugaagacccucgccacccacgggcuggcggccgugaacuccguccccugggacacgaucgccaacuacgccaagccguuccugaacaagguggugagcaccaccaccaacaucgucacgcgcugccucaaccgggugugcaccaacuacaugcccuacuucuucacccugcugcuccagcugugcaccuucacccgcuccacgaacagccggaucaaggccuccaugcccaccaccaucgcgaagaacaccgugaagagcgucggcaaguucugccuggaggccagcuucaacuaccucaagucccccaacuucagcaagcugaucaacaucaucaucugguuccugcuccuguccgugugccugggcagccucaucuacuccacggccgcccugggggugcugaugagcaaccucggcaugccguccuacugcaccggguaccgcgagggcuaccugaacagcaccaacgucaccaucgccacguacugcaccggcuccauccccugcagcgugugccuguccgggcucgacagccuggacaccuaccccucccuggagaccauccagaucacgaucagcuccuucaagugggaccucaccgcguucggccugguggccgagugguuccuggccuacauccucuucacccgguucuucuacguccuggggcuggccgccaucaugcagcucuucuucagcuacuucgcggugcacuucaucuccaacagcuggcugauguggcugaucaucaaccuggugcagauggcccccaucuccgccaugguccgcauguacaucuucuucgccagcuucuacuacguguggaagagcuacgugcacgucguggacggcugcaacuccagcaccugcaugaugugcuacaagcggaaccgcgcgacgcgggucgagugcaccaccaucgugaacggggugcgccgguccuucuacgucuacgccaacggcggcaagggguucugcaagcuccacaacuggaacugcgugaacugcgacaccuucugcgccggcagcacguucaucuccgacgagguggcccgcgaccugagccugcaguucaagcggccgaucaaccccaccgaccaguccagcuacaucgucgacuccgugaccgugaagaacgggagcauccaccucuacuucgacaaggccggccagaagaccuacgagcgccacucccugagccacuucgucaaccuggacaaccuccgggcgaacaacacgaaggggucccugcccaucaacgugaucguguucgacggcaagagcaagugcgaggaguccagcgccaaguccgccagcgucuacuacucccagcugaugugccagcccauccuccugcuggaccaggcccucgugagcgacgugggcgacagcgccgaggucgcggugaagauguucgacgccuacgugaacaccuucuccagcaccuucaacgucccgauggagaagcugaagacccugguggccacggccgaggccgagcucgcgaagaacgugucccuggacaacguccugagcaccuucaucuccgccgcccgccagggguucguggacagcgacguggagaccaaggacgucguggagugccucaagcugucccaccagagcgacaucgaggugaccggcgacuccugcaacaacuacaugcugacguacaacaaggucgagaacaugaccccccgggaccucggggccugcaucgacugcagcgcgcgccacaucaacgcccagguggccaagucccacaacaucgcccugaucuggaacgugaaggacuucaugagccuguccgagcagcuccggaagcagauccgcagcgccgcgaagaagaacaaccugcccuucaagcugaccugcgccaccacgcgccaggucgugaacguggucaccaccaagaucgcccucaagggcggguga

SEQ ID NO: 17618 - RNA, 5841 nt, Artificial Sequence
  SARS-CoV-2__MT919783.1__non-structural protein 3 (NSP3) CDS gc
auggcccccaccaaggugaccuucggcgacgacacggucaucgaggugcagggguacaagagcgugaacaucaccuucgagcuggacgagcgcaucgacaagguccucaacgagaagugcuccgccuacaccguggagcugggcaccgaggugaacgaguucgcgugcgucguggccgacgccgugaucaagacgcugcagccggucagcgagcuccugaccccccuggggaucgaccucgacgagugguccauggccaccuacuaccuguucgacgagagcggcgaguucaagcuggccucccacauguacugcagcuucuacccccccgacgaggacgaggaggagggggacugcgaggaggaggaguucgagccguccacccaguacgaguacggcacggaggacgacuaccagggcaagccccucgaguucggggcgaccagcgccgcccugcagcccgaggaggagcaggaggaggacuggcuggacgacgacucccagcagaccgugggccagcaggacgggagcgaggacaaccagaccacgaccauccagaccaucguggagguccagccccagcucgagauggagcugaccccgguggugcagacgaucgaggucaacuccuucagcggcuaccugaagcucaccgacaacguguacaucaagaacgccgacaucguggaggaggcgaagaaggucaagcccaccgugguggucaacgccgccaacguguaccugaagcacgggggcggcguggccggggcccugaacaaggcgaccaacaacgccaugcaggucgaguccgacgacuacaucgccacgaacggcccccucaagguggggggcagcugcguccuguccggccacaaccuggccaagcacugccuccacgugguggggcccaacgucaacaagggcgaggacauccagcugcugaagagcgccuacgagaacuucaaccagcacgaggugcuccuggcgccgcugcucuccgccgggaucuucggcgccgaccccauccacagccugcgggugugcgucgacaccgugcgcaccaacguguaccuggccgucuucgacaagaaccucuacgacaagcugguguccagcuuccuggagaugaagagcgagaagcagguggagcagaagaucgccgagauccccaaggaggaggucaagcccuucaucaccgaguccaagccgagcguggagcagcggaagcaggacgacaagaagaucaaggcgugcguggaggaggucacgaccacccucgaggagaccaaguuccugacggagaaccugcuccuguacaucgacaucaacgggaaccugcaccccgacuccgccacccucgugagcgacaucgacaucaccuuccugaagaaggacgcccccuacaucgugggcgacgucgugcaggagggcgugcugaccgccgucgugauccccacgaagaaggccgggggcaccaccgagaugcucgcgaaggcccugcgcaaggugccgaccgacaacuacaucacgaccuaccccgggcagggccugaacggguacaccgucgaggaggccaagaccgugcucaagaagugcaaguccgccuucuacauccugcccagcaucaucuccaacgagaagcaggagauccugggcaccgugagcuggaaccuccgggagaugcuggcgcacgccgaggagacgcgcaagcugaugcccgucugcguggagaccaaggccaucguguccaccauccagcggaaguacaagggcaucaagauccaggagggggucguggacuacggcgcccgcuucuacuucuacaccagcaagacgaccguggccucccugaucaacacccucaacgaccugaacgagacccuggucacgaugccgcucggguacgugacccacggccugaaccuggaggaggcggcccgguacaugcgcagccucaaggugcccgccaccgucuccgugagcucccccgacgccgugaccgccuacaacggguaccugacgagcuccagcaagacccccgaggagcacuucaucgagaccaucucccuggcgggcagcuacaaggacuggagcuacuccggccagagcacccagcucgggaucgaguuccugaagcggggcgacaaguccgucuacuacacgagcaacccgaccaccuuccaccuggacggggaggugaucaccuucgacaaccucaagacgcugcugucccuccgcgaggugcggaccaucaaggucuucaccaccguggacaacaucaaccugcacacgcagguggucgacaugagcaugaccuacggccagcaguucggccccaccuaccuggacggggccgacgugaccaagaucaagccccacaacucccacgagggcaagacguucuacgugcucccgaacgacgacacccugcgcgucgaggccuucgaguacuaccacaccaccgaccccagcuuccuggggcgguacauguccgcccucaaccacacgaagaaguggaaguacccccaggugaacggccugaccagcaucaagugggccgacaacaacugcuaccuggcgaccgcccuccugacccugcagcagaucgagcucaaguucaaccccccggcccugcaggacgccuacuaccgcgcgcgggccggggaggccgccaacuucugcgcccugauccucgcguacugcaacaagacggugggcgagcugggcgacguccgcgagaccauguccuaccuguuccagcacgccaaccucgacagcugcaagcgggugcugaacgucgugugcaagaccugcgggcagcagcagaccacccugaagggcguggaggccgucauguacauggggacgcucuccuacgagcaguucaagaagggcgugcagauccccugcaccugcgggaagcaggccaccaaguaccuggugcagcaggagagccccuucgucaugauguccgcccccccggcgcaguacgagcugaagcacggcaccuucacgugcgccagcgaguacaccggcaacuaccagugcgggcacuacaagcacaucaccuccaaggagacccucuacugcaucgacggcgcccugcugacgaagagcagcgaguacaaggggcccaucaccgacguguucuacaaggagaacuccuacaccaccacgaucaagcccgugaccuacaagcucgacggcaucgucugcaccgagaucgaccccaagcuggacaacuacuacaagaaggacaacagcuacuucaccgagcagccgaucgaccuggugcccaaccagcccuaccccaacgccuccuucgacaacuucaaguucgugugcgacaacaucaaguucgccgacgaccucaaccagcugacgggguacaagaagccggcgagccgcgagcugaaggucaccuucuuccccgaccucaacggcgacgugguggccaucgacuacaagcacuacacccccuccuucaagaagggcgccaagcugcugcacaagcccaucgucuggcacgugaacaacgccaccaacaaggcgacguacaagccgaacaccuggugcauccggugccucuggagcaccaagcccguggagaccuccaacagcuucgacguccugaaguccgaggacgcccaggggauggacaaccuggccugcgaggaccucaagcccgugagcgaggagguggucgagaaccccacgauccagaaggacgugcuggagugcaacgugaagaccaccgaggucgugggcgacaucauccugaagccggccaacaacucccucaagaucaccgaggagguggggcacacggaccugauggccgcguacgucgacaacagcucccugaccaucaagaagcccaacgagcucagccgcgugcugggccugaagacccucgccacccacgggcuggccgccgugaacuccguccccugggacacgaucgccaacuacgcgaagccguuccugaacaagguggugagcaccaccaccaacaucgucacgcgcugccucaaccgggugugcaccaacuacaugcccuacuucuucacccugcugcuccagcugugcaccuucacccgcuccacgaacagccggaucaaggccuccaugcccaccaccaucgccaagaacaccgugaagagcgucggcaaguucugccuggaggccagcuucaacuaccucaagucccccaacuucagcaagcugaucaacaucaucaucugguuccugcuccuguccgugugccugggcagccucaucuacuccacggccgcgcugggggugcugaugagcaaccucggcaugccguccuacugcaccggguaccgcgagggcuaccugaacagcaccaacgucaccaucgccacguacugcaccggcuccauccccugcagcgugugccuguccgggcucgacagccuggacaccuaccccucccuggagaccauccagaucacgaucagcuccuucaagugggaccucaccgccuucggccugguggccgagugguuccuggccuacauccucuucacccgguucuucuacguccuggggcuggcggccaucaugcagcucuucuucagcuacuucgccgugcacuucaucuccaacagcuggcugauguggcugaucaucaaccuggugcagauggcccccaucuccgcgaugguccgcauguacaucuucuucgccagcuucuacuacguguggaagagcuacgugcacgucguggacggcugcaacuccagcaccugcaugaugugcuacaagcggaaccgcgccacgcggguggagugcaccaccaucgucaacggggugcgccgguccuucuacgucuacgccaacggcggcaagggguucugcaagcuccacaacuggaacugcgugaacugcgacaccuucugcgccggcagcacguucaucuccgacgagguggcgcgcgaccugagccugcaguucaagcggccgaucaaccccaccgaccaguccagcuacaucgucgacuccgugaccgugaagaacgggagcauccaccucuacuucgacaaggccggccagaagaccuacgagcgccacucccugagccacuucgucaaccuggacaaccuccgggccaacaacacgaaggggucccugcccaucaacgugaucguguucgacggcaagagcaagugcgaggaguccagcgccaaguccgccagcgucuacuacucccagcugaugugccagcccauccuccugcuggaccaggcgcucgugagcgacgugggcgacagcgccgaggucgccgugaagauguucgacgccuacgugaacaccuucuccagcaccuucaacgucccgauggagaagcugaagacccugguggccacggcggaggccgagcucgccaagaacgugucccuggacaacguccugagcaccuucaucuccgccgcgcgccagggguucguggacagcgacguggagaccaaggacgucguggagugccucaagcugucccaccagagcgacaucgaggugaccggcgacuccugcaacaacuacaugcugacguacaacaaggucgagaacaugaccccccgggaccucggggccugcaucgacugcagcgcccgccacaucaacgcccagguggccaagucccacaacaucgcgcugaucuggaacgugaaggacuucaugagccuguccgagcagcuccggaagcagauccgcagcgccgccaagaagaacaaccugcccuucaagcugaccugcgccaccacgcgccaggucgugaacguggucaccaccaagaucgcccucaagggcggguga

SEQ ID NO: 17619 - RNA, 5841 nt, Artificial Sequence
  SARS-CoV-2__MT919784.1__non-structural protein 3 (NSP3) CDS gc
auggcccccaccaaggugaccuucggcgacgacacggucaucgaggugcagggguacaagagcgugaacaucaccuucgagcuggacgagcgcaucgacaagguccucaacgagaagugcuccgccuacaccguggagcugggcaccgaggugaacgaguucgcgugcgucguggccgacgccgugaucaagacgcugcagccggucagcgagcuccugaccccccuggggaucgaccucgacgagugguccauggugaccuacuaccuguucgacgagagcggcgaguucaagcuggccucccacauguacugcagcuucuacccccccgacgaggacgaggaggagggggacugcgaggaggaggaguucgagccguccacccaguacgaguacggcacggaggacgacuaccagggcaagccccucgaguucggggccaccagcgcggcccugcagcccgaggaggagcaggaggaggacuggcuggacgacgacucccagcagaccgugggccagcaggacgggagcgaggacaaccagaccacgaccauccagaccaucgucgaggugcagccccagcucgagauggagcugaccccggugguccagacgaucgaggugaacuccuucagcggcuaccugaagcucaccgacaacguguacaucaagaacgccgacaucgucgaggaggccaagaaggugaagcccaccguggucgugaacgcggccaacguguaccugaagcacgggggcggcgucgccggggcccugaacaaggccaccaacaacgcgaugcagguggaguccgacgacuacaucgccacgaacggcccccucaaggucgggggcagcugcgugcuguccggccacaaccuggccaagcacugccuccacguggucgggcccaacgugaacaagggcgaggacauccagcugcugaagagcgccuacgagaacuucaaccagcacgaggugcuccuggccccgcugcucuccgcggggaucuucggcgccgaccccauccacagccugcgggucugcguggacaccgugcgcaccaacgucuaccuggccguguucgacaagaaccucuacgacaagcugguguccagcuuccuggagaugaagagcgagaagcaggucgagcagaagaucgccgagauccccaaggaggaggugaagcccuucaucaccgaguccaagccgagcguggagcagcggaagcaggacgacaagaagaucaaggccugcgucgaggaggugacgaccacccucgaggagaccaaguuccugacggagaaccugcuccuguacaucgacaucaacgggaaccugcaccccgacuccgcgacccucgugagcgacaucgacaucaccuuccugaagaaggacgcccccuacaucgucggcgacguggugcaggagggcguccugaccgccguggugauccccacgaagaaggccgggggcaccaccgagaugcucgccaaggcgcugcgcaaggucccgaccgacaacuacaucacgaccuaccccgggcagggccugaacggguacaccguggaggaggccaagaccgugcucaagaagugcaaguccgccuucuacauccugcccagcaucaucuccaacgagaagcaggagauccugggcaccgucagcuggaaccuccgggagaugcuggcccacgcggaggagacgcgcaagcugaugcccgugugcguggagaccaaggccaucgucuccaccauccagcggaaguacaagggcaucaagauccaggagggggugguggacuacggcgcccgcuucuacuucuacaccagcaagacgaccgucgccucccugaucaacacccucaacgaccugaacgagacccuggugacgaugccgcucggguacgugacccacggccugaaccuggaggaggccgcgcgguacaugcgcagccucaagguccccgccaccguguccgugagcucccccgacgccgucaccgccuacaacggguaccugacgagcuccagcaagacccccgaggagcacuucaucgagaccaucucccuggccggcagcuacaaggacuggagcuacuccggccagagcacccagcucgggaucgaguuccugaagcggggcgacaaguccguguacuacacgagcaacccgaccaccuuccaccuggacggggaggugaucaccuucgacaaccucaagacgcugcugucccuccgcgagguccggaccaucaagguguucaccaccguggacaacaucaaccugcacacgcaggucguggacaugagcaugaccuacggccagcaguucggccccaccuaccuggacggggcggacgugaccaagaucaagccccacaacucccacgagggcaagacguucuacguccucccgaacgacgacacccugcgcguggaggccuucgaguacuaccacaccaccgaccccagcuuccuggggcgguacauguccgcccucaaccacacgaagaaguggaaguacccccaggugaacggccugaccagcaucaagugggccgacaacaacugcuaccuggccaccgcgcuccugacccugcagcagaucgagcucaaguucaaccccccggcccugcaggacgccuacuaccgcgcccgggcgggggaggccgccaacuucugcgcccugauccucgccuacugcaacaagacggucggcgagcugggcgacgugcgcgagaccauguccuaccuguuccagcacgcgaaccucgacagcugcaagcggguccugaacguggugugcaagaccugcgggcagcagcagaccacccugaagggcgucgaggccgugauguacauggggacgcucuccuacgagcaguucaagaagggcgugcagauccccugcaccugcgggaagcaggccaccaaguaccugguccagcaggagagccccuucgugaugauguccgcccccccggcccaguacgagcugaagcacggcaccuucacgugcgcgagcgaguacaccggcaacuaccagugcgggcacuacaagcacaucaccuccaaggagacccucuacugcaucgacggcgcccugcugacgaagagcagcgaguacaaggggcccaucaccgacguguucuacaaggagaacuccuacaccaccacgaucaagcccgucaccuacaagcucgacggcguggugugcaccgagaucgaccccaagcuggacaacuacuacaagaaggacaacagcuacuucaccgagcagccgaucgaccugguccccaaccagcccuaccccaacgccuccuucgacaacuucaaguucgugugcgacaacaucaaguucgccgacgaccucaaccagcugacgggguacaagaagccggccagccgcgagcugaaggugaccuucuuccccgaccucaacggcgacgucguggcgaucgacuacaagcacuacacccccuccuucaagaagggcgccaagcugcugcacaagcccaucguguggcacgucaacaacgccaccaacaaggccacguacaagccgaacaccuggugcauccggugccucuggagcaccaagcccguggagaccuccaacagcuucgacgugcugaaguccgaggacgcgcaggggauggacaaccuggccugcgaggaccucaagcccgucagcgaggaggugguggagaaccccacgauccagaaggacguccuggagugcaacgugaagaccaccgagguggucggcgacaucauccugaagccggccaacaacucccucaagaucaccgaggagguggggcacacggaccugauggccgccuacguggacaacagcucccugaccaucaagaagcccaacgagcucagccgcguccugggccugaagacccucgcgacccacgggcuggccgccgugaacuccgugcccugggacacgaucgccaacuacgccaagccguuccugaacaaggucgugagcaccaccaccaacaucgugacgcgcugccucaaccgggucugcaccaacuacaugcccuacuucuucacccugcugcuccagcugugcaccuucacccgcuccacgaacagccggaucaaggcguccaugcccaccaccaucgccaagaacaccgugaagagcgugggcaaguucugccuggaggccagcuucaacuaccucaagucccccaacuucagcaagcugaucaacaucaucaucugguuccugcuccuguccgucugccugggcagccucaucuacuccacggccgcccugggggugcugaugagcaaccucggcaugccguccuacugcaccggguaccgcgagggcuaccugaacagcaccaacgugaccaucgcgacguacugcaccggcuccauccccugcagcgucugccuguccgggcucgacagccuggacaccuaccccucccuggagaccauccagaucacgaucagcuccuucaagugggaccucaccgccuucggccugguggccgagugguuccuggccuacauccucuucacccgguucuucuacgugcuggggcuggccgcgaucaugcagcucuucuucagcuacuucgccguccacuucaucuccaacagcuggcugauguggcugaucaucaaccuggugcagauggcccccaucuccgccauggugcgcauguacaucuucuucgcgagcuucuacuacgucuggaagagcuacgugcacguggucgacggcugcaacuccagcaccugcaugaugugcuacaagcggaaccgcgccacgcggguggagugcaccaccaucgucaacggggugcgccgguccuucuacguguacgccaacggcggcaagggguucugcaagcuccacaacuggaacugcgucaacugcgacaccuucugcgccggcagcacguucaucuccgacgagguggcccgcgaccugagccugcaguucaagcggccgaucaaccccaccgaccaguccagcuacaucguggacuccgucaccgugaagaacgggagcauccaccucuacuucgacaaggcgggccagaagaccuacgagcgccacucccugagccacuucgugaaccuggacaaccuccgggccaacaacacgaaggggucccugcccaucaacgucaucguguucgacggcaagagcaagugcgaggaguccagcgccaaguccgccagcguguacuacucccagcugaugugccagcccauccuccugcuggaccaggcccucgucagcgacgugggcgacagcgcggagguggccgucaagauguucgacgccuacgugaacaccuucuccagcaccuucaacgugccgauggagaagcugaagacccuggucgccacggccgaggcggagcucgccaagaacgugucccuggacaacgugcugagcaccuucaucuccgccgcccgccagggguucgucgacagcgacguggagaccaaggacguggucgagugccucaagcugucccaccagagcgacaucgaggugaccggcgacuccugcaacaacuacaugcugacguacaacaagguggagaacaugaccccccgggaccucggggcgugcaucgacugcagcgcccgccacaucaacgcccaggucgccaagucccacaacaucgcccugaucuggaacgugaaggacuucaugagccuguccgagcagcuccggaagcagauccgcagcgcggccaagaagaacaaccugcccuucaagcugaccugcgccaccacgcgccagguggucaacguggugaccaccaagaucgcccucaagggcggguga

SEQ ID NO: 17620 - RNA, 5841 nt, Artificial Sequence
  SARS-CoV-2__MT919785.1__non-structural protein 3 (NSP3) CDS gc
auggcccccaccaaggugaccuucggcgacgacacggucaucgaggugcagggguacaagagcgugaacaucaccuucgagcuggacgagcgcaucgacaagguccucaacgagaagugcuccgccuacaccguggagcugggcaccgaggugaacgaguucgcgugcgucguggccgacgccgugaucaagacgcugcagccggucagcgagcuccugaccccccuggggaucgaccucgacgagugguccauggccaccuacuaccuguucgacgagagcggcgaguucaagcuggccucccacauguacugcagcuucuacccccccgacgaggacgaggaggagggggacugcgaggaggaggaguucgagccguccacccaguacgaguacggcacggaggacgacuaccagggcaagccccucgaguucggggcgaccagcgccgcccugcagcccgaggaggagcaggaggaggacuggcuggacgacgacucccagcagaccgugggccagcaggacgggagcgaggacaaccagaccacgaccauccagaccaucguggagguccagccccagcucgagauggagcugaccccgguggugcagacgaucgaggucaacuccuucagcggcuaccugaagcucaccgacaacguguacaucaagaacgccgacaucguggaggaggcgaagaaggucaagcccaccgugguggucaacgccgccaacguguaccugaagcacgggggcggcguggccggggcccugaacaaggcgaccaacaacgccaugcaggucgaguccgacgacuacaucgccacgaacggcccccucaagguggggggcagcugcguccuguccggccacaaccuggccaagcacugccuccacgugguggggcccaacgucaacaagggcgaggacauccagcugcugaagagcgccuacgagaacuucaaccagcacgaggugcuccuggcgccgcugcucuccgccgggaucuucggcgccgaccccauccacagccugcgggugugcgucgacaccgugcgcaccaacguguaccuggccgucuucgacaagaaccucuacgacaagcugguguccagcuuccuggagaugaagagcgagaagcagguggagcagaagaucgccgagauccccaaggaggaggucaagcccuucaucaccgaguccaagccgagcguggagcagcggaagcaggacgacaagaagaucaaggcgugcguggaggaggucacgaccacccucgaggagaccaaguuccugacggagaaccugcuccuguacaucgacaucaacgggaaccugcaccccgacuccgccacccucgugagcgacaucgacaucaccuuccugaagaaggacgcccccuacaucgugggcgacgucgugcaggagggcgugcugaccgccgucgugauccccacgaagaaggccgggggcaccaccgagaugcucgcgaaggcccugcgcaaggugccgaccgacaacuacaucacgaccuaccccgggcagggccugaacggguacaccgucgaggaggccaagaccgugcucaagaagugcaaguccgccuucuacauccugcccagcaucaucuccaacgagaagcaggagauccugggcaccgugagcuggaaccuccgggagaugcuggcgcacgccgaggagacgcgcaagcugaugcccgucugcguggagaccaaggccaucguguccaccauccagcggaaguacaagggcaucaagauccaggagggggucguggacuacggcgcccgcuucuacuucuacaccagcaagacgaccguggccucccugaucaacacccucaacgaccugaacgagacccuggucacgaugccgcucggguacgugacccacggccugaaccuggaggaggcggcccgguacaugcgcagccucaaggugcccgccaccgucuccgugagcucccccgacgccgugaccgccuacaacggguaccugacgagcuccagcaagacccccgaggagcacuucaucgagaccaucucccuggcgggcagcuacaaggacuggagcuacuccggccagagcacccagcucgggaucgaguuccugaagcggggcgacaaguccgucuacuacacgagcaacccgaccaccuuccaccuggacggggaggugaucaccuucgacaaccucaagacgcugcugucccuccgcgaggugcggaccaucaaggucuucaccaccguggacaacaucaaccugcacacgcagguggucgacaugagcaugaccuacggccagcaguucggccccaccuaccuggacggggccgacgugaccaagaucaagccccacaacucccacgagggcaagacguucuacgugcucccgaacgacgacacccugcgcgucgaggccuucgaguacuaccacaccaccgaccccagcuuccuggggcgguacauguccgcccucaaccacacgaagaaguggaaguacccccaggugaacggccugaccagcaucaagugggccgacaacaacugcuaccuggcgaccgcccuccugacccugcagcagaucgagcucaaguucaaccccccggcccugcaggacgccuacuaccgcgcgcgggccggggaggccgccaacuucugcgcccugauccucgcguacugcaacaagacggugggcgagcugggcgacguccgcgagaccauguccuaccuguuccagcacgccaaccucgacagcugcaagcgggugcugaacgucgugugcaagaccugcgggcagcagcagaccacccugaagggcguggaggccgucauguacauggggacgcucuccuacgagcaguucaagaagggcgugcagauccccugcaccugcgggaagcaggccaccaaguaccuggugcagcaggagagccccuucgucaugauguccgcccccccggcgcaguacgagcugaagcacggcaccuucacgugcgccagcgaguacaccggcaacuaccagugcgggcacuacaagcacaucaccuccaaggagacccucuacugcaucgacggcgcccugcugacgaagagcagcgaguacaaggggcccaucaccgacguguucuacaaggagaacuccuacaccaccacgaucaagcccgugaccuacaagcucgacggcaucgucugcaccgagaucgaccccaagcuggacaacuacuacaagaaggacaacagcuacuucaccgagcagccgaucgaccuggugcccaaccagcccuaccccaacgccuccuucgacaacuucaaguucgugugcgacaacaucaaguucgccgacgaccucaaccagcugacgggguacaagaagccggcgagccgcgagcugaaggucaccuucuuccccgaccucaacggcgacgugguggccaucgacuacaagcacuacacccccuccuucaagaagggcgccaagcugcugcacaagcccaucgucuggcacgugaacaacgccaccaacaaggcgacguacaagccgaacaccuggugcauccggugccucuggagcaccaagcccguggagaccuccaacagcuucgacguccugaaguccgaggacgcccaggggauggacaaccuggccugcgaggaccucaagcccgugagcgaggagguggucgagaaccccacgauccagaaggacgugcuggagugcaacgugaagaccaccgaggucgugggcgacaucauccugaagccggccaacaacucccucaagaucaucgaggagguggggcacaccgaccugauggccgcguacgucgacaacagcucccugacgaucaagaagcccaacgagcucagccgcgugcugggccugaagacccucgccacccacgggcuggccgccgugaacuccguccccugggacaccaucgccaacuacgcgaagccguuccugaacaagguggugagcacgaccaccaacaucgucacccgcugccucaaccgggugugcacgaacuacaugcccuacuucuucacccugcugcuccagcugugcaccuucacccgcuccaccaacagccggaucaaggccuccaugcccacgaccaucgccaagaacaccgugaagagcgucggcaaguucugccuggaggccagcuucaacuaccucaagucccccaacuucagcaagcugaucaacaucaucaucugguuccugcuccuguccgugugccugggcagccucaucuacuccaccgccgcgcugggggugcugaugagcaaccucggcaugccguccuacugcacgggguaccgcgagggcuaccugaacagcaccaacgucaccaucgccaccuacugcacgggcuccauccccugcagcgugugccuguccgggcucgacagccuggacaccuaccccucccuggagaccauccagaucaccaucagcuccuucaagugggaccucacggccuucggccugguggccgagugguuccuggccuacauccucuucacccgguucuucuacguccuggggcuggcggccaucaugcagcucuucuucagcuacuucgccgugcacuucaucuccaacagcuggcugauguggcugaucaucaaccuggugcagauggcccccaucuccgcgaugguccgcauguacaucuucuucgccagcuucuacuacguguggaagagcuacgugcacgucguggacggcugcaacuccagcaccugcaugaugugcuacaagcggaaccgcgccacccggguggagugcacgaccaucgucaacggggugcgccgguccuucuacgucuacgccaacggcggcaagggguucugcaagcuccacaacuggaacugcgugaacugcgacaccuucugcgccggcagcaccuucaucuccgacgagguggcgcgcgaccugagccugcaguucaagcggccgaucaaccccacggaccaguccagcuacaucgucgacuccgugaccgugaagaacgggagcauccaccucuacuucgacaaggccggccagaagaccuacgagcgccacucccugagccacuucgucaaccuggacaaccuccgggccaacaacaccaaggggucccugcccaucaacgugaucguguucgacggcaagagcaagugcgaggaguccagcgccaaguccgccagcgucuacuacucccagcugaugugccagcccauccuccugcuggaccaggcgcucgugagcgacgugggcgacagcgccgaggucgccgugaagauguucgacgccuacgugaacacguucuccagcaccuucaacgucccgauggagaagcugaagacccugguggccaccgcggaggccgagcucgccaagaacgugucccuggacaacguccugagcacguucaucuccgccgcgcgccagggguucguggacagcgacguggagaccaaggacgucguggagugccucaagcugucccaccagagcgacaucgaggugaccggcgacuccugcaacaacuacaugcugaccuacaacaaggucgagaacaugacgccccgggaccucggggccugcaucgacugcagcgcccgccacaucaacgcccagguggccaagucccacaacaucgcgcugaucuggaacgugaaggacuucaugagccuguccgagcagcuccggaagcagauccgcagcgccgccaagaagaacaaccugcccuucaagcugaccugcgccaccacccgccaggucgugaacguggucacgaccaagaucgcccucaagggcggguga

SEQ ID NO: 17621 - RNA, 5841 nt, Artificial Sequence
  SARS-CoV-2__MT919788.1__non-structural protein 3 (NSP3) CDS gc
auggcccccaccaaggugaccuucggcgacgacacggucaucgaggugcagggguacaagagcgugaacaucaccuucgagcuggacgagcgcaucgacaagguccucaacgagaagugcuccgccuacaccguggagcugggcaccgaggugaacgaguucgcgugcgucguggccgacgccgugaucaagacgcugcagccggucagcgagcuccugaccccccuggggaucgaccucgacgagugguccauggccaccuacuaccuguucgacgagagcggcgaguucaagcuggccucccacauguacugcagcuucuacccccccgacgaggacgaggaggagggggacugcgaggaggaggaguucgagccguccacccaguacgaguacggcacggaggacgacuaccagggcaagccccucgaguucggggcgaccagcgccgcccugcagcccgaggaggagcaggaggaggacuggcuggacgacgacucccagcagaccgugggccagcaggacgggagcgaggacaaccagaccacgaccauccagaccaucguggagguccagccccagcucgagauggagcugaccccgguggugcagacgaucgaggucaacuccuucagcggcuaccugaagcucaccgacaacguguacaucaagaacgccgacaucguggaggaggcgaagaaggucaagcccaccgugguggucaacgccgccaacguguaccugaagcacgggggcggcguggccggggcccugaacaaggcgaccaacaacgccaugcaggucgaguccgacgacuacaucgccacgaacggcccccucaagguggggggcagcugcguccuguccggccacaaccuggccaagcacugccuccacgugguggggcccaacgucaacaagggcgaggacauccagcugcugaagagcgccuacgagaacuucaaccagcacgaggugcuccuggcgccgcugcucuccgccgggaucuucggcgccgaccccauccacagccugcgggugugcgucgacaccgugcgcaccaacguguaccuggccgucuucgacaagaaccucuacgacaagcugguguccagcuuccuggagaugaagagcgagaagcagguggagcagaagaucgccgagauccccaaggaggaggucaagcccuucaucaccgaguccaagccgagcguggagcagcggaagcaggacgacaagaagaucaaggcgugcguggaggaggucacgaccacccucgaggagaccaaguuccugacggagaaccugcuccuguacaucgacaucaacgggaaccugcaccccgacuccgccacccucgugagcgacaucgacaucaccuuccugaagaaggacgcccccuacaucgugggcgacgucgugcaggagggcgugcugaccgccgucgugauccccacgaagaaggccgggggcaccaccgagaugcucgcgaaggcccugcgcaaggugccgaccgacaacuacaucacgaccuaccccgggcagggccugaacggguacaccgucgaggaggccaagaccgugcucaagaagugcaaguccgccuucuacauccugcccagcaucaucuccaacgagaagcaggagauccugggcaccgugagcuggaaccuccgggagaugcuggcgcacgccgaggagacgcgcaagcugaugcccgucugcguggagaccaaggccaucguguccaccauccagcggaaguacaagggcaucaagauccaggagggggucguggacuacggcgcccgcuucuacuucuacaccagcaagacgaccguggccucccugaucaacacccucaacgaccugaacgagacccuggucacgaugccgcucggguacgugacccacggccugaaccuggaggaggcggcccgguacaugcgcagccucaaggugcccgccaccgucuccgugagcucccccgacgccgugaccgccuacaacggguaccugacgagcuccagcaagacccccgaggagcacuucaucgagaccaucucccuggcgggcagcuacaaggacuggagcuacuccggccagagcacccagcucgggaucgaguuccugaagcggggcgacaaguccgucuacuacacgagcaacccgaccaccuuccaccuggacggggaggugaucaccuucgacaaccucaagacgcugcugucccuccgcgaggugcggaccaucaaggucuucaccaccguggacaacaucaaccugcacacgcagguggucgacaugagcaugaccuacggccagcaguucggccccaccuaccuggacggggccgacgugaccaagaucaagccccacaacucccacgagggcaagacguucuacgugcucccgaacgacgacacccugcgcgucgaggccuucgaguacuaccacaccaccgaccccagcuuccuggggcgguacauguccgcccucaaccacacgaagaaguggaaguacccccaggugaacggccugaccagcaucaagugggccgacaacaacugcuaccuggcgaccgcccuccugacccugcagcagaucgagcucaaguucaaccccccggcccugcaggacgccuacuaccgcgcgcgggccggggaggccgccaacuucugcgcccugauccucgcguacugcaacaagacggugggcgagcugggcgacguccgcgagaccauguccuaccuguuccagcacgccaaccucgacagcugcaagcgggugcugaacgucgugugcaagaccugcgggcagcagcagaccacccugaagggcguggaggccgucauguacauggggacgcucuccuacgagcaguucaagaagggcgugcagauccccugcaccugcgggaagcaggccaccaaguaccuggugcagcaggagagccccuucgucaugauguccgcccccccggcgcaguacgagcugaagcacggcaccuucacgugcgccagcgaguacaccggcaacuaccagugcgggcacuacaagcacaucaccuccaaggagacccucuacugcaucgacggcgcccugcugacgaagagcagcgaguacaaggggcccaucaccgacguguucuacaaggagaacuccuacaccaccacgaucaagcccgugaccuacaagcucgacggcgucgugugcaccgagaucgaccccaagcuggacaacuacuacaagaaggacaacagcuacuucaccgagcagccgaucgaccuggugcccaaccagcccuaccccaacgccuccuucgacaacuucaaguucgucugcgacaacaucaaguucgccgacgaccucaaccagcugacgggguacaagaagccggcgagccgcgagcugaaggugaccuucuuccccgaccucaacggcgacguggucgccaucgacuacaagcacuacacccccuccuucaagaagggcgccaagcugcugcacaagcccaucguguggcacgugaacaacgccaccaacaaggcgacguacaagccgaacaccuggugcauccggugccucuggagcaccaagcccgucgagaccuccaacagcuucgacgugcugaaguccgaggacgcccaggggauggacaaccuggccugcgaggaccucaagcccgugagcgaggaggucguggagaaccccacgauccagaaggacgugcuggagugcaacgucaagaccaccgagguggugggcgacaucauccugaagccggccaacaacucccucaagaucaccgaggaggucgggcacacggaccugauggccgcguacguggacaacagcucccugaccaucaagaagcccaacgagcucagccgcgugcugggccugaagacccucgccacccacgggcuggccgccgucaacuccgugcccugggacacgaucgccaacuacgcgaagccguuccugaacaagguggucagcaccaccaccaacaucgugacgcgcugccucaaccgggugugcaccaacuacaugcccuacuucuucacccugcugcuccagcugugcaccuucacccgcuccacgaacagccggaucaaggccuccaugcccaccaccaucgccaagaacaccgucaagagcgugggcaaguucugccuggaggccagcuucaacuaccucaagucccccaacuucagcaagcugaucaacaucaucaucugguuccugcuccuguccgugugccugggcagccucaucuacuccacggccgcgcuggggguccugaugagcaaccucggcaucccguccuacugcaccggguaccgcgagggcuaccugaacagcaccaacgugaccaucgccacguacugcaccggcuccauccccugcagcgugugccuguccgggcucgacagccuggacaccuaccccucccuggagaccauccagaucacgaucagcuccuucaagugggaccucaccgccuucggccuggucgccgagugguuccuggccuacauccucuucacccgguucuucuacgugcuggggcuggcggccaucaugcagcucuucuucagcuacuucgccgugcacuucaucuccaacagcuggcugauguggcugaucaucaaccugguccagauggcccccaucuccgcgauggugcgcauguacaucuucuucgccagcuucuacuacguguggaagagcuacguccacgugguggacggcugcaacuccagcaccugcaugaugugcuacaagcggaaccgcgccacgcgggucgagugcaccaccaucgugaacgggguccgccgguccuucuacguguacgccaacggcggcaagggguucugcaagcuccacaacuggaacugcgugaacugcgacaccuucugcgccggcagcacguucaucuccgacgaggucgcgcgcgaccugagccugcaguucaagcggccgaucaaccccaccgaccaguccagcuacaucguggacuccgugaccgucaagaacgggagcauccaccucuacuucgacaaggccggccagaagaccuacgagcgccacucccugagccacuucgugaaccuggacaaccuccgggccaacaacacgaaggggucccugcccaucaacgugaucgucuucgacggcaagagcaagugcgaggaguccagcgccaaguccgccagcguguacuacucccagcugaugugccagcccauccuccugcuggaccaggcgcucgugagcgacgucggcgacagcgccgagguggccgugaagauguucgacgccuacgucaacaccuucuccagcaccuucaacgugccgauggagaagcugaagacccugguggccacggcggaggccgagcucgccaagaacgucucccuggacaacgugcugagcaccuucaucuccgccgcgcgccagggguucguggacagcgacgucgagaccaaggacgugguggagugccucaagcugucccaccagagcgacaucgaggucaccggcgacuccugcaacaacuacaugcugacguacaacaagguggagaacaugaccccccgggaccucggggccugcaucgacugcagcgcccgccacaucaacgcccagguggccaagucccacaacaucgcgcugaucuggaacgucaaggacuucaugagccuguccgagcagcuccggaagcagauccgcagcgccgccaagaagaacaaccugcccuucaagcugaccugcgccaccacgcgccagguggugaacgucgugaccaccaagaucgcccucaagggcggguga

SEQ ID NO: 17622 - RNA, 5841 nt, Artificial Sequence
  SARS-CoV-2__MT919996.1__non-structural protein 3 (NSP3) CDS gc
auggcccccaccaaggugaccuucggcgacgacacggucaucgaggugcagggguacaagagcgugaacaucaccuucgagcuggacgagcgcaucgacaagguccucaacgagaagugcuccgccuacaccguggagcugggcaccgaggugaacgaguucgcgugcgucguggccgacgccgugaucaagacgcugcagccggucagcgagcuccugaccccccuggggaucgaccucgacgagugguccauggccaccuacuaccuguucgacgagagcggcgaguucaagcuggccucccacauguacugcagcuucuacccccccgacgaggacgaggaggagggggacugcgaggaggaggaguucgagccguccacccaguacgaguacggcacggaggacgacuaccagggcaagccccucgaguucggggcgaccagcgccgcccugcagcccgaggaggagcaggaggaggacuggcuggacgacgacucccagcagaccgugggccagcaggacgggagcgaggacaaccagaccacgaccauccagaccaucguggagguccagccccagcucgagauggagcugaccccgguggugcagacgaucgaggucaacuccuucagcggcuaccugaagcucaccgacaacguguacaucaagaacgccgacaucguggaggaggcgaagaaggucaagcccaccgugguggucaacgccgccaacguguaccugaagcacgggggcggcguggccggggcccugaacaaggcgaccaacaacgccaugcaggucgaguccgacgacuacaucgccacgaacggcccccucaagguggggggcagcugcguccuguccggccacaaccuggccaagcacugccuccacgugguggggcccaacgucaacaagggcgaggacauccagcugcugaagagcgccuacgagaacuucaaccagcacgaggugcuccuggcgccgcugcucuccgccgggaucuucggcgccgaccccauccacagccugcgggugugcgucgacaccgugcgcaccaacguguaccuggccgucuucgacaagaaccucuacgacaagcugguguccagcuuccuggagaugaagagcgagaagcagguggagcagaagaucgccgagauccccaaggaggaggucaagcccuucaucaccgaguccaagccgagcguggagcagcggaagcaggacgacaagaagaucaaggcgugcguggaggaggucacgaccacccucgaggagaccaaguuccugacggagaaccugcuccuguacaucgacaucaacgggaaccugcaccccgacuccgccacccucgugagcgacaucgacaucaccuuccugaagaaggacgcccccuacaucgugggcgacgucgugcaggagggcgugcugaccgccgucgugauccccacgaagaaggccgggggcaccaccgagaugcucgcgaaggcccugcgcaaggugccgaccgacaacuacaucacgaccuaccccgggcagggccugaacggguacaccgucgaggaggccaagaccgugcucaagaagugcaaguccgccuucuacauccugcccagcaucaucuccaacgagaagcaggagauccugggcaccgugagcuggaaccuccgggagaugcuggcgcacgccgaggagacgcgcaagcugaugcccgucugcguggagaccaaggccaucguguccaccauccagcggaaguacaagggcaucaagauccaggagggggucguggacuacggcgcccgcuucuacuucuacaccagcaagacgaccguggccucccugaucaacacccucaacgaccugaacgagacccuggucacgaugccgcucggguacgugacccacggccugaaccuggaggaggcggcccgguacaugcgcagccucaaggugcccgccaccgucuccgugagcucccccgacgccgugaccgccuacaacggguaccugacgagcuccagcaagacccccgaggagcacuucaucgagaccaucucccuggcgggcagcuacaaggacuggagcuacuccggccagagcacccagcucgggaucgaguuccugaagcggggcgacaaguccgucuacuacacgagcaacccgaccaccuuccaccuggacggggaggugaucaccuucgacaaccucaagacgcugcugucccuccgcgaggugcggaccaucaaggucuucaccaccguggacaacaucaaccugcacacgcagguggucgacaugagcaugaccuacggccagcaguucggccccaccuaccuggacggggccgacgugaccaagaucaagccccacaacucccacgagggcaagacguucuacgugcucccgaacgacgacacccugcgcgucgaggccuucgaguacuaccacaccaccgaccccagcuuccuggggcgguacauguccgcccucaaccacacgaagaaguggaaguacccccaggugaacggccugaccagcaucaagugggccgacaacaacugcuaccuggcgaccgcccuccugacccugcagcagaucgagcucaaguucaaccccccggcccugcaggacgccuacuaccgcgcgcgggccggggaggccgccaacuucugcgcccugauccucgcguacugcaacaagacggugggcgagcugggcgacguccgcgagaccauguccuaccuguuccagcacgccaaccucgacagcugcaagcgggugcugaacgucgugugcaagaccugcgggcagcagcagaccacccugaagggcguggaggccgucauguacauggggacgcucuccuacgagcaguucaagaagggcgugcagauccccugcaccugcgggaagcaggccaccaaguaccuggugcagcaggagagccccuucgucaugauguccgcccccccggcgcaguacgagcugaagcacggcaccuucacgugcgccagcgaguacaccggcaacuaccagugcgggcacuacaagcacaucaccuccaaggagacccucuacugcaucgacggcgcccugcugacgaagagcagcgaguacaaggggcccaucaccgacguguucuacaaggagaacuccuacaccaccacgaucaagcccgugaccuacaagcucgacggcgucgugugcaccgagaucgaccccaagcuggacaacuacuacaagaaggacaacagcuacuucaccgagcagccgaucgaccuggugcccaaccagcccuaccccaacgccuccuucgacaacuucaaguucgucugcgacaacaucaaguucgccgacgaccucaaccagcugacgggguacaagaagccggcgagccgcgagcugaaggugaccuucuuccccgaccucaacggcgacguggucgccaucgacuacaagcacuacacccccuccuucaagaagggcgccaagcugcugcacaagcccaucguguggcacgugaacaacgccaccaacaaggcgacguacaagccgaacaccuggugcauccggugccucuggagcaccaagcccgucgagaccuccaacagcuucgacgugcugaaguccgaggacgcccaggggauggacaaccuggccugcgaggaccucaagcccgugagcgaggaggucguggagaaccccacgauccagaaggacgugcuggagugcaacgucaagaccaccgagguggugggcgacaucauccugaagccggccaacaacucccucaagaucaccgaggaggucgggcacacggaccugauggccgcguacguggacaacagcucccugaccaucaagaagcccaacgagcucuuccgcgugcugggccugaagacccucgccacccacgggcuggccgccgucaacagcgugcccugggacacgaucgccaacuacgcgaagccguuccugaacaagguggucuccaccaccaccaacaucgugacgcgcugccucaaccgggugugcaccaacuacaugcccuacuucuucacccugcugcuccagcugugcaccuucacccgcagcacgaacucccggaucaaggccagcaugcccaccaccaucgccaagaacaccgucaaguccgugggcaaguucugccuggaggccagcuucaacuaccucaagagccccaacuucuccaagcugaucaacaucaucaucugguuccugcuccugagcgugugccugggcucccucaucuacagcacggccgcgcuggggguccugauguccaaccucggcaugccgagcuacugcaccggguaccgcgagggcuaccugaacuccaccaacgugaccaucgccacguacugcaccggcagcauccccugcuccgugugccugagcgggcucgacucccuggacaccuaccccagccuggagaccauccagaucacgaucuccagcuucaagugggaccucaccgccuucggccuggucgccgagugguuccuggccuacauccucuucacccgguucuucuacgugcuggggcuggcggccaucaugcagcucuucuucuccuacuucgccgugcacuucaucagcaacuccuggcugauguggcugaucaucaaccugguccagauggcccccaucagcgcgauggugcgcauguacaucuucuucgccuccuucuacuacguguggaagagcuacguccacgugguggacggcugcaacagcuccaccugcaugaugugcuacaagcggaaccgcgccacgcgggucgagugcaccaccaucgugaacgggguccgccggagcuucuacguguacgccaacggcggcaagggguucugcaagcuccacaacuggaacugcgugaacugcgacaccuucugcgccggcuccacguucaucagcgacgaggucgcgcgcgaccugucccugcaguucaagcggccgaucaaccccaccgaccagagcuccuacaucguggacagcgugaccgucaagaacggguccauccaccucuacuucgacaaggccggccagaagaccuacgagcgccacagccugucccacuucgugaaccuggacaaccuccgggccaacaacacgaaggggagccugcccaucaacgugaucgucuucgacggcaaguccaagugcgaggagagcuccgccaagagcgccuccguguacuacagccagcugaugugccagcccauccuccugcuggaccaggcgcucguguccgacgucggcgacagcgccgagguggccgugaagauguucgacgccuacgucaacaccuucagcuccaccuucaacgugccgauggagaagcugaagacccugguggccacggcggaggccgagcucgccaagaacgucagccuggacaacgugcuguccaccuucaucagcgccgcgcgccagggguucguggacuccgacgucgagaccaaggacgugguggagugccucaagcugagccaccaguccgacaucgaggucaccggcgacagcugcaacaacuacaugcugacguacaacaagguggagaacaugaccccccgggaccucggggccugcaucgacugcuccgcccgccacaucaacgcccagguggccaagagccacaacaucgcgcugaucuggaacgucaaggacuucaugucccugagcgagcagcuccggaagcagauccgcuccgccgccaagaagaacaaccugcccuucaagcugaccugcgccaccacgcgccagguggugaacgucgugaccaccaagaucgcccucaagggcggguga

SEQ ID NO: 17623 - RNA, 5841 nt, Artificial Sequence
  SARS-CoV-2__MT919997.1__non-structural protein 3 (NSP3) CDS gc
auggcccccaccaaggugaccuucggcgacgacacggucaucgaggugcagggguacaagagcgugaacaucaccuucgagcuggacgagcgcaucgacaagguccucaacgagaagugcuccgccuacaccguggagcugggcaccgaggugaacgaguucgcgugcgucguggccgacgccgugaucaagacgcugcagccggucagcgagcuccugaccccccuggggaucgaccucgacgagugguccauggccaccuacuaccuguucgacgagagcggcgaguucaagcuggccucccacauguacugcagcuucuaccccuccgacgaggacgaggaggagggggacugcgaggaggaggaguucgagcccagcacccaguacgaguacggcacggaggacgacuaccagggcaagccgcucgaguucggggcgaccuccgccgcccugcagcccgaggaggagcaggaggaggacuggcuggacgacgacagccagcagaccgugggccagcaggacggguccgaggacaaccagaccacgaccauccagaccaucguggagguccagccccagcucgagauggagcugacccccguggugcagacgaucgaggucaacagcuucuccggcuaccugaagcucaccgacaacguguacaucaagaacgccgacaucguggaggaggcgaagaaggucaagccgaccgugguggucaacgccgccaacguguaccugaagcacgggggcggcguggccggggcccugaacaaggcgaccaacaacgccaugcaggucgagagcgacgacuacaucgccacgaacggcccccucaagguggggggcuccugcguccugagcggccacaaccuggccaagcacugccuccacgugguggggcccaacgucaacaagggcgaggacauccagcugcugaaguccgccuacgagaacuucaaccagcacgaggugcuccuggcgccccugcucagcgccgggaucuucggcgccgacccgauccacucccugcgggugugcgucgacaccgugcgcaccaacguguaccuggccgucuucgacaagaaccucuacgacaagcuggugagcagcuuccuggagaugaaguccgagaagcagguggagcagaagaucgccgagauccccaaggaggaggucaagcccuucaucaccgagagcaagcccuccguggagcagcggaagcaggacgacaagaagaucaaggcgugcguggaggaggucacgaccacccucgaggagaccaaguuccugacggagaaccugcuccuguacaucgacaucaacgggaaccugcacccggacagcgccacccucguguccgacaucgacaucaccuuccugaagaaggacgcccccuacaucgugggcgacgucgugcaggagggcgugcugaccgccgucgugauccccacgaagaaggccgggggcaccaccgagaugcucgcgaaggcccugcgcaaggugcccaccgacaacuacaucacgaccuacccggggcagggccugaacggguacaccgucgaggaggccaagaccgugcucaagaagugcaagagcgccuucuacauccugcccuccaucaucagcaacgagaagcaggagauccugggcaccguguccuggaaccuccgggagaugcuggcgcacgccgaggagacgcgcaagcugaugcccgucugcguggagaccaaggccaucgugagcaccauccagcggaaguacaagggcaucaagauccaggagggggucguggacuacggcgcccgcuucuacuucuacaccuccaagacgaccguggccagccugaucaacacccucaacgaccugaacgagacccuggucacgaugccccucggguacgugacccacggccugaaccuggaggaggcggcccgguacaugcgcucccucaaggugccggccaccgucagcguguccagccccgacgccgugaccgccuacaacggguaccugacguccagcuccaagacccccgaggagcacuucaucgagaccaucagccuggcgggcagcuacaaggacugguccuacagcggccaguccacccagcucgggaucgaguuccugaagcggggcgacaagagcgucuacuacacguccaaccccaccaccuuccaccuggacggggaggugaucaccuucgacaaccucaagacgcugcugagccuccgcgaggugcggaccaucaaggucuucaccaccguggacaacaucaaccugcacacgcagguggucgacauguccaugaccuacggccagcaguucggcccgaccuaccuggacggggccgacgugaccaagaucaagccccacaacagccacgagggcaagacguucuacgugcuccccaacgacgacacccugcgcgucgaggccuucgaguacuaccacaccaccgacccguccuuccuggggcgguacaugagcgcccucaaccacacgaagaaguggaaguacccccaggugaacggccugaccuccaucaagugggccgacaacaacugcuaccuggcgaccgcccuccugacccugcagcagaucgagcucaaguucaacccccccgcccugcaggacgccuacuaccgcgcgcgggccggggaggccgccaacuucugcgcccugauccucgcguacugcaacaagacggugggcgagcugggcgacguccgcgagaccaugagcuaccuguuccagcacgccaaccucgacuccugcaagcgggugcugaacgucgugugcaagaccugcgggcagcagcagaccacccugaagggcguggaggccgucauguacauggggacgcucagcuacgagcaguucaagaagggcgugcagaucccgugcaccugcgggaagcaggccaccaaguaccuggugcagcaggagucccccuucgucaugaugagcgccccccccgcgcaguacgagcugaagcacggcaccuucacgugcgccuccgaguacaccggcaacuaccagugcgggcacuacaagcacaucaccagcaaggagacccucuacugcaucgacggcgcccugcugacgaagagcuccgaguacaaggggccgaucaccgacguguucuacaaggagaacagcuacaccaccacgaucaagcccgugaccuacaagcucgacggcgucgugugcaccgagaucgaccccaagcuggacaacuacuacaagaaggacaacuccuacuucaccgagcagcccaucgaccuggugccgaaccagcccuaccccaacgccagcuucgacaacuucaaguucgucugcgacaacaucaaguucgccgacgaccucaaccagcugacgggguacaagaagcccgcgucccgcgagcugaaggugaccuucuucccggaccucaacggcgacguggucgccaucgacuacaagcacuacacccccagcuucaagaagggcgccaagcugcugcacaagcccaucguguggcacgugaacaacgccaccaacaaggcgacguacaagcccaacaccuggugcauccggugccucugguccaccaagccggucgagaccagcaacuccuucgacgugcugaagagcgaggacgcccaggggauggacaaccuggccugcgaggaccucaagcccguguccgaggaggucguggagaaccccacgauccagaaggacgugcuggagugcaacgucaagaccaccgagguggugggcgacaucauccugaagcccgccaacaacagccucaagaucaccgaggaggucgggcacacggaccugauggccgcguacguggacaacuccagccugaccaucaagaagccgaacgagcucucccgcgugcugggccugaagacccucgccacccacgggcuggccgccgucaacagcgugcccugggacacgaucgccaacuacgcgaagcccuuccugaacaagguggucuccaccaccaccaacaucgugacgcgcugccucaaccgggugugcaccaacuacaugccguacuucuucacccugcugcuccagcugugcaccuucacccgcagcacgaacucccggaucaaggccagcaugcccaccaccaucgccaagaacaccgucaagagcgugggcaaguucugccuggaggccuccuucaacuaccucaagagccccaacuucuccaagcugaucaacaucaucaucugguuccugcuccugagcgugugccugggcucccucaucuacagcacggccgcgcuggggguccugauguccaaccucggcaugcccagcuacugcaccggguaccgcgagggcuaccugaacuccaccaacgugaccaucgccacguacugcaccggcagcaucccgugcuccgugugccugagcgggcucgacucccuggacaccuaccccagccuggagaccauccagaucacgaucuccagcuucaagugggaccucaccgccuucggccuggucgccgagugguuccuggccuacauccucuucacccgguucuucuacgugcuggggcuggcggccaucaugcagcucuucuucuccuacuucgccgugcacuucaucagcaacuccuggcugauguggcugaucaucaaccugguccagauggcccccaucagcgcgauggugcgcauguacaucuucuucgccagcuucuacuacguguggaaguccuacguccacgugguggacggcugcaacagcuccaccugcaugaugugcuacaagcggaaccgcgccacgcgggucgagugcaccaccaucgugaacgggguccgccggagcuucuacguguacgccaacggcggcaagggguucugcaagcuccacaacuggaacugcgugaacugcgacaccuucugcgccggcuccacguucaucagcgacgaggucgcgcgcgaccugucccugcaguucaagcggcccaucaacccgaccgaccagagcuccuacaucguggacagcgugaccgucaagaacggguccauccaccucuacuucgacaaggccggccagaagaccuacgagcgccacagccugucccacuucgugaaccuggacaaccuccgggccaacaacacgaaggggagccugcccaucaacgugaucgucuucgacggcaaguccaagugcgaggagagcuccgccaagagcgccuccguguacuacagccagcugaugugccagcccauccuccugcuggaccaggcgcucgugagcgacgucggcgacuccgccgagguggccgugaagauguucgacgccuacgucaacaccuucagcuccaccuucaacgugcccauggagaagcugaagacccugguggccacggcggaggccgagcucgccaagaacgucagccuggacaacgugcuguccaccuucaucagcgccgcgcgccagggguucguggacuccgacgucgagaccaaggacgugguggagugccucaagcugagccaccaguccgacaucgaggucaccggcgacagcugcaacaacuacaugcugacguacaacaagguggagaacaugaccccgcgggaccucggggccugcaucgacugcuccgcccgccacaucaacgcccagguggccaagagccacaacaucgcgcugaucuggaacgucaaggacuucaugucccugagcgagcagcuccggaagcagauccgcuccgccgccaagaagaacaaccugcccuucaagcugaccugcgccaccacgcgccagguggugaacgucgugaccaccaagaucgcccucaagggcggguga

SEQ ID NO: 17624 - RNA, 5841 nt, Artificial Sequence
  SARS-CoV-2__MT919999.1__non-structural protein 3 (NSP3) CDS gc
auggcccccaccaaggugaccuucggcgacgacacggucaucgaggugcagggguacaagagcgugaacaucaccuucgagcuggacgagcgcaucgacaagguccucaacgagaagugcuccgccuacaccguggagcugggcaccgaggugaacgaguucgcgugcgucguggccgacgccgugaucaagacgcugcagccggucagcgagcuccugaccccccuggggaucgaccucgacgagugguccauggccaccuacuaccuguucgacgagagcggcgaguucaagcuggccucccacauguacugcagcuucuacccccccgacgaggacgaggaggagggggacugcgaggaggaggaguucgagccguccacccaguacgaguacggcacggaggacgacuaccagggcaagccccucgaguucggggcgaccagcgccgcccugcagcuggaggaggagcaggaggaggacuggcucgacgacgacucccagcagaccgugggccagcaggacgggagcgaggacaaccagaccacgaccauccagaccaucguggagguccagccccagcuggagauggagcugacccccguggugcagacgaucgaggucaacuccuucagcggcuaccucaagcugaccgacaacguguacaucaagaacgccgacaucguggaggaggcgaagaaggucaagccgaccgugguggucaacgccgccaacguguaccugaagcacgggggcggcguggccggggcccucaacaaggcgaccaacaacgccaugcaggucgaguccgacgacuacaucgccacgaacggcccccugaagguggggggcagcugcguccuguccggccacaaccucgccaagcacugccugcacgugguggggcccaacgucaacaagggcgaggacauccagcugcucaagagcgccuacgagaacuucaaccagcacgaggugcugcuggcgccccuccuguccgccgggaucuucggcgccgacccgauccacagccugcgggugugcgucgacaccgugcgcaccaacguguaccucgccgucuucgacaagaaccuguacgacaagcugguguccagcuuccucgagaugaagagcgagaagcagguggagcagaagaucgccgagauccccaaggaggaggucaagcccuucaucaccgaguccaagcccagcguggagcagcggaagcaggacgacaagaagaucaaggcgugcguggaggaggucacgaccacccuggaggagaccaaguuccugacggagaaccuccugcuguacaucgacaucaacgggaaccuccacccggacuccgccacccuggugagcgacaucgacaucaccuuccugaagaaggacgcccccuacaucgugggcgacgucgugcaggagggcgugcucaccgccgucgugauccccacgaagaaggccgggggcaccaccgagaugcuggcgaaggcccugcgcaaggugcccaccgacaacuacaucacgaccuacccggggcagggccucaacggguacaccgucgaggaggccaagaccgugcugaagaagugcaaguccgccuucuacauccugcccagcaucaucuccaacgagaagcaggagauccucggcaccgugagcuggaaccugcgggagaugcuggcgcacgccgaggagacgcgcaagcugaugcccgucugcguggagaccaaggccaucguguccaccauccagcggaaguacaagggcaucaagauccaggagggggucguggacuacggcgcccgcuucuacuucuacaccagcaagacgaccguggccucccucaucaacacccugaacgaccugaacgagacccucgucacgaugccccugggguacgugacccacggccugaaccucgaggaggcggcccgguacaugcgcagccugaaggugccggccaccgucuccgugagcucccccgacgccgugaccgccuacaacggguaccugacgagcuccagcaagacccccgaggagcacuucaucgagaccaucucccucgcgggcagcuacaaggacuggagcuacuccggccagagcacccagcuggggaucgaguuccugaagcggggcgacaaguccgucuacuacacgagcaaccccaccaccuuccaccucgacggggaggugaucaccuucgacaaccugaagacgcugcucucccugcgcgaggugcggaccaucaaggucuucaccaccguggacaacaucaaccugcacacgcagguggucgacaugagcaugaccuacggccagcaguucggcccgaccuaccucgacggggccgacgugaccaagaucaagccccacaacucccacgagggcaagacguucuacgugcugcccaacgacgacacccugcgcgucgaggccuucgaguacuaccacaccaccgacccgagcuuccucgggcgguacauguccgcccugaaccacacgaagaaguggaaguacccccaggugaacggccugaccagcaucaagugggccgacaacaacugcuaccucgcgaccgcccugcugacccuccagcagaucgagcugaaguucaacccccccgcccugcaggacgccuacuaccgcgcgcgggccggggaggccgccaacuucugcgcccucauccuggcguacugcaacaagacggugggcgagcugggcgacguccgcgagaccauguccuaccucuuccagcacgccaaccuggacagcugcaagcgggugcugaacgucgugugcaagaccugcgggcagcagcagaccacccucaagggcguggaggccgucauguacauggggacgcuguccuacgagcaguucaagaagggcgugcagaucccgugcaccugcgggaagcaggccaccaaguaccuggugcagcaggagagccccuucgucaugauguccgccccccccgcgcaguacgagcucaagcacggcaccuucacgugcgccagcgaguacaccggcaacuaccagugcgggcacuacaagcacaucaccuccaaggagacccuguacugcaucgacggcgcccugcucacgaagagcagcgaguacaaggggccgaucaccgacguguucuacaaggagaacuccuacaccaccacgaucaagcccgugaccuacaagcuggacggcgucgugugcaccgagaucgaccccaagcuggacaacuacuacaagaaggacaacagcuacuucaccgagcagcccaucgaccucgugccgaaccagcccuaccccaacgccuccuucgacaacuucaaguucgucugcgacaacaucaaguucgccgacgaccugaaccagcugacgggguacaagaagcccgcgagccgcgagcucaaggugaccuucuucccggaccugaacggcgacguggucgccaucgacuacaagcacuacacccccuccuucaagaagggcgccaagcugcuccacaagcccaucguguggcacgugaacaacgccaccaacaaggcgacguacaagcccaacaccuggugcauccggugccuguggagcaccaagccggucgagaccuccaacagcuucgacgugcugaaguccgaggacgcccaggggauggacaaccucgccugcgaggaccugaagcccgugagcgaggaggucguggagaaccccacgauccagaaggacgugcuggagugcaacgucaagaccaccgagguggugggcgacaucauccucaagcccgccaacaacucccugaagaucaccgaggaggucgggcacacggaccugauggccgcguacguggacaacagcucccucaccaucaagaagccgaacgagcugagccgcgugcugggccucaagacccuggccacccacgggcuggccgccgucaacuccgugcccugggacacgaucgccaacuacgcgaagcccuuccucaacaagguggucagcaccaccaccaacaucgugacgcgcugccugaaccgggugugcaccaacuacaugccguacuucuucacccugcuccugcagcugugcaccuucacccgcuccacgaacagccggaucaaggccuccaugcccaccaccaucgccaagaacaccgucaagagcgugggcaaguucugccucgaggccagcuucaacuaccugaagucccccaacuucagcaagcugaucaacaucaucaucugguuccuccugcuguccgugugccucggcagccugaucuacuccacggccgcgcuggggguccucaugagcaaccugggcaugcccuccuacugcaccggguaccgcgagggcuaccugaacagcaccaacgugaccaucgccacguacugcaccggcuccaucccgugcagcgugugccucuccgggcuggacagccuggacaccuaccccucccucgagaccauccagaucacgaucagcuccuucaagugggaccugaccgccuucggccuggucgccgagugguuccucgccuacauccuguucacccgguucuucuacgugcuggggcucgcggccaucaugcagcuguucuucagcuacuucgccgugcacuucaucuccaacagcuggcugauguggcugaucaucaaccucguccagauggcccccaucuccgcgauggugcgcauguacaucuucuucgccagcuucuacuacguguggaagagcuacguccacgugguggacggcugcaacuccagcaccugcaugaugugcuacaagcggaaccgcgccacgcgggucgagugcaccaccaucgugaacgggguccgccgguccuucuacguguacgccaacggcggcaagggguucugcaagcugcacaacuggaacugcgugaacugcgacaccuucugcgccggcagcacguucaucuccgacgaggucgcgcgcgaccugagccuccaguucaagcggcccaucaacccgaccgaccaguccagcuacaucguggacuccgugaccgucaagaacgggagcauccaccuguacuucgacaaggccggccagaagaccuacgagcgccacucccugagccacuucgugaaccucgacaaccugcgggccaacaacacgaaggggucccugcccaucaacgugaucgucuucgacggcaagagcaagugcgaggaguccagcgccaaguccgccagcguguacuacucccagcucaugugccagcccauccugcugcucgaccaggcgcuggugagcgacgucggcgacagcgccgagguggccgugaagauguucgacgccuacgucaacaccuucuccagcaccuucaacgugcccauggagaagcugaagacccucguggccacggcggaggccgagcuggccaagaacgucucccuggacaacgugcucagcaccuucaucuccgccgcgcgccagggguucguggacagcgacgucgagaccaaggacgugguggagugccugaagcugucccaccagagcgacaucgaggucaccggcgacuccugcaacaacuacaugcucacguacaacaagguggagaacaugaccccgcgggaccugggggccugcaucgacugcagcgcccgccacaucaacgcccagguggccaagucccacaacaucgcgcugaucuggaacgucaaggacuucaugagccucuccgagcagcugcggaagcagauccgcagcgccgccaagaagaacaaccugcccuucaagcucaccugcgccaccacgcgccagguggugaacgucgugaccaccaagaucgcccugaagggcggguga

SEQ ID NO: 17625 - RNA, 5841 nt, Artificial Sequence
  SARS-CoV-2__MT920003.1__non-structural protein 3 (NSP3) CDS gc
auggcccccaccaaggugaccuucggcgacgacacggucaucgaggugcagggguacaagagcgugaacaucaccuucgagcuggacgagcgcaucgacaagguccucaacgagaagugcuccgccuacaccguggagcugggcaccgaggugaacgaguucgcgugcgucguggccgacgccgugaucaagacgcugcagccggucagcgagcuccugaccccccuggggaucgaccucgacgagugguccauggccaccuacuaccuguucgacgagagcggcgaguucaagcuggccucccacauguacugcagcuucuacccccccgacgaggacgaggaggagggggacugcgaggaggaggaguucgagccguccacccaguacgaguacggcacggaggacgacuaccagggcaagccccucgaguucggggcgaccagcgccgcccugcagcccgaggaggagcaggaggaggacuggcuggacgacgacucccagcagaccgugggccagcaggacgggagcgaggacaaccagaccacgaccauccagaccaucguggagguccagccccagcucgagauggagcugaccccgguggugcagacgaucgaggucaacuccuucagcggcuaccugaagcucaccgacaacguguacaucaagaacgccgacaucguggaggaggcgaagaaggucaagcccaccgugguggucaacgccgccaacguguaccugaagcacgggggcggcguggccggggcccugaacaaggcgaccaacaacgccaugcaggucgaguccgacgacuacaucgccacgaacggcccccucaagguggggggcagcugcguccuguccggccacaaccuggccaagcacugccuccacgugguggggcccaacgucaacaagggcgaggacauccagcugcugaagagcgccuacgagaacuucaaccagcacgaggugcuccuggcgccgcugcucuccgccgggaucuucggcgccgaccccauccacagccugcgggugugcgucgacaccgugcgcaccaacguguaccuggccgucuucgacaagaaccucuacgacaagcugguguccagcuuccuggagaugaagagcgagaagcagguggagcagaagaucgccgagauccccaaggaggaggucaagcccuucaucaccgaguccaagccgagcguggagcagcggaagcaggacgacaagaagaucaaggcgugcguggaggaggucacgaccacccucgaggagaccaaguuccugacggagaaccugcuccuguacaucgacaucaacgggaaccugcaccccgacuccgccacccucgugagcgacaucgacaucaccuuccugaagaaggacgcccccuacaucgugggcgacgucgugcaggagggcgugcugaccgccgucgugauccccacgaagaaggccgggggcaccaccgagaugcucgcgaaggcccugcgcaaggugccgaccgacaacuacaucacgaccuaccccgggcagggccugaacggguacaccgucgaggaggccaagaccgugcucaagaagugcaaguccgccuucuacauccugcccagcaucaucuccaacgagaagcaggagauccugggcaccgugagcuggaaccuccgggagaugcuggcgcacgccgaggagacgcgcaagcugaugcccgucugcguggagaccaaggccaucguguccaccauccagcggaaguacaagggcaucaagauccaggagggggucguggacuacggcgcccgcuucuacuucuacaccagcaagacgaccguggccucccugaucaacacccucaacgaccugaacgagacccuggucacgaugccgcucggguacgugacccacggccugaaccuggaggaggcggcccgguacaugcgcagccucaaggugcccgccaccgucuccgugagcucccccgacgccgugaccgccuacaacggguaccugacgagcuccagcaagacccccgaggagcacuucaucgagaccaucucccuggcgggcagcuacaaggacuggagcuacuccggccagagcacccagcucgggaucgaguuccugaagcggggcgacaaguccgucuacuacacgagcaacccgaccaccuuccaccuggacggggaggugaucaccuucgacaaccucaagacgcugcugucccuccgcgaggugcggaccaucaaggucuucaccaccguggacaacaucaaccugcacacgcagguggucgacaugagcaugaccuacggccagcaguucggccccaccuaccuggacggggccgacgugaccaagaucaagccccacaacucccacgagggcaagacguucuacgugcucccgaacgacgacacccugcgcgucgaggccuucgaguacuaccacaccaccgaccccagcuuccuggggcgguacauguccgcccucaaccacacgaagaaguggaaguacccccaggugaacggccugaccagcaucaagugggccgacaacaacugcuaccuggcgaccgcccuccugacccugcagcagaucgagcucaaguucaaccccccggcccugcaggacgccuacuaccgcgcgcgggccggggaggccgccaacuucugcgcccugauccucgcguacugcaacaagacggugggcgagcugggcgacguccgcgagaccauguccuaccuguuccagcacgccaaccucgacagcugcaagcgggugcugaacgucgugugcaagaccugcgggcagcagcagaccacccugaagggcguggaggccgucauguacauggggacgcucuccuacgagcaguucaagaagggcgugcagauccccugcaccugcgggaagcaggccaccaaguaccuggugcagcaggagagccccuucgucaugauguccgcccccccggcgcaguacgagcugaagcacggcaccuucacgugcgccagcgaguacaccggcaacuaccagugcgggcacuacaagcacaucaccuccaaggagacccucuacugcaucgacggcacgcugcugaccaagagcagcgaguacaaggggcccaucaccgacguguucuacaaggagaacuccuacaccacgaccaucaagcccgugaccuacaagcucgacggcgucgugugcaccgagaucgaccccaagcuggacaacuacuacaagaaggacaacagcuacuucacggagcagccgaucgaccuggugcccaaccagcccuaccccaacgccuccuucgacaacuucaaguucgucugcgacaacaucaaguucgccgacgaccucaaccagcugaccggguacaagaagccggccagccgcgagcugaaggugaccuucuuccccgaccucaacggcgacguggucgcgaucgacuacaagcacuacacccccuccuucaagaagggcgccaagcugcugcacaagcccaucguguggcacgugaacaacgccacgaacaaggccaccuacaagccgaacaccuggugcauccggugccucuggagcaccaagcccgucgagacguccaacagcuucgacgugcugaaguccgaggacgcgcaggggauggacaaccuggccugcgaggaccucaagcccgugagcgaggaggucguggagaaccccaccauccagaaggacgugcuggagugcaacgucaagaccaccgagguggugggcgacaucauccugaagccggccaacaacucccucaagaucacggaggaggucgggcacaccgaccugauggccgccuacguggacaacagcucccugaccaucaagaagcccaacgagcucagccgcgugcugggccugaagacccucgcgacgcacgggcuggccgccgucaacuccgugcccugggacaccaucgccaacuacgccaagccguuccugaacaagguggucagcaccaccacgaacaucgugacccgcugccucaaccgggugugcaccaacuacaugcccuacuucuucacccugcugcuccagcugugcaccuucacgcgcuccaccaacagccggaucaaggcguccaugcccaccaccaucgccaagaacacggucaagagcgugggcaaguucugccuggaggccagcuucaacuaccucaagucccccaacuucagcaagcugaucaacaucaucaucugguuccugcuccuguccgugugccugggcagccucaucuacuccaccgccgcccuggggguccugaugagcaaccucggcaugccguccuacugcaccggguaccgcgagggcuaccugaacagcaccaacgugacgaucgcgaccuacugcaccggcuccauccccugcagcgugugccuguccgggcucgacagccuggacaccuaccccucccuggagacgauccagaucaccaucagcuccuucaagugggaccucaccgccuucggccuggucgccgagugguuccuggccuacauccucuucacccgguucuucuacgugcuggggcuggccgcgaucaugcagcucuucuucagcuacuucgccgugcacuucaucuccaacagcuggcugauguggcugaucaucaaccugguccagauggcccccaucuccgccauggugcgcauguacaucuucuucgcgagcuucuacuacguguggaagagcuacguccacgugguggacggcugcaacuccagcacgugcaugaugugcuacaagcggaaccgcgccacccgggucgagugcaccaccaucgugaacgggguccgccgguccuucuacguguacgccaacggcggcaagggguucugcaagcuccacaacuggaacugcgugaacugcgacacguucugcgccggcagcaccuucaucuccgacgaggucgcccgcgaccugagccugcaguucaagcggccgaucaaccccaccgaccaguccagcuacaucguggacuccgugaccgucaagaacgggagcauccaccucuacuucgacaaggcgggccagaagacguacgagcgccacucccugagccacuucgugaaccuggacaaccuccgggccaacaacaccaaggggucccugcccaucaacgugaucgucuucgacggcaagagcaagugcgaggaguccagcgccaaguccgccagcguguacuacucccagcugaugugccagcccauccuccugcuggaccaggcccucgugagcgacgucggcgacagcgcggagguggccgugaagauguucgacgccuacgucaacaccuucuccagcaccuucaacgugccgauggagaagcugaagacgcugguggccaccgccgaggcggagcucgccaagaacgucucccuggacaacgugcugagcaccuucaucuccgccgcccgccagggguucguggacagcgacgucgagaccaaggacgugguggagugccucaagcugucccaccagagcgacaucgaggucacgggcgacuccugcaacaacuacaugcugaccuacaacaagguggagaacaugaccccccgggaccucggggcgugcaucgacugcagcgcccgccacaucaacgcccagguggccaagucccacaacaucgcccugaucuggaacgucaaggacuucaugagccuguccgagcagcuccggaagcagauccgcagcgcggccaagaagaacaaccugcccuucaagcugaccugcgccacgacccgccagguggugaacgucgugaccaccaagaucgcccucaagggcggguga

SEQ ID NO: 17626 - RNA, 5841 nt, Artificial Sequence
  SARS-CoV-2__MT920013.1__non-structural protein 3 (NSP3) CDS gc
auggcccccaccaaggugaccuucggcgacgacacggucaucgaggugcagggguacaagagcgugaacaucaccuucgagcuggacgagcgcaucgacaagguccucaacgagaagugcuccgccuacaccguggagcugggcaccgaggugaacgaguucgcgugcgucguggccgacgccgugaucaagacgcugcagccggucagcgagcuccugaccccccuggggaucgaccucgacgagugguccauggccaccuacuaccuguucgacgagagcggcgaguucaagcuggccucccacauguacugcagcuucuacccccccgacgaggacgaggaggagggggacugcgaggaggaggaguucgagccguccacccaguacgaguacggcacggaggacgacuaccagggcaagccccucgaguucggggcgaccagcgccgcccugcagcccgaggaggagcaggaggaggacuggcuggacgacgacucccagcagaccgugggccagcaggacgggagcgaggacaaccagaccacgaccauccagaccaucguggagguccagccccagcucgagauggagcugaccccgguggugcagacgaucgaggucaacuccuucagcggcuaccugaagcucaccgacaacguguacaucaagaacgccgacaucguggaggaggcgaagaaggucaagcccaccgugguggucaacgccgccaacguguaccugaagcacgggggcggcguggccggggcccugaacaaggcgaccaacaacgccaugcaggucgaguccgacgacuacaucgccacgaacggcccccucaagguggggggcagcugcguccuguccggccacaaccuggccaagcacugccuccacgugguggggcccaacgucaacaagggcgaggacauccagcugcugaagagcgccuacgagaacuucaaccagcacgaggugcuccuggcgccgcugcucuccgccgggaucuucggcgccgaccccauccacagccugcgggugugcgucgacaccgugcgcaccaacguguaccuggccgucuucgacaagaaccucuacgacaagcugguguccagcuuccuggagaugaagagcgagaagcagguggagcagaagaucgccgagauccccaaggaggaggucaagcccuucaucaccgaguccaagccgagcguggagcagcggaagcaggacgacaagaagaucaaggcgugcguggaggaggucacgaccacccucgaggagaccaaguuccugacggagaaccugcuccuguacaucgacaucaacgggaaccugcaccccgacuccgccacccucgugagcgacaucgacaucaccuuccugaagaaggacgcccccuacaucgugggcgacgucgugcaggagggcgugcugaccgccgucgugauccccacgaagaaggccgggggcaccaccgagaugcucgcgaaggcccugcgcaaggugccgaccgacaacuacaucacgaccuaccccgggcagggccugaacggguacaccgucgaggaggccaagaccgugcucaagaagugcaaguccgccuucuacauccugcccagcaucaucuccaacgagaagcaggagauccugggcaccgugagcuggaaccuccgggagaugcuggcgcacgccgaggagacgcgcaagcugaugcccgucugcguggagaccaaggccaucguguccaccauccagcggaaguacaagggcaucaagauccaggagggggucguggacuacggcgcccgcuucuacuucuacaccagcaagacgaccguggccucccugaucaacacccucaacgaccugaacgagacccuggucacgaugccgcucggguacgugacccacggccugaaccuggaggaggcggcccgguacaugcgcagccucaaggugcccgccaccgucuccgugagcucccccgacgccgugaccgccuacaacggguaccugacgagcuccagcaagacccccgaggagcacuucaucgagaccaucucccuggcgggcagcuacaaggacuggagcuacuccggccagagcacccagcucgggaucgaguuccugaagcggggcgacaaguccgucuacuacacgagcaacccgaccaccuuccaccuggacggggaggugaucaccuucgacaaccucaagacgcugcugucccuccgcgaggugcggaccaucaaggucuucaccaccguggacaacaucaaccugcacacgcagguggucgacaugagcaugaccuacggccagcaguucggccccaccuaccuggacggggccgacgugaccaagaucaagccccacaacucccacgagggcaagacguucuacgugcucccgaacgacgacacccugcgcgucgaggccuucgaguacuaccacaccaccgacagcuccuuccuggggcgguacaugagcgcccucaaccacacgaagaaguggaaguacccccaggugaacggccugaccuccaucaagugggccgacaacaacugcuaccuggcgaccgcccuccugacccugcagcagaucgagcucaaguucaacccccccgcccugcaggacgccuacuaccgcgcgcgggccggggaggccgccaacuucugcgcccugauccucgcguacugcaacaagacggugggcgagcugggcgacguccgcgagaccaugagcuaccuguuccagcacgccaaccucgacuccugcaagcgggugcugaacgucgugugcaagaccugcgggcagcagcagaccacccugaagggcguggaggccgucauguacauggggacgcucagcuacgagcaguucaagaagggcgugcagaucccgugcaccugcgggaagcaggccaccaaguaccuggugcagcaggagucccccuucgucaugaugagcgccccccccgcgcaguacgagcugaagcacggcaccuucacgugcgccuccgaguacaccggcaacuaccagugcgggcacuacaagcacaucaccagcaaggagacccucuacugcaucgacggcgcccugcugacgaagagcuccgaguacaaggggccgaucaccgacguguucuacaaggagaacagcuacaccaccacgaucaagcccgugaccuacaagcucgacggcgucgugugcaccgagaucgaccccaagcuggacaacuacuacaagaaggacaacuccuacuucaccgagcagcccaucgaccuggugccgaaccagcccuaccccaacgccagcuucgacaacuucaaguucgucugcgacaacaucaaguucgccgacgaccucaaccagcugacgggguacaagaagcccgcgucccgcgagcugaaggugaccuucuucccggaccucaacggcgacguggucgccaucgacuacaagcacuacacccccagcuucaagaagggcgccaagcugcugcacaagcccaucguguggcacgugaacaacgccaccaacaaggcgacguacaagcccaacaccuggugcauccggugccucugguccaccaagccggucgagaccagcaacuccuucgacgugcugaagagcgaggacgcccaggggauggacaaccuggccugcgaggaccucaagcccguguccgaggaggucguggagaaccccacgauccagaaggacgugcuggagugcaacgucaagaccaccgagguggugggcgacaucauccugaagcccgccaacaacagccucaagaucaccgaggaggucgggcacacggaccugauggccgcguacguggacaacuccagccugaccaucaagaagccgaacgagcucucccgcgugcugggccugaagacccucgccacccacgggcuggccgccgucaacagcgugcccugggacacgaucgccaacuacgcgaagcccuuccugaacaagguggucuccaccaccaccaacaucgugacgcgcugccucaaccgggugugcaccaacuacaugccguacuucuucacccugcugcuccagcugugcaccuucacccgcagcacgaacucccggaucaaggccagcaugcccaccaccaucgccaagaacaccgucaagagcgugggcaaguucugccuggaggccuccuucaacuaccucaagagccccaacuucuccaagcugaucaacaucaucaucugguuccugcuccugagcgugugccugggcucccucaucuacagcacggccgcgcuggggguccugauguccaaccucggcaugcccagcuacugcaccggguaccgcgagggcuaccugaacuccaccaacgugaccaucgccacguacugcaccggcagcaucccgugcuccgugugccugagcgggcucgacucccuggacaccuaccccagccuggagaccauccagaucacgaucuccagcuucaagugggaccucaccgccuucggccuggucgccgagugguuccuggccuacauccucuucacccgguucuucuacgugcuggggcuggcggccaucaugcagcucuucuucuccuacuucgccgugcacuucaucagcaacuccuggcugauguggcugaucaucaaccugguccagauggcccccaucagcgcgauggugcgcauguacaucuucuucgccagcuucuacuacguguggaaguccuacguccacgugguggacggcugcaacagcuccaccugcaugaugugcuacaagcggaaccgcgccacgcgggucgagugcaccaccaucgugaacgggguccgccggagcuucuacguguacgccaacggcggcaagggguucugcaagcuccacaacuggaacugcgugaacugcgacaccuucugcgccggcuccacguucaucagcgacgaggucgcgcgcgaccugucccugcaguucaagcggcccaucaacccgaccgaccagagcuccuacaucguggacagcgugaccgucaagaacggguccauccaccucuacuucgacaaggccggccagaagaccuacgagcgccacagccugucccacuucgugaaccuggacaaccuccgggccaacaacacgaaggggagccugcccaucaacgugaucgucuucgacggcaaguccaagugcgaggagagcuccgccaagagcgccuccguguacuacagccagcugaugugccagcccauccuccugcuggaccaggcgcucgugagcgacgucggcgacuccgccgagguggccgugaagauguucgacgccuacgucaacaccuucagcuccaccuucaacgugcccauggagaagcugaagacccugguggccacggcggaggccgagcucgccaagaacgucagccuggacaacgugcuguccaccuucaucagcgccgcgcgccagggguucguggacuccgacgucgagaccaaggacgugguggagugccucaagcugagccaccaguccgacaucgaggucaccggcgacagcugcaacaacuacaugcugacguacaacaagguggagaacaugaccccgcgggaccucggggccugcaucgacugcuccgcccgccacaucaacgcccagguggccaagagccacaacaucgcgcugaucuggaacgucaaggacuucaugucccugagcgagcagcuccggaagcagauccgcuccgccgccaagaagaacaaccugcccuucaagcugaccugcgccaccacgcgccagguggugaacgucgugaccaccaagaucgcccucaagggcggguga

SEQ ID NO: 17627 - RNA, 5841 nt, Artificial Sequence
  SARS-CoV-2__MT920018.1__non-structural protein 3 (NSP3) CDS gc
auggcccccaccaaggugaccuucggcgacgacacggucaucgaggugcagggguacaagagcgugaacaucaccuucgagcuggacgagcgcaucgacaagguccucaacgagaagugcuccgccuacaccguggagcugggcaccgaggugaacgaguucgcgugcgucguggccgacgccgugaucaagacgcugcagccggucagcgagcuccugaccccccuggggaucgaccucgacgagugguccauggccaccuacuaccuguucgacgagagcggcgaguucaagcuggccucccacauguacugcagcuucuacccccccgacgaggacgaggaggagggggacugcgaggaggaggaguucgagccguccacccaguacgaguacggcacggaggacgacuaccagggcaagccccucgaguucggggcgaccagcgccgcccugcagcccgaggaggagcaggaggaggacuggcuggacgacgacucccagcagaccgugggccagcaggacgggagcgaggacaaccagaccacgaccauccagaccaucguggagguccagccccagcucgagauggagcugaccccgguggugcagacgaucgaggucaacuccuucagcggcuaccugaagcucaccgacaacguguacaucaagaacgccgacaucguggaggaggcgaagaaggucaagcccaccgugguggucaacgccgccaacguguaccugaagaacgggggcggcguggccggggcccugaacaaggcgaccaacaacgccaugcaggucgaguccgacgacuacaucgccacgaacggcccccucaagguggggggcagcugcguccuguccggccacaaccuggccaagcacugccuccacgugguggggcccaacgucaacaagggcgaggacauccagcugcugaagagcgccuacgagaacuucaaccagcacgaggugcuccuggcgccgcugcucuccgccgggaucuucggcgccgaccccauccacagccugcgggugugcgucgacaccgugcgcaccaacguguaccuggccgucuucgacaagaaccucuacgacaagcugguguccagcuuccuggagaugaagagcgagaagcagguggagcagaagaucgccgagauccccaaggaggaggucaagcccuucaucaccgaguccaagccgagcguggagcagcggaagcaggacgacaagaagaucaaggcgugcguggaggaggucacgaccacccucgaggagaccaaguuccugacggagaaccugcuccuguacaucgacaucaacgggaaccugcaccccgacuccgccacccucgugagcgacaucgacaucaccuuccugaagaaggacgcccccuacaucgugggcgacgucgugcaggagggcgugcugaccgccgucgugauccccacgaagaaggccgggggcaccaccgagaugcucgcgaaggcccugcgcaaggugccgaccgacaacuacaucacgaccuaccccgggcagggccugaacggguacaccgucgaggaggccaagaccgugcucaagaagugcaaguccgccuucuacauccugcccagcaucaucuccaacgagaagcaggagauccugggcaccgugagcuggaaccuccgggagaugcuggcgcacgccgaggagacgcgcaagcugaugcccgucugcguggagaccaaggccaucguguccaccauccagcggaaguacaagggcaucaagauccaggagggggucguggacuacggcgcccgcuucuacuucuacaccagcaagacgaccguggccucccugaucaacacccucaacgaccugaacgagacccuggucacgaugccgcucggguacgugacccacggccugaaccuggaggaggcggcccgguacaugcgcagccucaaggugcccgccaccgucuccgugagcucccccgacgccgugaccgccuacaacggguaccugacgagcuccagcaagacccccgaggagcacuucaucgagaccaucucccuggcgggcagcuacaaggacuggagcuacuccggccagagcacccagcucgggaucgaguuccugaagcggggcgacaaguccgucuacuacacgagcaacccgaccaccuuccaccuggacggggaggugaucaccuucgacaaccucaagacgcugcugucccuccgcgaggugcggaccaucaaggucuucaccaccguggacaacaucaaccugcacacgcagguggucgacaugagcaugaccuacggccagcaguucggccccaccuaccuggacggggccgacgugaccaagaucaagccccacaacucccacgagggcaagacguucuacgugcucccgaacgacgacacccugcgcgucgaggccuucgaguacuaccacaccaccgaccccagcuuccuggggcgguacauguccgcccucaaccacacgaagaaguggaaguacccccaggugaacggccugaccagcaucaagugggccgacaacaacugcuaccuggcgaccgcccuccugacccugcagcagaucgagcucaaguucaaccccccggcccugcaggacgccuacuaccgcgcgcgggccggggaggccgccaacuucugcgcccugauccucgcguacugcaacaagacggugggcgagcugggcgacguccgcgagaccauguccuaccuguuccagcacgccaaccucgacagcugcaagcgggugcugaacgucgugugcaagaccugcgggcagcagcagaccacccugaagggcguggaggccgucauguacauggggacgcucuccuacgagcaguucaagaagggcgugcagauccccugcaccugcgggaagcaggccaccaaguaccuggugcagcaggagagccccuucgucaugauguccgcccccccggcgcaguacgagcugaagcacggcaccuucacgugcgccagcgaguacaccggcaacuaccagugcgggcacuacaagcacaucaccuccaaggagacccucuacugcaucgacggcgcccugcugacgaagagcagcgaguacaaggggcccaucaccgacguguucuacaaggagaacuccuacaccaccacgaucaagcccgugaccuacaagcucgacggcgucgugugcaccgagaucgaccccaagcuggacaacuacuacaagaaggacaacagcuacuucaccgagcagccgaucgaccuggugcccaaccagcccuaccccaacgccuccuucgacaacuucaaguucgucugcgacaacaucaaguucgccgacgaccucaaccagcugacgggguacaagaagccggcgagccgcgagcugaaggugaccuucuuccccgaccucaacggcgacguggucgccaucgacuacaagcacuacacccccuccuucaagaagggcgccaagcugcugcacaagcccaucguguggcacgugaacaacgccaccaacaaggcgacguacaagccgaacaccuggugcauccggugccucuggagcaccaagcccgucgagaccuccaacagcuucgacgugcugaaguccgaggacgcccaggggauggacaaccuggccugcgaggaccucaagcccgugagcgaggaggucguggagaaccccacgauccagaaggacgugcuggagugcaacgucaagaccaccgagguggugggcgacaucauccugaagccggccaacaacucccucaagaucaccgaggaggucgggcacacggaccugauggccgcguacguggacaacagcucccugaccaucaagaagcccaacgagcucagccgcgugcugggccugaagacccucgccacccacgggcuggccgccgucaacuccgugcccugggacacgaucgccaacuacgcgaagccguuccugaacaagguggucagcaccaccaccaacaucgugacgcgcugccucaaccgggugugcaccaacuacaugcccuacuucuucacccugcugcuccagcugugcaccuucacccgcuccacgaacagccggaucaaggccuccaugcccaccaccaucgccaagaacaccgucaagagcgugggcaaguucugccuggaggccagcuucaacuaccucaagucccccaacuucagcaagcugaucaacaucaucaucugguuccugcuccuguccgugugccugggcagccucaucuacuccacggccgcgcuggggguccugaugagcaaccucggcaugccguccuacugcaccggguaccgcgagggcuaccugaacagcaccaacgugaccaucgccacguacugcaccggcuccauccccugcagcgugugccuguccgggcucgacagccuggacaccuaccccucccuggagaccauccagaucacgaucagcuccuucaagugggaccucaccgccuucggccuggucgccgagugguuccuggccuacauccucuucacccgguucuucuacgugcuggggcuggcggccaucaugcagcucuucuucagcuacuucgccgugcacuucaucuccaacagcuggcugauguggcugaucaucaaccugguccagauggcccccaucuccgcgauggugcgcauguacaucuucuucgccagcuucuacuacguguggaagagcuacguccacgugguggacggcugcaacuccagcaccugcaugaugugcuacaagcggaaccgcgccacgcgggucgagugcaccaccaucgugaacgggguccgccgguccuucuacguguacgccaacggcggcaagggguucugcaagcuccacaacuggaacugcgugaacugcgacaccuucugcgccggcagcacguucaucuccgacgaggucgcgcgcgaccugagccugcaguucaagcggccgaucaaccccaccgaccaguccagcuacaucguggacuccgugaccgucaagaacgggagcauccaccucuacuucgacaaggccggccagaagaccuacgagcgccacucccugagccacuucgugaaccuggacaaccuccgggccaacaacacgaaggggucccugcccaucaacgugaucgucuucgacggcaagagcaagugcgaggaguccagcgccaaguccgccagcguguacuacucccagcugaugugccagcccauccuccugcuggaccaggcgcucgugagcgacgucggcgacagcgccgagguggccgugaagauguucgacgccuacgucaacaccuucuccagcaccuucaacgugccgauggagaagcugaagacccugguggccacggcggaggccgagcucgccaagaacgucucccuggacaacgugcugagcaccuucaucuccgccgcgcgccagggguucguggacagcgacgucgagaccaaggacgugguggagugccucaagcugucccaccagagcgacaucgaggucaccggcgacuccugcaacaacuacaugcugacguacaacaagguggagaacaugaccccccgggaccucggggccugcaucgacugcagcgcccgccacaucaacgcccagguggccaagucccacaacaucgcgcugaucuggaacgucaaggacuucaugagccuguccgagcagcuccggaagcagauccgcagcgccgccaagaagaacaaccugcccuucaagcugaccugcgccaccacgcgccagguggugaacgucgugaccaccaagaucgcccucaagggcggguga

SEQ ID NO: 17628 - RNA, 5841 nt, Artificial Sequence
  SARS-CoV-2__MT920036.1__non-structural protein 3 (NSP3) CDS gc
auggcccccaccaaggugaccuucggcgacgacacggucaucgaggugcagggguacaagagcgugaacaucaccuucgagcuggacgagcgcaucgacaagguccucaacgagaagugcuccgccuacaccguggagcugggcaccgaggugaacgaguucgcgugcgucguggccgacgccgugaucaagacgcugcagccggucagcgagcuccugaccccccuggggaucgaccucgacgagugguccauggccaccuacuaccuguucgacgagagcggcgaguucaagcuggccucccacauguacugcagcuucuacccccccgacgaggacgaggaggagggggacugcgaggaggaggaguucgagccguccacccaguacgaguacggcacggaggacgacuaccagggcaagccccucgaguucggggcgaccagcgccgcccugcagcccgaggaggagcaggaggaggacuggcuggacgacgacucccagcagaccgugggccagcaggacgggagcgaggacaaccagaccacgaccauccagaccaucguggagguccagccccagcucgagauggagcugaccccgguggugcagacgaucgaggucaacuccuucagcggcuaccugaagcucaccgacaacguguacaucaagaacgccgacaucguggaggaggcgaagaaggucaagcccaccgugguggucaacgccgccaacguguaccugaagcacgggggcggcguggccggggcccugaacaaggcgaccaacaacgccaugcaggucgaguccgacgacuacaucgccacgaacggcccccucaagguggggggcagcugcguccuguccggccacaaccuggccaagcacugccuccacgugguggggcccaacgucaacaagggcgaggacauccagcugcugaagagcgccuacgagaacuucaaccagcacgaggugcuccuggcgccgcugcucuccgccgggaucuucggcgccgaccccauccacagccugcgggugugcgucgacaccgugcgcaccaacguguaccuggccgucuucgacaagaaccucuacgacaagcugguguccagcuuccuggagaugaagagcgagaagcagguggagcagaagaucgccgagauccccaaggaggaggucaagcccuucaucaccgaguccaagccgagcguggagcagcggaagcaggacgacaagaagaucaaggcgugcguggaggaggucacgaccacccucgaggagaccaaguuccugacggagaaccugcuccuguacaucgacaucaacgggaaccugcaccccgacuccgccacccucgugagcgacaucgacaucaccuuccugaagaaggacgcccccuacaucgugggcgacgucgugcaggagggcgugcugaccgccgucgugauccccacgaagaaggccgggggcaccaccgagaugcucgcgaaggcccugcgcaaggugccgaccgacaacuacaucacgaccuaccccgggcagggccugaacggguacaccgucgaggaggccaagaccgugcucaagaagugcaaguccgccuucuacauccugcccagcaucaucuccaacgagaagcaggagauccugggcaccgugagcuggaaccuccgggagaugcuggcgcacgccgaggagacgcgcaagcugaugcccgucugcguggagaccaaggccaucguguccaccauccagcggaaguacaagggcaucaagauccaggagggggucguggacuacggcgcccgcuucuacuucuacaccagcaagacgaccguggccucccugaucaacacccucaacgaccugaacgagacccuggucacgaugccgcucggguacgugacccacggccugaaccuggaggaggcggcccgguacaugcgcagccucaaggugcccgccaccgucuccgugagcucccccgacgccgugaccgccuacaacggguaccugacgagcuccagcaagacccccgaggagcacuucaucgagaccaucucccuggcgggcagcuacaaggacuggagcuacuccggccagagcacccagcucgggaucgaguuccugaagcggggcgacaaguccgucuacuacacgagcaacccgaccaccuuccaccuggacggggaggugaucaccuucgacaaccucaagacgcugcugucccuccgcgaggugcggaccaucaaggucuucaccaccguggacaacaucaaccugcacacgcagguggucgacaugagcaugaccuacggccagcaguucggccccaccuaccuggacggggccgacgugaccaagaucaagccccacaacucccacgagggcaagacguucuacgugcucccgaacgacgacacccugcgcgucgaggccuucgaguacuaccacaccaccgaccccagcuuccuggggcgguacauguccgcccucaaccacacgaagaaguggaaguacccccaggugaacggccugaccagcaucaagugggccgacaacaacugcuaccuggcgaccgcccuccugacccugcagcagaucgagcucaaguucaaccccccggcccugcaggacgccuacuaccgcgcgcgggccggggaggccgccaacuucugcgcccugauccucgcguacugcaacaagacggugggcgagcugggcgacguccgcgagaccauguccuaccuguuccagcacgccaaccucgacagcugcaagcgggugcugaacgucgugugcaagaccugcgggcagcagcagaccacccugaagggcguggaggccgucauguacauggggacgcucuccuacgagcaguucaagaagggcgugcagauccccugcaccugcgggaagcaggccaccaaguaccuggugcagcaggagagccccuucgucaugauguccgcccccccggcgcaguacgagcugaagcacggcaccuucacgugcgccagcgaguacaccggcaacuaccagugcgggcacuacaagcacaucaccuccaaggagacccucuacugcaucgacggcgcccugcugacgaagagcagcgaguacaaggggcccaucaccgacguguucuacaaggagaacuccuacaccaccacgaucaagcccgugaccuacaagcucgacggcgucgugugcaccgagaucgaccccaagcuggacaacuacuacaagaaggacaacagcuacuucaccgagcagccgaucgaccuggugcccaaccagcccuaccccaacgccuccuucgacaacuucaaguucgucugcgacaacaucaaguucgccgacgaccucaaccagcugacgggguacaagaagccggcgcugcgcgagcucaaggugaccuucuuccccgaccugaacggcgacguggucgccaucgacuacaagcacuacacccccagcuucaagaagggcgccaagcugcuccacaagcccaucguguggcacgugaacaacgccaccaacaaggcgacguacaagccgaacaccuggugcauccggugccugugguccaccaagcccgucgagaccagcaacuccuucgacgugcugaagagcgaggacgcccaggggauggacaaccucgccugcgaggaccugaagcccguguccgaggaggucguggagaaccccacgauccagaaggacgugcuggagugcaacgucaagaccaccgagguggugggcgacaucauccucaagccggccaacaacagccugaagaucaccgaggaggucgggcacacggaccugauggccgcguacguggacaacuccagccucaccaucaagaagcccaacgagcugucccgcgugcugggccucaagacccuggccacccacgggcuggccgccgucaacagcgugcccugggacacgaucgccaacuacgcgaagccguuccucaacaagguggucuccaccaccaccaacaucgugacgcgcugccugaaccgggugugcaccaacuacaugcccuacuucuucacccugcuccugcagcugugcaccuucacccgcagcacgaacucccggaucaaggccagcaugcccaccaccaucgccaagaacaccgucaaguccgugggcaaguucugccucgaggccagcuucaacuaccugaagagccccaacuucuccaagcugaucaacaucaucaucugguuccuccugcugagcgugugccucggcucccugaucuacagcacggccgcgcuggggguccucauguccaaccugggcaugccgagcuacugcaccggguaccgcgagggcuaccugaacuccaccaacgugaccaucgccacguacugcaccggcagcauccccugcuccgugugccucagcgggcuggacucccuggacaccuaccccagccucgagaccauccagaucacgaucuccagcuucaagugggaccugaccgccuucggccuggucgccgagugguuccucgccuacauccuguucacccgguucuucuacgugcuggggcucgcggccaucaugcagcuguucuucuccuacuucgccgugcacuucaucagcaacuccuggcugauguggcugaucaucaaccucguccagauggcccccaucagcgcgauggugcgcauguacaucuucuucgccuccuucuacuacguguggaagagcuacguccacgugguggacggcugcaacagcuccaccugcaugaugugcuacaagcggaaccgcgccacgcgggucgagugcaccaccaucgugaacgggguccgccggagcuucuacguguacgccaacggcggcaagggguucugcaagcugcacaacuggaacugcgugaacugcgacaccuucugcgccggcuccacguucaucagcgacgaggucgcgcgcgaccugucccuccaguucaagcggccgaucaaccccaccgaccagagcuccuacaucguggacagcgugaccgucaagaacggguccauccaccuguacuucgacaaggccggccagaagaccuacgagcgccacagccugucccacuucgugaaccucgacaaccugcgggccaacaacacgaaggggagccugcccaucaacgugaucgucuucgacggcaaguccaagugcgaggagagcuccgccaagagcgccuccguguacuacagccagcucaugugccagcccauccugcugcucgaccaggcgcugguguccgacgucggcgacagcgccgagguggccgugaagauguucgacgccuacgucaacaccuucagcuccaccuucaacgugccgauggagaagcugaagacccucguggccacggcggaggccgagcuggccaagaacgucagccuggacaacgugcucuccaccuucaucagcgccgcgcgccagggguucguggacuccgacgucgagaccaaggacgugguggagugccugaagcugagccaccaguccgacaucgaggucaccggcgacagcugcaacaacuacaugcucacguacaacaagguggagaacaugaccccccgggaccugggggccugcaucgacugcuccgcccgccacaucaacgcccagguggccaagagccacaacaucgcgcugaucuggaacgucaaggacuucaugucccucagcgagcagcugcggaagcagauccgcuccgccgccaagaagaacaaccugcccuucaagcucaccugcgccaccacgcgccagguggugaacgucgugaccaccaagaucgcccugaagggcggguga

SEQ ID NO: 17629 - RNA, 5841 nt, Artificial Sequence
  SARS-CoV-2__MT921159.1__non-structural protein 3 (NSP3) CDS gc
auggcccccaccaaggugaccuucggcgacgacacggucaucgaggugcagggguacaagagcgugaacaucaccuucgagcuggacgagcgcaucgacaagguccucaacgagaagugcuccgccuacaccguggagcugggcaccgaggugaacgaguucgcgugcgucguggccgacgccgugaucaagacgcugcagccggucagcgagcuccugaccccccuggggaucgaccucgacgagugguccauggccaccuacuaccuguucgacgagagcggcgaguucaagcuggccucccacauguacugcagcuucuacccccccgacgaggacgaggaggagggggacugcgaggaggaggaguucgagccguccacccaguacgaguacggcacggaggacgacuaccagggcaagccccucgaguucggggcgaccagcgccgcccugcagcccgaggaggagcaggaggaggacuggcuggacgacgacucccagcagaccgugggccagcaggacgggagcgaggacaaccagaccacgaccauccagaccaucguggagguccagccccagcucgagauggagcugaccccgguggugcagacgaucgaggucaacuccuucagcggcuaccugaagcucaccgacaacguguacaucaagaacgccgacaucguggaggaggcgaagaaggucaagcccaccgugguggucaacgccgccaacguguaccugaagcacgggggcggcguggccggggcccugaacaaggcgaccaacaacgccaugcaggucgaguccgacgacuacaucgccacgaacggcccccucaagguggggggcagcugcguccuguccggccacaaccuggccaagcacugccuccacgugguggggcccaacgucaacaagggcgaggacauccagcugcugaagagcgccuacgagaacuucaaccagcacgaggugcuccuggcgccgcugcucuccgccgggaucuucggcgccgaccccauccacagccugcgggugugcgucgacaccgugcgcaccaacguguaccuggccgucuucgacaagaaccucuacgacaagcugguguccagcuuccuggagaccaagagcgagaagcagguggagcagaagaucgccgagauccccaaggaggaggucaagcccuucaucacggaguccaagccgagcguggagcagcggaagcaggacgacaagaagaucaaggcgugcguggaggaggucaccaccacccucgaggagacgaaguuccugaccgagaaccugcuccuguacaucgacaucaacgggaaccugcaccccgacuccgccacccucgugagcgacaucgacaucaccuuccugaagaaggacgcccccuacaucgugggcgacgucgugcaggagggcgugcugacggccgucgugauccccaccaagaaggccgggggcaccaccgagaugcucgcgaaggcccugcgcaaggugccgacggacaacuacaucaccaccuaccccgggcagggccugaacggguacaccgucgaggaggccaagaccgugcucaagaagugcaaguccgccuucuacauccugcccagcaucaucuccaacgagaagcaggagauccugggcacggugagcuggaaccuccgggagaugcuggcgcacgccgaggagacccgcaagcugaugcccgucugcguggagaccaaggccaucguguccaccauccagcggaaguacaagggcaucaagauccaggagggggucguggacuacggcgcccgcuucuacuucuacacgagcaagaccaccguggccucccugaucaacacccucaacgaccugaacgagacgcuggucaccaugccgcucggguacgugacccacggccugaaccuggaggaggcggcccgguacaugcgcagccucaaggugcccgccaccgucuccgugagcucccccgacgccgugacggccuacaacggguaccugaccagcuccagcaagacccccgaggagcacuucaucgagaccaucucccuggcgggcagcuacaaggacuggagcuacuccggccagagcacgcagcucgggaucgaguuccugaagcggggcgacaaguccgucuacuacaccagcaacccgaccaccuuccaccuggacggggaggugaucacguucgacaaccucaagacccugcugucccuccgcgaggugcggaccaucaaggucuucaccacgguggacaacaucaaccugcacacccagguggucgacaugagcaugaccuacggccagcaguucggccccaccuaccuggacggggccgacgugacgaagaucaagccccacaacucccacgagggcaagaccuucuacgugcucccgaacgacgacacccugcgcgucgaggccuucgaguacuaccacaccacggaccccagcuuccuggggcgguacauguccgcccucaaccacaccaagaaguggaaguacccccaggugaacggccugaccagcaucaagugggccgacaacaacugcuaccuggcgaccgcccuccugacgcugcagcagaucgagcucaaguucaaccccccggcccugcaggacgccuacuaccgcgcgcgggccggggaggccgccaacuucugcgcccugauccucgcguacugcaacaagaccgugggcgagcugggcgacguccgcgagaccauguccuaccuguuccagcacgccaaccucgacagcugcaagcgggugcugaacgucgugugcaagaccugcgggcagcagcagaccacgcugaagggcguggaggccgucauguacauggggacccucuccuacgagcaguucaagaagggcgugcagauccccugcaccugcgggaagcaggccaccaaguaccuggugcagcaggagagccccuucgucaugauguccgcccccccggcgcaguacgagcugaagcacggcacguucaccugcgccagcgaguacaccggcaacuaccagugcgggcacuacaagcacaucaccuccaaggagacgcucuacugcaucgacggcgcccugcugaccaagagcagcgaguacaaggggcccaucaccgacguguucuacaaggagaacuccuacaccacgaccaucaagcccgugaccuacaagcucgacggcgucgugugcaccgagaucgaccccaagcuggacaacuacuacaagaaggacaacagcuacuucacggagcagccgaucgaccuggugcccaaccagcccuaccccaacgccuccuucgacaacuucaaguucgucugcgacaacaucaaguucgccgacgaccucaaccagcugaccggguacaagaagccggcgagccgcgagcugaaggugaccuucuuccccgaccucaacggcgacguggucgccaucgacuacaagcacuacacccccuccuucaagaagggcgccaagcugcugcacaagcccaucguguggcacgugaacaacgccacgaacaaggcgaccuacaagccgaacaccuggugcauccggugccucuggagcaccaagcccgucgagacguccaacagcuucgacgugcugaaguccgaggacgcccaggggauggacaaccuggccugcgaggaccucaagcccgugagcgaggaggucguggagaaccccaccauccagaaggacgugcuggagugcaacgucaagaccaccgagguggugggcgacaucauccugaagccggccaacaacucccucaagaucacggaggaggucgggcacaccgaccugauggccgcguacguggacaacagcucccugaccaucaagaagcccaacgagcucagccgcgugcugggccugaagacccucgccacgcacgggcuggccgccgucaacuccgugcccugggacaccaucgccaacuacgcgaagccguuccugaacaagguggucagcaccaccacgaacaucgugacccgcugccucaaccgggugugcaccaacuacaugcccuacuucuucacccugcugcuccagcugugcaccuucacgcgcuccaccaacagccggaucaaggccuccaugcccaccaccaucgccaagaacacggucaagagcgugggcaaguucugccuggaggccagcuucaacuaccucaagucccccaacuucagcaagcugaucaacaucaucaucugguuccugcuccuguccgugugccugggcagccucaucuacuccaccgccgcgcuggggguccugaugagcaaccucggcaugccguccuacugcaccggguaccgcgagggcuaccugaacagcaccaacgugacgaucgccaccuacugcaccggcuccauccccugcagcgugugccuguccgggcucgacagccuggacaccuaccccucccuggagacgauccagaucaccaucagcuccuucaagugggaccucaccgccuucggccuggucgccgagugguuccuggccuacauccucuucacccgguucuucuacgugcuggggcuggcggccaucaugcagcucuucuucagcuacuucgccgugcacuucaucuccaacagcuggcugauguggcugaucaucaaccugguccagauggcccccaucuccgcgauggugcgcauguacaucuucuucgccagcuucuacuacguguggaagagcuacguccacgugguggacggcugcaacuccagcacgugcaugaugugcuacaagcggaaccgcgccacccgggucgagugcaccaccaucgugaacgggguccgccgguccuucuacguguacgccaacggcggcaagggguucugcaagcuccacaacuggaacugcgugaacugcgacacguucugcgccggcagcaccuucaucuccgacgaggucgcgcgcgaccugagccugcaguucaagcggccgaucaaccccaccgaccaguccagcuacaucguggacuccgugaccgucaagaacgggagcauccaccucuacuucgacaaggccggccagaagacguacgagcgccacucccugagccacuucgugaaccuggacaaccuccgggccaacaacaccaaggggucccugcccaucaacgugaucgucuucgacggcaagagcaagugcgaggaguccagcgccaaguccgccagcguguacuacucccagcugaugugccagcccauccuccugcuggaccaggcgcucgugagcgacgucggcgacagcgccgagguggccgugaagauguucgacgccuacgucaacaccuucuccagcaccuucaacgugccgauggagaagcugaagacgcugguggccaccgcggaggccgagcucgccaagaacgucucccuggacaacgugcugagcaccuucaucuccgccgcgcgccagggguucguggacagcgacgucgagaccaaggacgugguggagugccucaagcugucccaccagagcgacaucgaggucacgggcgacuccugcaacaacuacaugcugaccuacaacaagguggagaacaugaccccccgggaccucggggccugcaucgacugcagcgcccgccacaucaacgcccagguggccaagucccacaacaucgcgcugaucuggaacgucaaggacuucaugagccuguccgagcagcuccggaagcagauccgcagcgccgccaagaagaacaaccugcccuucaagcugaccugcgccacgacccgccagguggugaacgucgugaccaccaagaucgcccucaagggcggguga

SEQ ID NO: 17630 - RNA, 5841 nt, Artificial Sequence
  SARS-CoV-2__MT913053.1__non-structural protein 3 (NSP3) CDS gc
auggcccccaccaaggugaccuucggcgacgacacggucaucgaggugcagggguacaagagcgugaacaucaccuucgagcuggacgagcgcaucgacaagguccucaacgagaagugcuccgccuacaccguggagcugggcaccgaggugaacgaguucgcgugcgucguggccgacgccgugaucaagacgcugcagccggucagcgagcuccugaccccccuggggaucgaccucgacgagugguccauggccaccuacuaccuguucgacgagagcggcgaguucaagcuggccucccacauguacugcagcuucuacccccccgacgaggacgaggaggagggggacugcgaggaggaggaguucgagccguccacccaguacgaguacggcacggaggacgacuaccagggcaagccccucgaguucggggcgaccagcgccgcccugcagcccgaggaggagcaggaggaggacuggcuggacgacgacucccagcagaccgugggccagcaggacgggagcgaggacaaccagaccacgaccauccagaccaucguggagguccagccccagcucgagauggagcugaccccgguggugcagacgaucgaggucaacuccuucagcggcuaccugaagcucaccgacaacguguacaucaagaacgccgacaucguggaggaggcgaagaaggucaagcccaccgugguggucaacgccgccaacguguaccugaagcacgggggcggcguggccggggcccugaacaaggcgaccaacaacgccaugcaggucgaguccgacgacuacaucgccacgaacggcccccucaagguggggggcagcugcguccuguccggccacaaccuggccaagcacugccuccacgugguggggcccaacgucaacaagggcgaggacauccagcugcugaagagcgccuacgagaacuucaaccagcacgaggugcuccuggcgccgcugcucuccgccgggaucuucggcgccgaccccauccacagccugcgggugugcgucgacaccgugcgcaccaacguguaccuggccgucuucgacaagaaccucuacgacaagcugguguccagcuuccuggagaugaagagcgagaagcagguggagcagaagaucgccgagauccccaaggaggaggucaagcccuucaucaccgaguccaagccgagcguggagcagcggaagcaggacgacaagaagaucaaggcgugcguggaggaggucacgaccacccucgaggagaccaaguuccugacggagaaccugcuccuguacaucgacaucaacgggaaccugcaccccgacuccgccacccucgugagcgacaucgacaucaccuuccugaagaaggacgcccccuacaucgugggcgacgucgugcaggagggcgugcugaccgccgucgugauccccacgaagaaggccgggggcaccaccgagaugcucgcgaaggcccugcgcaaggugccgaccgacaacuacaucacgaccuaccccgggcagggccugaacggguacaccgucgaggaggccaagaccgugcucaagaagugcaaguccgccuucuacauccugcccagcaucaucuccaacgagaagcaggagauccugggcaccgugagcuggaaccuccgggagaugcuggcgcacgccgaggagacgcgcaagcugaugcccgucugcguggagaccaaggccaucguguccaccauccagcggaaguacaagggcaucaagauccaggagggggucguggacuacggcacccgcuucuacuucuacacgagcaagaccaccguggccucccugaucaacacccucaacgaccugaacgagacgcuggucaccaugccgcucggguacgugacccacggccugaaccuggaggaggccgcgcgguacaugcgcagccucaaggugcccgccaccgucuccgugagcucccccgacgccgugacggccuacaacggguaccugaccagcuccagcaagacccccgaggagcacuucaucgagaccaucucccuggccggcagcuacaaggacuggagcuacuccggccagagcacgcagcucgggaucgaguuccugaagcggggcgacaaguccgucuacuacaccagcaacccgaccaccuuccaccuggacggggaggugaucacguucgacaaccucaagacccugcugucccuccgcgaggugcggaccaucaaggucuucaccacgguggacaacaucaaccugcacacccagguggucgacaugagcaugaccuacggccagcaguucggccccaccuaccuggacggggcggacgugacgaagaucaagccccacaacucccacgagggcaagaccuucuacgugcucccgaacgacgacacccugcgcgucgaggccuucgaguacuaccacaccacggaccccagcuuccuggggcgguacauguccgcccucaaccacaccaagaaguggaaguacccccaggugaacggccugaccagcaucaagugggccgacaacaacugcuaccuggccaccgcgcuccugacgcugcagcagaucgagcucaaguucaaccccccggcccugcaggacgccuacuaccgcgcccgggcgggggaggccgccaacuucugcgcccugauccucgccuacugcaacaagaccgugggcgagcugggcgacguccgcgagaccauguccuaccuguuccagcacgcgaaccucgacagcugcaagcgggugcugaacgucgugugcaagaccugcgggcagcagcagaccacgcugaagggcguggaggccgucauguacauggggacccucuccuacgagcaguucaagaagggcgugcagauccccugcaccugcgggaagcaggccaccaaguaccuggugcagcaggagagccccuucgucaugauguccgcccccccggcccaguacgagcugaagcacggcacguucaccugcgcgagcgaguacaccggcaacuaccagugcgggcacuacaagcacaucaccuccaaggagacgcucuacugcaucgacggcgcccugcugaccaagagcagcgaguacaaggggcccaucaccgacguguucuacaaggagaacuccuacaccacgaccaucaagcccgugaccuacaagcucgacggcgucgugugcaccgagaucgaccccaagcuggacaacuacuacaagaaggacaacagcuacuucacggagcagccgaucgaccuggugcccaaccagcccuaccccaacgccuccuucgacaacuucaaguucgucugcgacaacaucaaguucgccgacgaccucaaccagcugaccggguacaagaagccggccagccgcgagcugaaggugaccuucuuccccgaccucaacggcgacguggucgcgaucgacuacaagcacuacacccccuccuucaagaagggcgccaagcugcugcacaagcccaucguguggcacgugaacaacgccacgaacaaggccaccuacaagccgaacaccuggugcauccggugccucuggagcaccaagcccgucgagacguccaacagcuucgacgugcugaaguccgaggacgcgcaggggauggacaaccuggccugcgaggaccucaagcccgugagcgaggaggucguggagaaccccaccauccagaaggacgugcuggagugcaacgucaagaccaccgagguggugggcgacaucauccugaagccggccaacaacucccucaagaucacggaggaggucgggcacaccgaccugauggccgccuacguggacaacagcucccugaccaucaagaagcccaacgagcucagccgcgugcugggccugaagacccucgcgacgcacgggcuggccgccgucaacuccgugcccugggacaccaucgccaacuacgccaagccguuccugaacaagguggucagcaccaccacgaacaucgugacccgcugccucaaccgggugugcaccaacuacaugcccuacuucuucacccugcugcuccagcugugcaccuucacgcgcuccaccaacagccggaucaaggcguccaugcccaccaccaucgccaagaacacggucaagagcgugggcaaguucugccuggaggccagcuucaacuaccucaagucccccaacuucagcaagcugaucaacaucaucaucugguuccugcuccuguccgugugccugggcagccucaucuacuccaccgccgcccuggggguccugaugagcaaccucggcaugccguccuacugcaccggguaccgcgagggcuaccugaacagcaccaacgugacgaucgcgaccuacugcaccggcuccauccccugcagcgugugccuguccgggcucgacagccuggacaccuaccccucccuggagacgauccagaucaccaucagcuccuucaagugggaccucaccgccuucggccuggucgccgagugguuccuggccuacauccucuucacccgguucuucuacgugcuggggcuggccgcgaucaugcagcucuucuucagcuacuucgccgugcacuucaucuccaacagcuggcugauguggcugaucaucaaccugguccagauggcccccaucuccgccauggugcgcauguacaucuucuucgcgagcuucuacuacguguggaagagcuacguccacgugguggacggcugcaacuccagcacgugcaugaugugcuacaagcggaaccgcgccacccgggucgagugcaccaccaucgugaacgggguccgccgguccuucuacguguacgccaacggcggcaagggguucugcaagcuccacaacuggaacugcgugaacugcgacacguucugcgccggcagcaccuucaucuccgacgaggucgcccgcgaccugagccugcaguucaagcggccgaucaaccccaccgaccaguccagcuacaucguggacuccgugaccgucaagaacgggagcauccaccucuacuucgacaaggcgggccagaagacguacgagcgccacucccugagccacuucgugaaccuggacaaccuccgggccaacaacaccaaggggucccugcccaucaacgugaucgucuucgacggcaagagcaagugcgaggaguccagcgccaaguccgccagcguguacuacucccagcugaugugccagcccauccuccugcuggaccaggcccucgugagcgacgucggcgacagcgcggagguggccgugaagauguucgacgccuacgucaacaccuucuccagcaccuucaacgugccgauggagaagcugaagacgcugguggccaccgccgaggcggagcucgccaagaacgucucccuggacaacgugcugagcaccuucaucuccgccgcccgccagggguucguggacagcgacgucgagaccaaggacgugguggagugccucaagcugucccaccagagcgacaucgaggucacgggcgacuccugcaacaacuacaugcugaccuacaacaagguggagaacaugaccccccgggaccucggggcgugcaucgacugcagcgcccgccacaucaacgcccagguggccaagucccacaacaucgcccugaucuggaacgucaaggacuucaugagccuguccgagcagcuccggaagcagauccgcagcgcggccaagaagaacaaccugcccuucaagcugaccugcgccacgacccgccagguggugaacgucgugaccaccaagaucgcccucaagggcggguga

SEQ ID NO: 17631 - RNA, 5841 nt, Artificial Sequence
  SARS-CoV-2__MT913074.1__non-structural protein 3 (NSP3) CDS gc
auggcccccaccaaggugaccuucggcgacgacacggucaucgaggugcagggguacaagagcgugaacaucaccuucgagcuggacgagcgcaucgacaagguccucaacgagaagugcuccgccuacaccguggagcugggcaccgaggugaacgaguucgcgugcgucguggccgacgccgugaucaagacgcugcagccggucagcgagcuccugaccccccuggggaucgaccucgacgagugguccauggccaccuacuaccuguucgacgagagcggcgaguucaagcuggccucccacauguacugcagcuucuacccccccgacgaggacgaggaggagggggacugcgaggaggaggaguucgagccguccacccaguacgaguacggcacggaggacgacuaccagggcaagccccucgaguucggggcgaccagcgccgcccugcagcccgaggaggagcaggaggaggacuggcuggacgacgacucccagcagaccgugggccagcaggacgggagcgaggacaaccagaccacgaccauccagaccaucguggagguccagccccagcucgagauggagcugaccccgguggugcagacgaucgaggucaacuccuucagcggcuaccugaagcucaccgacaacguguacaucaagaacgccgacaucguggaggaggcgaagaaggucaagcccaccgugguggucaacgccgccaacguguaccugaagcacgggggcggcguggccggggcccugaacaaggcgaccaacaacgccaugcaggucgaguccgacgacuacaucgccacgaacggcccccucaagguggggggcagcugcguccuguccggccacaaccuggccaagcacugccuccacgugguggggcccaacgucaacaagggcgaggacauccagcugcugaagagcgccuacgagaacuucaaccagcacgaggugcuccuggcgccgcugcucuccgccgggaucuucggcgccgaccccauccacagccugcgggugugcgucgacaccgugcgcaccaacguguaccuggccgucuucgacaagaaccucuacgacaagcugguguccagcuuccuggagaugaagagcgagaagcagguggagcagaagaucgccgagauccccaaggaggaggucaagcccuucaucaccgaguccaagccgagcguggagcagcggaagcaggacgacaagaagaucaaggcgugcguggaggaggucacgaccacccucgaggagaccaaguuccugacggagaaccugcuccuguacaucgacaucaacgggaaccugcaccccgacuccgccacccucgugagcgacaucgacaucaccuuccugaagaaggacgcccccuacaucgugggcgacgucgugcaggagggcgugcugaccgccgucgugauccccacgaagaaggccgggggcaccaccgagaugcucgcgaaggcccugcgcaaggugccgaccgacaacuacaucacgaccuaccccgggcagggccugaacggguacaccgucgaggaggccaagaccgugcucaagaagugcaaguccgccuucuacauccugcccagcaucaucuccaacgagaagcaggagauccugggcaccgugagcuggaaccuccgggagaugcuggcgcacgccgaggagacgcgcaagcugaugcccgucugcguggagaccaaggccaucguguccaccauccagcggaaguacaagggcaucaagauccaggagggggucguggacuacggcgcccgcuucuacuucuacaccagcaagacgaccguggccucccugaucaacacccucaacgaccugaacgagacccuggucacgaugccgcucggguacgugacccacggccugaaccuggaggaggcggcccgguacaugcgcagccucaaggugcccgccaccgucuccgugagcucccccgacgccgugaccgccuacaacggguaccugacgagcuccagcaagacccccgaggagcacuucaucgagaccaucucccuggcgggcagcuacaaggacuggagcuacuccggccagagcacccagcucgggaucgaguuccugaagcggggcgacaaguccgucuacuacacgagcaacccgaccaccuuccaccuggacggggaggugaucaccuucgacaaccucaagacgcugcugucccuccgcgaggugcggaccaucaaggucuucaccaccguggacaacaucaaccugcacacgcagguggucgacaugagcaugaccuacggccagcaguucggccccaccuaccuggacggggccgacgugaccaagaucaagccccacaacucccacgagggcaagacguucuacgugcucccgaacgacgacacccugcgcgucgaggccuucgaguacuaccacaccaccgaccccagcuuccuggggcgguacauguccgcccucaaccacacgaagaaguggaaguacccccaggugaacggccugaccagcaucaagugggccgacaacaacugcuaccuggcgaccgcccuccugacccugcagcagaucgagcucaaguucaaccccccggcccugcaggacgccuacuaccgcgcgcgggccggggaggccgccaacuucugcgcccugauccucgcguacugcaacaagacggugggcgagcugggcgacguccgcgagaccauguccuaccuguuccagcacgccaaccucgacagcugcaagcgggugcugaacgucgugugcaagaccugcgggcagcagcagaccacccugaagggcguggaggccgucauguacauggggacgcucuccuacgagcaguucaagaagggcgugcagauccccugcaccugcgggaagcaggccaccaaguaccuggugcagcaggagagccccuucgucaugauguccgcccccccggcgcaguacgagcugaagcacggcaccuucacgugcgccagcgaguacaccggcaacuaccagugcgggcacuacaagcacaucaccuccaaggagacccucuacugcaucgacggcgcccugcugacgaagagcagcgaguacaaggggcccaucaccgacguguucuacaaggagaacuccuacaccaccacgaucaagcccgugaccuacaagcucgacggcgucgugugcaccgagaucgaccccaagcuggacaacuacuacaagaaggacaacagcuacuucaccgagcagccgaucgaccuggugcccaaccagcccuaccucaacgccuccuucgacaacuucaaguucgucugcgacaacaucaaguucgccgacgaccugaaccagcugacgggguacaagaagcccgcgagccgcgagcucaaggugaccuucuucccggaccugaacggcgacguggucgccaucgacuacaagcacuacacccccuccuucaagaagggcgccaagcugcuccacaagcccaucguguggcacgugaacaacgccaccaacaaggcgacguacaagcccaacaccuggugcauccggugccuguggagcaccaagccggucgagaccuccaacagcuucgacgugcugaaguccgaggacgcccaggggauggacaaccucgccugcgaggaccugaagcccgugagcgaggaggucguggagaaccccacgauccagaaggacgugcuggagugcaacgucaagaccaccgagguggugggcgacaucauccucaagcccgccaacaacucccugaagaucaccgaggaggucgggcacacggaccugauggccgcguacguggacaacagcucccucaccaucaagaagccgaacgagcugagccgcgugcugggccucaagacccuggccacccacgggcuggccgccgucaacuccgugcccugggacacgaucgccaacuacgcgaagcccuuccucaacaagguggucagcaccaccaccaacaucgugacgcgcugccugaaccgggugugcaccaacuacaugccguacuucuucacccugcuccugcagcugugcaccuucacccgcuccacgaacagccggaucaaggccuccaugcccaccaccaucgccaagaacaccgucaagagcgugggcaaguucugccucgaggccagcuucaacuaccugaagucccccaacuucagcaagcugaucaacaucaucaucugguuccuccugcuguccgugugccucggcagccugaucuacuccacggccgcgcuggggguccucaugagcaaccugggcaugcccuccuacugcaccggguaccgcgagggcuaccugaacagcaccaacgugaccaucgccacguacugcaccggcuccaucccgugcagcgugugccucuccgggcuggacagccuggacaccuaccccucccucgagaccauccagaucacgaucagcuccuucaagugggaccugaccgccuucggccuggucgccgagugguuccucgccuacauccuguucacccgguucuucuacgugcuggggcucgcggccaucaugcagcuguucuucagcuacuucgccgugcacuucaucuccaacagcuggcugauguggcugaucaucaaccucguccagauggcccccaucuccgcgauggugcgcauguacaucuucuucgccagcuucuacuacguguggaagagcuacguccacgugguggacggcugcaacuccagcaccugcaugaugugcuacaagcggaaccgcgccacgcgggucgagugcaccaccaucgugaacgggguccgccgguccuucuacguguacgccaacggcggcaagggguucugcaagcugcacaacuggaacugcgugaacugcgacaccuucugcgccggcagcacguucaucuccgacgaggucgcgcgcgaccugagccuccaguucaagcggcccaucaacccgaccgaccaguccagcuacaucguggacuccgugaccgucaagaacgggagcauccaccuguacuucgacaaggccggccagaagaccuacgagcgccacucccugagccacuucgugaaccucgacaaccugcgggccaacaacacgaaggggucccugcccaucaacgugaucgucuucgacggcaagagcaagugcgaggaguccagcgccaaguccgccagcguguacuacucccagcucaugugccagcccauccugcugcucgaccaggcgcuggugagcgacgucggcgacagcgccgagguggccgugaagauguucgacgccuacgucaacaccuucuccagcaccuucaacgugcccauggagaagcugaagacccucguggccacggcggaggccgagcuggccaagaacgucucccuggacaacgugcucagcaccuucaucuccgccgcgcgccagggguucguggacagcgacgucgagaccaaggacgugguggagugccugaagcugucccaccagagcgacaucgaggucaccggcgacuccugcaacaacuacaugcucacguacaacaagguggagaacaugaccccgcgggaccugggggccugcaucgacugcagcgcccgccacaucaacgcccagguggccaagucccacaacaucgcgcugaucuggaacgucaaggacuucaugagccucuccgagcagcugcggaagcagauccgcagcgccgccaagaagaacaaccugcccuucaagcucaccugcgccaccacgcgccagguggugaacgucgugaccaccaagaucgcccugaagggcggguga

SEQ ID NO: 17632 - RNA, 5841 nt, Artificial Sequence
  SARS-CoV-2__MT913076.1__non-structural protein 3 (NSP3) CDS gc
auggcccccaccaaggugaccuucggcgacgacacggucaucgaggugcagggguacaagagcgugaacaucaccuucgagcuggacgagcgcaucgacaagguccucaacgagaagugcuccgccuacaccguggagcugggcaccgaggugaacgaguucgcgugcgucguggccgacgccgugaucaagacgcugcagccggucagcgagcuccugaccccccuggggaucgaccucgacgagugguccauggccaccuacuaccuguucgacgagagcggcgaguucaagcuggccucccacauguacugcagcuucuacccccccgacgaggacgaggaggagggggacugcgaggaggaggaguucgagccguccacccaguacgaguacggcacggaggacgacuaccagggcaagccccucgaguucggggcgaccagcgccgcccugcagcccgaggaggagcaggaggaggacuggcuggacgacgacucccagcagaccgugggccagcaggacgggagcgaggacaaccagaccacgaccauccagaccaucguggagguccagccccagcucgagauggagcugaccccgguggugcagacgaucgaggucaacuccuucagcggcuaccugaagcucaccgagaacguguacaucaagaacgccgacaucguggaggaggcgaagaaggucaagcccaccgugguggucaacgccgccaacguguaccugaagcacgggggcggcguggccggggcccugaacaaggcgaccaacaacgccaugcaggucgaguccgacgacuacaucgccacgaacggcccccucaagguggggggcagcugcguccuguccggccacaaccuggccaagcacugccuccacgugguggggcccaacgucaacaagggcgaggacauccagcugcugaagagcgccuacgagaacuucaaccagcacgaggugcuccuggcgccgcugcucuccgccgggaucuucggcgccgaccccauccacagccugcgggugugcgucgacaccgugcgcaccaacguguaccuggccgucuucgacaagaaccucuacgacaagcugguguccagcuuccuggagaugaagagcgagaagcagguggagcagaagaucgccgagauccccaaggaggaggucaagcccuucaucaccgaguccaagccgagcguggagcagcggaagcaggacgacaagaagaucaaggcgugcguggaggaggucacgaccacccucgaggagaccaaguuccugacggagaaccugcuccuguacaucgacaucaacgggaaccugcaccccgacuccgccacccucgugagcgacaucgacaucaccuuccugaagaaggacgcccccuacaucgugggcgacgucgugcaggagggcgugcugaccgccgucgugauccccacgaagaaggccgggggcaccaccgagaugcucgcgaaggcccugcgcaaggugccgaccgacaacuacaucacgaccuaccccgggcagggccugaacggguacaccgucgaggaggccaagaccgugcucaagaagugcaaguccgccuucuacauccugcccagcaucaucuccaacgagaagcaggagauccugggcaccgugagcuggaaccuccgggagaugcuggcgcacgccgaggagacgcgcaagcugaugcccgucugcguggagaccaaggccaucguguccaccauccagcggaaguacaagggcaucaagauccaggagggggucguggacuacggcgcccgcuucuacuucuacaccagcaagacgaccguggccucccugaucaacacccucaacgaccugaacgagacccuggucacgaugccgcucggguacgugacccacggccugaaccuggaggaggcggcccgguacaugcgcagccucaaggugcccgccaccgucuccgugagcucccccgacgccgugaccgccuacaacggguaccugacgagcuccagcaagacccccgaggagcacuucaucgagaccaucucccuggcgggcagcuacaaggacuggagcuacuccggccagagcacccagcucgggaucgaguuccugaagcggggcgacaaguccgucuacuacacgagcaacccgaccaccuuccaccuggacggggaggugaucaccuucgacaaccucaagacgcugcugucccuccgcgaggugcggaccaucaaggucuucaccaccguggacaacaucaaccugcacacgcagguggucgacaugagcaugaccuacggccagcaguucggccccaccuaccuggacggggccgacgugaccaagaucaagccccacaacucccacgagggcaagacguucuacgugcucccgaacgacgacacccugcgcgucgaggccuucgaguacuaccacaccaccgaccccagcuuccuggggcgguacauguccgcccucaaccacacgaagaaguggaaguacccccaggugaacggccugaccagcaucaagugggccgacaacaacugcuaccuggcgaccgcccuccugacccugcagcagaucgagcucaaguucaaccccccggcccugcaggacgccuacuaccgcgcgcgggccggggaggccgccaacuucugcgcccugauccucgcguacugcaacaagacggugggcgagcugggcgacguccgcgagaccauguccuaccuguuccagcacgccaaccucgacagcugcaagcgggugcugaacgucgugugcaagaccugcgggcagcagcagaccacccugaagggcguggaggccgucauguacauggggacgcucuccuacgagcaguucaagaagggcgugcagauccccugcaccugcgggaagcaggccaccaaguaccuggugcagcaggagagccccuucgucaugauguccgcccccccggcgcaguacgagcugaagcacggcaccuucacgugcgccagcgaguacaccggcaacuaccagugcgggcacuacaagcacaucaccuccaaggagacccucuacugcaucgacggcgcccugcugacgaagagcagcgaguacaaggggcccaucaccgacguguucuacaaggagaacuccuacaccaccacgaucaagcccgugaccuacaagcucgacggcgucgugugcaccgagaucgaccccaagcuggacaacuacuacaagaaggacaacagcuacuucaccgagcagccgaucgaccuggugcccaaccagcccuaccccaacgccuccuucgacaacuucaaguucgucugcgacaacaucaaguucgccgacgaccucaaccagcugacgggguacaagaagccggcgagccgcgagcugaaggugaccuucuuccccgaccucaacggcgacguggucgccaucgacuacaagcacuacacccccuccuucaagaagggcgccaagcugcugcacaagcccaucguguggcacgugaacaacgccaccaacaaggcgacguacaagccgaacaccuggugcauccggugccucuggagcaccaagcccgucgagaccuccaacagcuucgacgugcugaaguccgaggacgcccaggggauggacaaccuggccugcgaggaccucaagcccgugagcgaggaggucguggagaaccccacgauccagaaggacgugcuggagugcaacgucaagaccaccgagguggugggcgacaucauccugaagccggccaacaacucccucaagaucaccgaggaggucgggcacacggaccugauggccgcguacguggacaacagcucccugaccaucaagaagcccaacgagcucagccgcgugcugggccugaagacccucgccacccacgggcuggccgccgucaacuccgugcccugggacacgaucgccaacuacgcgaagccguuccugaacaagguggucagcaccaccaccaacaucgugacgcgcugccucaaccgggugugcaccaacuacaugcccuacuucuucacccugcugcuccagcugugcaccuucacccgcuccacgaacagccggaucaaggccuccaugcccaccaccaucgccaagaacaccgucaagagcgugggcaaguucugccuggaggccagcuucaacuaccucaagucccccaacuucagcaagcugaucaacaucaucaucugguuccugcuccuguccgugugccugggcagccucaucuacuccacggccgcgcuggggguccugaugagcaaccucggcaugccguccuacugcaccggguaccgcgagggcuaccugaacagcaccaacgugaccaucgccacguacugcaccggcuccauccccugcagcgugugccuguccgggcucgacagccuggacaccuaccccucccuggagaccauccagaucacgaucagcuccuucaagugggaccucaccgccuucggccuggucgccgagugguuccuggccuacauccucuucacccgguucuucuacgugcuggggcuggcggccaucaugcagcucuucuucagcuacuucgccgugcacuucaucuccaacagcuggcugauguggcugaucaucaaccugguccagauggcccccaucuccgcgauggugcgcauguacaucuucuucgccagcuucuacuacguguggaagagcuacguccacgugguggacggcugcaacuccagcaccugcaugaugugcuacaagcggaaccgcgccacgcgggucgagugcaccaccaucgugaacgggauccgccgguccuucuacgucuacgccaacggcggcaagggguucugcaagcuccacaacuggaacugcgugaacugcgacaccuucugcgccggcagcacguucaucuccgacgagguggcgcgcgaccugagccugcaguucaagcggccgaucaaccccaccgaccaguccagcuacaucgucgacuccgugaccgugaagaacgggagcauccaccucuacuucgacaaggccggccagaagaccuacgagcgccacucccugagccacuucgucaaccuggacaaccuccgggccaacaacacgaaggggucccugcccaucaacgugaucguguucgacggcaagagcaagugcgaggaguccagcgccaaguccgccagcgucuacuacucccagcugaugugccagcccauccuccugcuggaccaggcgcucgugagcgacgugggcgacagcgccgaggucgccgugaagauguucgacgccuacgugaacaccuucuccagcaccuucaacgucccgauggagaagcugaagacccugguggccacggcggaggccgagcucgccaagaacgugucccuggacaacguccugagcaccuucaucuccgccgcgcgccagggguucguggacagcgacguggagaccaaggacgucguggagugccucaagcugucccaccagagcgacaucgaggugaccggcgacuccugcaacaacuacaugcugacguacaacaaggucgagaacaugaccccccgggaccucggggccugcaucgacugcagcgcccgccacaucaacgcccagguggccaagucccacaacaucgcgcugaucuggaacgugaaggacuucaugagccuguccgagcagcuccggaagcagauccgcagcgccgccaagaagaacaaccugcccuucaagcugaccugcgccaccacgcgccaggucgugaacguggucaccaccaagaucgcccucaagggcggguga

SEQ ID NO: 17633 - RNA, 5841 nt, Artificial Sequence
  SARS-CoV-2__MT913119.1__non-structural protein 3 (NSP3) CDS gc
auggcccccaccaaggugaccuucggcgacgacacggucaucgaggugcagggguacaagagcgugaacaucaccuucgagcuggacgagcgcaucgacaagguccucaacgagaagugcuccgccuacaccguggagcugggcaccgaggugaacgaguucgcgugcgucguggccgacgccgugaucaagacgcugcagccggucagcgagcuccugaccccccuggggaucgaccucgacgagugguccauggccaccuacuaccuguucgacgagagcggcgaguucaagcuggccucccacauguacugcagcuucuacccccccgacgaggacgaggaggagggggacugcgaggaggaggaguucgagccguccacccaguacgaguacggcacggaggacgacuaccagggcaagccccucgaguucggggcgaccagcgccgcccugcagcccgaggaggagcaggaggaggacuggcuggacgacgacucccagcagaccgugggccagcaggacgggagcgaggacaaccagaccacgaccauccagaccaucguggagguccagccccagcucgagauggagcugaccccgguggugcagacgaucgaggucaacuccuucagcggcuaccugaagcucaccgagaacguguacaucaagaacgccgacaucguggaggaggcgaagaaggucaagcccaccgugguggucaacgccgccaacguguaccugaagcacgggggcggcguggccggggcccugaacaaggcgaccaacaacgccaugcaggucgaguccgacgacuacaucgccacgaacggcccccucaagguggggggcagcugcguccuguccggccacaaccuggccaagcacugccuccacgugguggggcccaacgucaacaagggcgaggacauccagcugcugaagagcgccuacgagaacuucaaccagcacgaggugcuccuggcgccgcugcucuccgccgggaucuucggcgccgaccccauccacagccugcgggugugcgucgacaccgugcgcaccaacguguaccuggccgucuucgacaagaaccucuacgacaagcugguguccagcuuccuggagaugaagagcgagaagcagguggagcagaagaucgccgagauccccaaggaggaggucaagcccuucaucaccgaguccaagccgagcguggagcagcggaagcaggacgacaagaagaucaaggcgugcguggaggaggucacgaccacccucgaggagaccaaguuccugacggagaaccugcuccuguacaucgacaucaacgggaaccugcaccccgacuccgccacccucgugagcgacaucgacaucaccuuccugaagaaggacgcccccuacaucgugggcgacgucgugcaggagggcgugcugaccgccgucgugauccccacgaagaaggccgggggcaccaccgagaugcucgcgaaggcccugcgcaaggugccgaccgacaacuacaucacgaccuaccccgggcagggccugaacggguacaccgucgaggaggccaagaccgugcucaagaagugcaaguccgccuucuacauccugcccagcaucaucuccaacgagaagcaggagauccugggcaccgugagcuggaaccuccgggagaugcuggcgcacgccgaggagacgcgcaagcugaugcccgucugcguggagaccaaggccaucguguccaccauccagcggaaguacaagggcaucaagauccaggagggggucguggacuacggcgcccgcuucuacuucuacaccagcaagacgaccguggccucccugaucaacacccucaacgaccugaacgagacccuggucacgaugccgcucggguacgugacccacggccugaaccuggaggaggcggcccgguacaugcgcagccucaaggugcccgccaccgucuccgugagcucccccgacgccgugaccgccuacaacggguaccugacgagcuccagcaagacccccgaggagcacuucaucgagaccaucucccuggcgggcagcuacaaggacuggagcuacuccggccagagcacccagcucgggaucgaguuccugaagcggggcgacaaguccgucuacuacacgagcaacccgaccaccuuccaccuggacggggaggugaucaccuucgacaaccucaagacgcugcugucccuccgcgaggugcggaccaucaaggucuucaccaccguggacaacaucaaccugcacacgcagguggucgacaugagcaugaccuacggccagcaguucggccccaccuaccuggacggggccgacgugaccaagaucaagccccacaacucccacgagggcaagacguucuacgugcucccgaacgacgacacccugcgcgucgaggccuucgaguacuaccacaccaccgaccccagcuuccuggggcgguacauguccgcccucaaccacacgaagaaguggaaguacccccaggugaacggccugaccagcaucaagugggccgacaacaacugcuaccuggcgaccgcccuccugacccugcagcagaucgagcucaaguucaaccccccggcccugcaggacgccuacuaccgcgcgcgggccggggaggccgccaacuucugcgcccugauccucgcguacugcaacaagacggugggcgagcugggcgacguccgcgagaccauguccuaccuguuccagcacgccaaccucgacagcugcaagcgggugcugaacgucgugugcaagaccugcgggcagcagcagaccacccugaagggcguggaggccgucauguacauggggacgcucuccuacgagcaguucaagaagggcgugcagauccccugcaccugcgggaagcaggccaccaaguaccuggugcagcaggagagccccuucgucaugauguccgcccccccggcgcaguacgagcugaagcacggcaccuucacgugcgccagcgaguacaccggcaacuaccagugcgggcacuacaagcacaucaccuccaaggagacccucuacugcaucgacggcgcccugcugacgaagagcagcgaguacaaggggcccaucaccgacguguucuacaaggagaacuccuacaccaccacgaucaagcccgugaccuacaagcucgacggcgucgugugcaccgagaucgaccccaagcuggacaacuacuacaagaaggacaacagcuacuucaccgagcagccgaucgaccuggugcccaaccagcccuaccccaacgccuccuucgacaacuucaaguucgucugcgacaacaucaaguucgccgacgaccucaaccagcugacgggguacaagaagccggcgagccgcgagcugaaggugaccuucuuccccgaccucaacggcgacguggucgccaucgacuacaagcacuacacccccuccuucaagaagggcgccaagcugcugcacaagcccaucguguggcacgugaacaacgccaccaacaaggcgacguacaagccgaacaccuggugcauccggugccucuggagcaccaagcccgucgagaccuccaacagcuucgacgugcugaaguccgaggacgcccaggggauggacaaccuggccugcgaggaccucaagcccgugagcgaggaggucguggagaaccccacgauccagaaggacgugcuggagugcaacgucaagaccaccgagguggugggcgacaucauccugaagccggccaacaacucccucaagaucaccgaggaggucgggcacacggaccugauggccgcguacguggacaacagcucccugaccaucaagaagcccaacgagcucagccgcgugcugggccugaagacccucgccacccacgggcuggccgccgucaacuccgugcccugggacacgaucgccaacuacgcgaagccguuccugaacaagguggucagcaccaccaccaacaucgugacgcgcugccucaaccgggugugcaccaacuacaugcccuacuucuucacccugcugcuccagcugugcaccuucacccgcuccacgaacagccggaucaaggccuccaugcccaccaccaucgccaagaacaccgucaagagcgugggcaaguucugccuggaggccagcuucaacuaccucaagucccccaacuucagcaagcugaucaacaucaucaucugguuccugcuccuguccgugugccugggcagccucaucuacuccacggccgcgcuggggguccugaugagcaaccucggcaugccguccuacugcaccggguaccgcgagggcuaccugaacagcaccaacgugaccaucgccacguacugcaccggcuccauccccugcagcgugugccuguccgggcucgacagccuggacaccuaccccucccuggagaccauccagaucacgaucagcuccuucaagugggaccucaccgccuucggccuggucgccgagugguuccuggccuacauccucuucacccgguucuucuacgugcuggggcuggcggccaucaugcagcucuucuucagcuacuucgccgugcacuucaucuccaacagcuggcugauguggcugaucaucaaccugguccagauggcccccaucuccgcgauggugcgcauguacaucuucuucgccagcuucuacuacguguggaagagcuacguccacgugguggacggcugcaacuccagcaccugcaugaugugcuacaagcggaaccgcgccacgcgggucgagugcaccaccaucgugaacgggguccgccgguccuucuacguguacgccaacggcggcaagggguucugcaagcuccacaacuggaacugcgugaacugcgacaccuucugcgccggcagcacguucaucuccgacgaggucgcgcgcgaccugagccugcaguucaagcggccgaucaaccccaccgaccaguccagcuacaucguggacuccgugaccgucaagaacgggagcauccaccucuacuucgacaaggccggccagaagaccuacgagcgccacucccugagccacuucgugaaccuggacaaccuccgggccaacaacacgaaggggucccugcccaucaacgugaucgucuucgacggcaagagcaagugcgaggaguccagcgccaaguccgccagcguguacuacucccagcugaugugccagcccauccuccugcuggaccaggcgcucgugagcgacgucggcgacagcgccgagguggccgugaagauguucgacgccuacgucaacaccuucuccagcaccuucaacgugccgauggagaagcugaagacccugguggccacggcggaggccgagcucgccaagaacgucucccuggacaacgugcugagcaccuucaucuccgccgcgcgccagggguucguggacagcgacgucgagaccaaggacgugguggagugccucaagcugucccaccagagcgacaucgaggucaccggcgacuccugcaacaacuacaugcugacguacaacaagguggagaacaugaccccccgggaccucggggccugcaucgacugcagcgcccgccacaucaacgcccagguggccaagucccacaacaucgcgcugaucuggaacgucaaggacuucaugagccuguccgagcagcuccggaagcagauccgcagcgccgccaagaagaacaaccugcccuucaagcugaccugcgccaccacgcgccagguggugaacgucgugaccaccaagaucgcccucaagggcggguga

SEQ ID NO: 17634 - RNA, 5841 nt, Artificial Sequence
  SARS-CoV-2__MT913129.1__non-structural protein 3 (NSP3) CDS gc
auggcccccaccaaggugaccuucggcgacgacacggucaucgaggugcagggguacaagagcgugaacaucaccuucgagcuggacgagcgcaucgacaagguccucaacgagaagugcuccgccuacaccguggagcugggcaccgaggugaacgaguucgcgugcgucguggccgacgccgugaucaagacgcugcagccggucagcgagcuccugaccccccuggggaucgaccucgacgagugguccauggccaccuacuaccuguucgacgagagcggcgaguucaagcuggccucccacauguacugcagcuucuacccccccgacgaggacgaggaggagggggacugcgaggaggaggaguucgagccguccacccaguacgaguacggcacggaggacgacuaccagggcaagccccucgaguucggggcgaccagcgccgcccugcagcccgaggaggagcaggaggaggacuggcuggacgacgacucccagcagaccgugggccagcaggacgggagcgaggacaaccagaccacgaccauccagaccaucguggagguccagccccagcucgagauggagcugaccccgguggugcagacgaucgaggucaacuccuucagcggcuaccugaagcucaccgacaacguguacaucaagaacgccgacaucguggaggaggcgaagaaggucaagcccaccgugguggucaacgccgccaacguguaccugaagcacgggggcggcguggccggggcccugaacaaggcgaccaacaacgccaugcaggucgaguccgacgacuacaucgccacgaacggcccccucaagguggggggcagcugcguccuguccggccacaaccuggccaagcacugccuccacgugguggggcccaacgucaacaagggcgagaacauccagcugcugaagagcgccuacgagaacuucaaccagcacgaggugcuccuggcgccgcugcucuccgccgggaucuucggcgccgaccccauccacagccugcgggugugcgucgacaccgugcgcaccaacguguaccuggccgucuucgacaagaaccucuacgacaagcugguguccagcuuccuggagaugaagagcgagaagcagguggagcagaagaucgccgagauccccaaggaggaggucaagcccuucaucaccgaguccaagccgagcguggagcagcggaagcaggacgacaagaagaucaaggcgugcguggaggaggucacgaccacccucgaggagaccaaguuccugacggagaaccugcuccuguacaucgacaucaacgggaaccugcaccccgacuccgccacccucgugagcgacaucgacaucaccuuccugaagaaggacgcccccuacaucgugggcgacgucgugcaggagggcgugcugaccgccgucgugauccccacgaagaaggccgggggcaccaccgagaugcucgcgaaggcccugcgcaaggugccgaccgacaacuacaucacgaccuaccccgggcagggccugaacggguacaccgucgaggaggccaagaccgugcucaagaagugcaaguccgccuucuacauccugcccagcaucaucuccaacgagaagcaggagauccugggcaccgugagcuggaaccuccgggagaugcuggcgcacgccgaggagacgcgcaagcugaugcccgucugcguggagaccaaggccaucguguccaccauccagcggaaguacaagggcaucaagauccaggagggggucguggacuacggcgcccgcuucuacuucuacaccagcaagacgaccguggccucccugaucaacacccucaacgaccugaacgagacccuggucacgaugccgcucggguacgugacccacggccugaaccuggaggaggcggcccgguacaugcgcagccucaaggugcccgccaccgucuccgugagcucccccgacgccgugaccgccuacaacggguaccugacgagcuccagcaagacccccgaggagcacuucaucgagaccaucucccuggcgggcagcuacaaggacuggagcuacuccggccagagcacccagcucgggaucgaguuccugaagcggggcgacaaguccgucuacuacacgagcaacccgaccaccuuccaccuggacggggaggugaucaccuucgacaaccucaagacgcugcugucccuccgcgaggugcggaccaucaaggucuucaccaccguggacaacaucaaccugcacacgcagguggucgacaugagcaugaccuacggccagcaguucggccccaccuaccuggacggggccgacgugaccaagaucaagccccacaacucccacgagggcaagacguucuacgugcucccgaacgacgacacccugcgcgucgaggccuucgaguacuaccacaccaccgaccccagcuuccuggggcgguacauguccgcccucaaccacacgaagaaguggaaguacccccaggugaacggccugaccagcaucaagugggccgacaacaacugcuaccuggcgaccgcccuccugacccugcagcagaucgagcucaaguucaaccccccggcccugcaggacgccuacuaccgcgcgcgggccggggaggccgccaacuucugcgcccugauccucgcguacugcaacaagacggugggcgagcugggcgacguccgcgagaccauguccuaccuguuccagcacgccaaccucgacagcugcaagcgggugcugaacgucgugugcaagaccugcgggcagcagcagaccacccugaagggcguggaggccgucauguacauggggacgcucuccuacgagcaguucaagaagggcgugcagauccccugcaccugcgggaagcaggccaccaaguaccuggugcagcaggagagccccuucgucaugauguccgcccccccggcgcaguacgagcugaagcacggcaccuucacgugcgccagcgaguacaccggcaacuaccagugcgggcacuacaagcacaucaccuccaaggagacccucuacugcaucgacggcgcccugcugacgaagagcagcgaguacaaggggcccaucaccgacguguucuacaaggagaacuccuacaccaccacgaucaagcccgugaccuacaagcucgacggcgucgugugcaccgagaucgaccccaagcuggacaacuacuacaagaaggacaacagcuacuucaccgagcagccgaucgaccuggugcccaaccagcccuaccccaacgccuccuucgacaacuucaaguucgucugcgacaacaucaaguucgccgacgaccucaaccagcugacgggguacaagaagccggcgagccgcgagcugaaggugaccuucuuccccgaccucaacggcgacguggucgccaucgacuacaagcacuacacccccuccuucaagaagggcgccaagcugcugcacaagcccaucguguggcacgugaacaacgccaccaacaaggcgacguacaagccgaacaccuggugcauccggugccucuggagcaccaagcccgucgagaccuccaacagcuucgacgugcugaaguccgaggacgcccaggggauggacaaccuggccugcgaggaccucaagcccgugagcgaggaggucguggagaaccccacgauccagaaggacgugcuggagugcaacgucaagaccaccgagguggugggcgacaucauccugaagccggccaacaacucccucaagaucaccgaggaggucgggcacacggaccugauggccgcguacguggacaacagcucccugaccaucaagaagcccaacgagcucagccgcgugcugggccugaagacccucgccacccacgggcuggccgccgucaacuccgugcccugggacacgaucgccaacuacgcgaagccguuccugaacaagguggucagcaccaccaccaacaucgugacgcgcugccucaaccgggugugcaccaacuacaugcccuacuucuucacccugcugcuccagcugugcaccuucacccgcuccacgaacagccggaucaaggccuccaugcccaccaccaucgccaagaacaccgucaagagcgugggcaaguucugccuggaggccagcuucaacuaccucaagucccccaacuucagcaagcugaucaacaucaucaucugguuccugcuccuguccgugugccugggcagccucaucuacuccacggccgcgcuggggguccugaugagcaaccucggcaugccguccuacugcaccggguaccgcgagggcuaccugaacagcaccaacgugaccaucgccacguacugcaccggcuccauccccugcagcgugugccuguccgggcucgacagccuggacaccuaccccucccuggagaccauccagaucacgaucagcuccuucaagugggaccucaccgccuucggccuggucgccgagugguuccuggccuacauccucuucacccgguucuucuacgugcuggggcuggcggccaucaugcagcucuucuucagcuacuucgccgugcacuucaucuccaacagcuggcugauguggcugaucaucaaccugguccagauggcccccaucuccgcgauggugcgcauguacaucuucuucgccagcuucuacuacguguggaagagcuacguccacgugguggacggcugcaacuccagcaccugcaugaugugcuacaagcggaaccgcgccacgcgggucgagugcaccaccaucgugaacgggguccgccgguccuucuacguguacgccaacggcggcaagggguucugcaagcuccacaacuggaacugcgugaacugcgacaccuucugcgccggcagcacguucaucuccgacgaggucgcgcgcgaccugagccugcaguucaagcggccgaucaaccccaccgaccaguccagcuacaucguggacuccgugaccgucaagaacgggagcauccaccucuacuucgacaaggccggccagaagaccuacgagcgccacucccugagccacuucgugaaccuggacaaccuccgggccaacaacacgaaggggucccugcccaucaacgugaucgucuucgacggcaagagcaagugcgaggaguccagcgccaaguccgccagcguguacuacucccagcugaugugccagcccauccuccugcuggaccaggcgcucgugagcgacgucggcgacagcgccgagguggccgugaagauguucgacgccuacgucaacaccuucuccagcaccuucaacgugccgauggagaagcugaagacccugguggccacggcggaggccgagcucgccaagaacgucucccuggacaacgugcugagcaccuucaucuccgccgcgcgccagggguucguggacagcgacgucgagaccaaggacgugguggagugccucaagcugucccaccagagcgacaucgaggucaccggcgacuccugcaacaacuacaugcugacguacaacaagguggagaacaugaccccccgggaccucggggccugcaucgacugcagcgcccgccacaucaacgcccagguggccaagucccacaacaucgcgcugaucuggaacgucaaggacuucaugagccuguccgagcagcuccggaagcagauccgcagcgccgccaagaagaacaaccugcccuucaagcugaccugcgccaccacgcgccagguggugaacgucgugaccaccaagaucgcccucaagggcggguga

SEQ ID NO: 17635 - RNA, 5841 nt, Artificial Sequence
  SARS-CoV-2__MT913130.1__non-structural protein 3 (NSP3) CDS gc
auggcccccaccaaggugaccuucggcgacgacacggucaucgaggugcagggguacaagagcgugaacaucaccuucgagcuggacgagcgcaucgacaagguccucaacgagaagugcuccgccuacaccguggagcugggcaccgaggugaacgaguucgcgugcgucguggccgacgccgugaucaagacgcugcagccggucagcgagcuccugaccccccuggggaucgaccucgacgagugguccauggccaccuacuaccuguucgacgagagcggcgaguucaagcuggccucccacauguacugcagcuucuacccccccgacgaggacgaggaggagggggacugcgaggaggaggaguucgagccguccacccaguacgaguacggcacggaggacgacuaccagggcaagccccucgaguucggggcgaccagcgccgcccugcagcccgaggaggagcaggaggaggacuggcuggacgacgacucccagcagaccgugggccagcaggacgggagcgaggacaaccagaccacgaccauccagaccaucguggagguccagccccagcucgagauggagcugaccccgguggugcagacgaucgaggucaacuccuucagcggcuaccugaagcucaccgacaacguguacaucaagaacgccgacaucguggaggaggcgaagaaggucaagcccaccgugguggucaacgccgccaacguguaccugaagcacgggggcggcguggccggggcccugaacaaggcgaccaacaacgccaugcaggucgaguccgacgacuacaucgccacgaacggcccccucaagguggggggcagcugcguccuguccggccacaaccuggccaagcacugccuccacgugguggggcccaacgucaacaagggcgaggacauccagcugcugaagagcgccuacgagaacuucaaccagcacgaggugcuccuggcgccgcugcucuccgccgggaucuucggcgccgaccccauccacagccugcgggugugcgucgacaccgugcgcaccaacguguaccuggccgucuucgacaagaaccucuacgacaagcugguguccagcuuccuggagaugaagagcgagaagcagguggagcagaagaucgccgagauccccaaggaggaggucaagcccuucaucaccgaguccaagccgagcguggagcagcggaagcaggacgacaagaagaucaaggcgugcguggaggaggucacgaccacccucgaggagaccaaguuccugacggagaaccugcuccuguacaucgacaucaacgggaaccugcaccccgacuccgccacccucgugagcgacaucgacaucaccuuccugaacaaggacgcccccuacaucgugggcgacgucgugcaggagggcgugcugaccgccgucgugauccccacgaagaaggccgggggcaccaccgagaugcucgcgaaggcccugcgcaaggugccgaccgacaacuacaucacgaccuaccccgggcagggccugaacggguacaccgucgaggaggccaagaccgugcucaagaagugcaaguccgccuucuacauccugcccagcaucaucuccaacgagaagcaggagauccugggcaccgugagcuggaaccuccgggagaugcuggcgcacgccgaggagacgcgcaagcugaugcccgucugcguggagaccaaggccaucguguccaccauccagcggaaguacaagggcaucaagauccaggagggggucguggacuacggcgcccgcuucuacuucuacaccagcaagacgaccguggccucccugaucaacacccucaacgaccugaacgagacccuggucacgaugccgcucggguacgugacccacggccugaaccuggaggaggcggcccgguacaugcgcagccucaaggugcccgccaccgucuccgugagcucccccgacgccgugaccgccuacaacggguaccugacgagcuccagcaagacccccgaggagcacuucaucgagaccaucucccuggcgggcagcuacaaggacuggagcuacuccggccagagcacccagcucgggaucgaguuccugaagcggggcgacaaguccgucuacuacacgagcaacccgaccaccuuccaccuggacggggaggugaucaccuucgacaaccucaagacgcugcugucccuccgcgaggugcggaccaucaaggucuucaccaccguggacaacaucaaccugcacacgcagguggucgacaugagcaugaccuacggccagcaguucggccccaccuaccuggacggggccgacgugaccaagaucaagccccacaacucccacgagggcaagacguucuacgugcucccgaacgacgacacccugcgcgucgaggccuucgaguacuaccacaccaccgaccccagcuuccuggggcgguacauguccgcccucaaccacacgaagaaguggaaguacccccaggugaacggccugaccagcaucaagugggccgacaacaacugcuaccuggcgaccgcccuccugacccugcagcagaucgagcucaaguucaaccccccggcccugcaggacgccuacuaccgcgcgcgggccggggaggccgccaacuucugcgcccugauccucgcguacugcaacaagacggugggcgagcugggcgacguccgcgagaccauguccuaccuguuccagcacgccaaccucgacagcugcaagcgggugcugaacgucgugugcaagaccugcgggcagcagcagaccacccugaagggcguggaggccgucauguacauggggacgcucuccuacgagcaguucaagaagggcgugcagauccccugcaccugcgggaagcaggccaccaaguaccuggugcagcaggagagccccuucgucaugauguccgcccccccggcgcaguacgagcugaagcacggcaccuucacgugcgccagcgaguacaccggcaacuaccagugcgggcacuacaagcacaucaccuccaaggagacccucuacugcaucgacggcgcccugcugacgaagagcagcgaguacaaggggcccaucaccgacguguucuacaaggagaacuccuacaccaccacgaucaagcccgugaccuacaagcucgacggcgucgugugcaccgagaucgaccccaagcuggacaacuacuacaagaaggacaacagcuacuucaccgagcagccgaucgaccuggugcccaaccagcccuaccccaacgccuccuucgacaacuucaaguucgucugcgacaacaucaaguucgccgacgaccucaaccagcugacgggguacaagaagccggcgagccgcgagcugaaggugaccuucuuccccgaccucaacggcgacguggucgccaucgacuacaagcacuacacccccuccuucaagaagggcgccaagcugcugcacaagcccaucguguggcacgugaacaacgccaccaacaaggcgacguacaagccgaacaccuggugcauccggugccucuggagcaccaagcccgucgagaccuccaacagcuucgacgugcugaaguccgaggacgcccaggggauggacaaccuggccugcgaggaccucaagcccgugagcgaggaggucguggagaaccccacgauccagaaggacgugcuggagugcaacgucaagaccaccgagguggugggcgacaucauccugaagccggccaacaacucccucaagaucaccgaggaggucgggcacacggaccugauggccgcguacguggacaacagcucccugaccaucaagaagcccaacgagcucagccgcgugcugggccugaagacccucgccacccacgggcuggccgccgucaacuccgugcccugggacacgaucgccaacuacgcgaagccguuccugaacaagguggucagcaccaccaccaacaucgugacgcgcugccucaaccgggugugcaccaacuacaugcccuacuucuucacccugcugcuccagcugugcaccuucacccgcuccacgaacagccggaucaaggccuccaugcccaccaccaucgccaagaacaccgucaagagcgugggcaaguucugccuggaggccagcuucaacuaccucaagucccccaacuucagcaagcugaucaacaucaucaucugguuccugcuccuguccgugugccugggcagccucaucuacuccacggccgcgcuggggguccugaugagcaaccucggcaugccguccuacugcaccggguaccgcgagggcuaccugaacagcaccaacgugaccaucgccacguacugcaccggcuccauccccugcagcgugugccuguccgggcucgacagccuggacaccuaccccucccuggagaccauccagaucacgaucagcuccuucaagugggaccucaccgccuucggccuggucgccgagugguuccuggccuacauccucuucacccgguucuucuacgugcuggggcuggcggccaucaugcagcucuucuucagcuacuucgccgugcacuucaucuccaacagcuggcugauguggcugaucaucaaccugguccagauggcccccaucuccgcgauggugcgcauguacaucuucuucgccagcuucuacuacguguggaagagcuacguccacgugguggacggcugcaacuccagcaccugcaugaugugcuacaagcggaaccgcgccacgcgggucgagugcaccaccaucgugaacgggguccgccgguccuucuacguguacgccaacggcggcaagggguucugcaagcuccacaacuggaacugcgugaacugcgacaccuucugcgccggcagcacguucaucuccgacgaggucgcgcgcgaccugagccugcaguucaagcggccgaucaaccccaccgaccaguccagcuacaucguggacuccgugaccgucaagaacgggagcauccaccucuacuucgacaaggccggccagaagaccuacgagcgccacucccugagccacuucgugaaccuggacaaccuccgggccaacaacacgaaggggucccugcccaucaacgugaucgucuucgacggcaagagcaagugcgaggaguccagcgccaaguccgccagcguguacuacucccagcugaugugccagcccauccuccugcuggaccaggcgcucgugagcgacgucggcgacagcgccgagguggccgugaagauguucgacgccuacgucaacaccuucuccagcaccuucaacgugccgauggagaagcugaagacccugguggccacggcggaggccgagcucgccaagaacgucucccuggacaacgugcugagcaccuucaucuccgccgcgcgccagggguucguggacagcgacgucgagaccaaggacgugguggagugccucaagcugucccaccagagcgacaucgaggucaccggcgacuccugcaacaacuacaugcugacguacaacaagguggagaacaugaccccccgggaccucggggccugcaucgacugcagcgcccgccacaucaacgcccagguggccaagucccacaacaucgcgcugaucuggaacgucaaggacuucaugagccuguccgagcagcuccggaagcagauccgcagcgccgccaagaagaacaaccugcccuucaagcugaccugcgccaccacgcgccagguggugaacgucgugaccaccaagaucgcccucaagggcggguga

SEQ ID NO: 17636 - RNA, 5841 nt, Artificial Sequence
  SARS-CoV-2__MT913139.1__non-structural protein 3 (NSP3) CDS gc
auggcccccaccaaggugaccuucggcgacgacacggucaucgaggugcagggguacaagagcgugaacaucaccuucgagcuggacgagcgcaucgacaagguccucaacgagaagugcuccgccuacaccguggagcugggcaccgaggugaacgaguucgcgugcgucguggccgacgccgugaucaagacgcugcagccggucagcgagcuccugaccccccuggggaucgaccucgacgagugguccauggccaccuacuaccuguucgacgagagcggcgaguucaagcuggccucccacauguacugcagcuucuacccccccgacgaggacgaggaggagggggacugcgaggaggaggaguucgagccguccacccaguacgaguacggcacggaggacgacuaccagggcaagccccucgaguucggggcgaccagcgccgcccugcagcccgaggaggagcaggaggaggacuggcuggacgacgacucccagcagaucgugggccagcaggacgggagcgaggacaaccagaccaccacgauccagaccaucguggagguccagccccagcucgagauggagcugaccccgguggugcagaccaucgaggucaacuccuucagcggcuaccugaagcucacggacaacguguacaucaagaacgccgacaucguggaggaggcgaagaaggucaagcccaccgugguggucaacgccgccaacguguaccugaagcacgggggcggcguggccggggcccugaacaaggcgaccaacaacgccaugcaggucgaguccgacgacuacaucgccaccaacggcccccucaagguggggggcagcugcguccuguccggccacaaccuggccaagcacugccuccacgugguggggcccaacgucaacaagggcgaggacauccagcugcugaagagcgccuacgagaacuucaaccagcacgaggugcuccuggcgccgcugcucuccgccgggaucuucggcgccgaccccauccacagccugcgggugugcgucgacacggugcgcaccaacguguaccuggccgucuucgacaagaaccucuacgacaagcugguguccagcuuccuggagaugaagagcgagaagcagguggagcagaagaucgccgagauccccaaggaggaggucaagcccuucaucaccgaguccaagccgagcguggagcagcggaagcaggacgacaagaagaucaaggcgugcguggaggaggucaccacgacccucgaggagaccaaguuccugaccgagaaccugcuccuguacaucgacaucaacgggaaccugcaccccgacuccgccacgcucgugagcgacaucgacaucaccuuccugaagaaggacgcccccuacaucgugggcgacgucgugcaggagggcgugcugaccgccgucgugauccccaccaagaaggccgggggcacgaccgagaugcucgcgaaggcccugcgcaaggugccgaccgacaacuacaucaccacguaccccgggcagggccugaacggguacaccgucgaggaggccaagaccgugcucaagaagugcaaguccgccuucuacauccugcccagcaucaucuccaacgagaagcaggagauccugggcaccgugagcuggaaccuccgggagaugcuggcgcacgccgaggagacccgcaagcugaugcccgucugcguggagacgaaggccaucguguccaccauccagcggaaguacaagggcaucaagauccaggagggggucguggacuacggcgcccgcuucuacuucuacaccagcaagaccacgguggccucccugaucaacacccucaacgaccugaacgagacccuggucaccaugccgcucggguacgugacgcacggccugaaccuggaggaggcggcccgguacaugcgcagccucaaggugcccgccaccgucuccgugagcucccccgacgccgugaccgccuacaacggguaccugaccagcuccagcaagacgcccgaggagcacuucaucgagaccaucucccuggcgggcagcuacaaggacuggagcuacuccggccagagcacccagcucgggaucgaguuccugaagcggggcgacaaguccgucuacuacaccagcaacccgacgaccuuccaccuggacggggaggugaucaccuucgacaaccucaagacccugcugucccuccgcgaggugcggacgaucaaggucuucaccaccguggacaacaucaaccugcacacccagguggucgacaugagcaugacguacggccagcaguucggccccaccuaccuggacggggccgacgugaccaagaucaagccccacaacucccacgagggcaagaccuucuacgugcucccgaacgacgacacgcugcgcgucgaggccuucgaguacuaccacaccaccgaccccagcuuccuggggcgguacauguccgcccucaaccacaccaagaaguggaaguacccccaggugaacggccugacgagcaucaagugggccgacaacaacugcuaccuggcgaccgcccuccugacccugcagcagaucgagcucaaguucaaccccccggcccugcaggacgccuacuaccgcgcgcgggccggggaggccgccaacuucugcgcccugauccucgcguacugcaacaagaccgugggcgagcugggcgacguccgcgagacgauguccuaccuguuccagcacgccaaccucgacagcugcaagcgggugcugaacgucgugugcaagaccugcgggcagcagcagaccacccugaagggcguggaggccgucauguacauggggacccucuccuacgagcaguucaagaagggcgugcagauccccugcacgugcgggaagcaggccaccaaguaccuggugcagcaggagagccccuucgucaugauguccgcccccccggcgcaguacgagcugaagcacggcaccuucaccugcgccagcgaguacacgggcaacuaccagugcgggcacuacaagcacaucaccuccaaggagacccucuacugcaucgacggcgcccugcugaccaagagcagcgaguacaaggggcccaucacggacguguucuacaaggagaacuccuacaccaccaccaucaagcccgugacguacaagcucgacggcgucgugugcaccgagaucgaccccaagcuggacaacuacuacaagaaggacaacagcuacuucaccgagcagccgaucgaccuggugcccaaccagcccuaccccaacgccuccuucgacaacuucaaguucgucugcgacaacaucaaguucgccgacgaccucaaccagcugaccggguacaagaagccggcgagccgcgagcugaaggugacguucuuccccgaccucaacggcgacguggucgccaucgacuacaagcacuacacccccuccuucaagaagggcgccaagcugcugcacaagcccaucguguggcacgugaacaacgccaccaacaaggcgaccuacaagccgaacacguggugcauccggugccucuggagcaccaagcccgucgagaccuccaacagcuucgacgugcugaaguccgaggacgcccaggggauggacaaccuggccugcgaggaccucaagcccgugagcgaggaggucguggagaaccccaccauccagaaggacgugcuggagugcaacgucaagacgaccgagguggugggcgacaucauccugaagccggccaacaacucccucaagaucaccgaggaggucgggcacaccgaccugauggccgcguacguggacaacagcucccugacgaucaagaagcccaacgagcucagccgcgugcugggccugaagacccucgccacccacgggcuggccgccgucaacuccgugcccugggacaccaucgccaacuacgcgaagccguuccugaacaagguggucagcacgaccaccaacaucgugacccgcugccucaaccgggugugcacgaacuacaugcccuacuucuucacccugcugcuccagcugugcaccuucacccgcuccaccaacagccggaucaaggccuccaugcccacgaccaucgccaagaacaccgucaagagcgugggcaaguucugccuggaggccagcuucaacuaccucaagucccccaacuucagcaagcugaucaacaucaucaucugguuccugcuccuguccgugugccugggcagccucaucuacuccaccgccgcgcuggggguccugaugagcaaccucggcaugccguccuacugcacgggguaccgcgagggcuaccugaacagcaccaacgugaccaucgccaccuacugcacgggcuccauccccugcagcgugugccuguccgggcucgacagccuggacaccuaccccucccuggagaccauccagaucaccaucagcuccuucaagugggaccucacggccuucggccuggucgccgagugguuccuggccuacauccucuucacccgguucuucuacgugcuggggcuggcggccaucaugcagcucuucuucagcuacuucgccgugcacuucaucuccaacagcuggcugauguggcugaucaucaaccugguccagauggcccccaucuccgcgauggugcgcauguacaucuucuucgccagcuucuacuacguguggaagagcuacguccacgugguggacggcugcaacuccagcaccugcaugaugugcuacaagcggaaccgcgccacccgggucgagugcacgaccaucgugaacgggguccgccgguccuucuacguguacgccaacggcggcaagggguucugcaagcuccacaacuggaacugcgugaacugcgacaccuucugcgccggcagcaccuucaucuccgacgaggucgcgcgcgaccugagccugcaguucaagcggccgaucaaccccacggaccaguccagcuacaucguggacuccgugaccgucaagaacgggagcauccaccucuacuucgacaaggccggccagaagaccuacgagcgccacucccugagccacuucgugaaccuggacaaccuccgggccaacaacaccaaggggucccugcccaucaacgugaucgucuucgacggcaagagcaagugcgaggaguccagcgccaaguccgccagcguguacuacucccagcugaugugccagcccauccuccugcuggaccaggcgcucgugagcgacgucggcgacagcgccgagguggccgugaagauguucgacgccuacgucaacacguucuccagcaccuucaacgugccgauggagaagcugaagacccugguggccaccgcggaggccgagcucgccaagaacgucucccuggacaacgugcugagcacguucaucuccgccgcgcgccagggguucguggacagcgacgucgagaccaaggacgugguggagugccucaagcugucccaccagagcgacaucgaggucaccggcgacuccugcaacaacuacaugcugaccuacaacaagguggagaacaugacgccccgggaccucggggccugcaucgacugcagcgcccgccacaucaacgcccagguggccaagucccacaacaucgcgcugaucuggaacgucaaggacuucaugagccuguccgagcagcuccggaagcagauccgcagcgccgccaagaagaacaaccugcccuucaagcugaccugcgccaccacccgccagguggugaacgucgugacgaccaagaucgcccucaagggcggguga

SEQ ID NO: 17637 - RNA, 5841 nt, Artificial Sequence
  SARS-CoV-2__MT913142.1__non-structural protein 3 (NSP3) CDS gc
auggcccccaccaaggugaccuucggcgacgacacggucaucgaggugcagggguacaagagcgugaacaucaccuucgagcuggacgagcgcaucgacaagguccucaacgagaagugcuccgccuacaccguggagcugggcaccgaggugaacgaguucgcgugcgucguggccgacgccgugaucaagacgcugcagccggucagcgagcuccugaccccccuggggaucgaccucgacgagugguccauggccaccuacuaccuguucgacgagagcggcgaguucaagcuggccucccacauguacugcagcuucuacccccccgacgaggacgaggaggagggggacugcgaggaggaggaguucgagccguccacccaguacgaguacggcacggaggacgacuaccagggcaagccccucgaguucggggcgaacagcgccgcccugcagcccgaggaggagcaggaggaggacuggcuggacgacgacucccagcagaccgugggccagcaggacgggagcgaggacaaccagaccaccacgauccagaccaucguggagguccagccccagcucgagauggagcugaccccgguggugcagaccaucgaggucaacuccuucagcggcuaccugaagcucacggacaacguguacaucaagaacgccgacaucguggaggaggcgaagaaggucaagcccaccgugguggucaacgccgccaacguguaccugaagcacgggggcggcguggccggggcccugaacaaggcgaccaacaacgccaugcaggucgaguccgacgacuacaucgccaccaacggcccccucaagguggggggcagcugcguccuguccggccacaaccuggccaagcacugccuccacgugguggggcccaacgucaacaagggcgaggacauccagcugcugaagagcgccuacgagaacuucaaccagcacgaggugcuccuggcgccgcugcucuccgccgggaucuucggcgccgaccccauccacagccugcgggugugcgucgacacggugcgcaccaacguguaccuggccgucuucgacaagaaccucuacgacaagcugguguccagcuuccuggagaugaagagcgagaagcagguggagcagaagaucgccgagauccccaaggaggaggucaagcccuucaucaccgaguccaagccgagcguggagcagcggaagcaggacgacaagaagaucaaggcgugcguggaggaggucaccacgacccucgaggagaccaaguuccugaccgagaaccugcuccuguacaucgacaucaacgggaaccugcaccccgacuccgccacgcucgugagcgacaucgacaucaccuuccugaagaaggacgcccccuacaucgugggcgacgucgugcaggagggcgugcugaccgccgucgugauccccaccaagaaggccgggggcacgaccgagaugcucgcgaaggcccugcgcaaggugccgaccgacaacuacaucaccacguaccccgggcagggccugaacggguacaccgucgaggaggccaagaccgugcucaagaagugcaaguccgccuucuacauccugcccagcaucaucuccaacgagaagcaggagauccugggcaccgugagcuggaaccuccgggagaugcuggcgcacgccgaggagacccgcaagcugaugcccgucugcguggagacgaaggccaucguguccaccauccagcggaaguacaagggcaucaagauccaggagggggucguggacuacggcgcccgcuucuacuucuacaccagcaagaccacgguggccucccugaucaacacccucaacgaccugaacgagacccuggucaccaugccgcucggguacgugacgcacggccugaaccuggaggaggcggcccgguacaugcgcagccucaaggugcccgccaccgucuccgugagcucccccgacgccgugaccgccuacaacggguaccugaccagcuccagcaagacgcccgaggagcacuucaucgagaccaucucccuggcgggcagcuacaaggacuggagcuacuccggccagagcacccagcucgggaucgaguuccugaagcggggcgacaaguccgucuacuacaccagcaacccgacgaccuuccaccuggacggggaggugaucaccuucgacaaccucaagacccugcugucccuccgcgaggugcggacgaucaaggucuucaccaccguggacaacaucaaccugcacacccagguggucgacaugagcaugacguacggccagcaguucggccccaccuaccuggacggggccgacgugaccaagaucaagccccacaacucccacgagggcaagaccuucuacgugcucccgaacgacgacacgcugcgcgucgaggccuucgaguacuaccacaccaccgacagcuccuuccuggggcgguacaugagcgcccucaaccacaccaagaaguggaaguacccccaggugaacggccugacguccaucaagugggccgacaacaacugcuaccuggcgaccgcccuccugacccugcagcagaucgagcucaaguucaacccccccgcccugcaggacgccuacuaccgcgcgcgggccggggaggccgccaacuucugcgcccugauccucgcguacugcaacaagaccgugggcgagcugggcgacguccgcgagacgaugagcuaccuguuccagcacgccaaccucgacuccugcaagcgggugcugaacgucgugugcaagaccugcgggcagcagcagaccacccugaagggcguggaggccgucauguacauggggacccucagcuacgagcaguucaagaagggcgugcagaucccgugcacgugcgggaagcaggccaccaaguaccuggugcagcaggagucccccuucgucaugaugagcgccccccccgcgcaguacgagcugaagcacggcaccuucaccugcgccuccgaguacacgggcaacuaccagugcgggcacuacaagcacaucaccagcaaggagacccucuacugcaucgacggcgcccugcugaccaagagcuccgaguacaaggggccgaucacggacguguucuacaaggagaacagcuacaccaccaccaucaagcccgugacguacaagcucgacggcgucgugugcaccgagaucgaccccaagcuggacaacuacuacaagaaggacaacuccuacuucaccgagcagcccaucgaccuggugccgaaccagcccuaccccaacgccagcuucgacaacuucaaguucgucugcgacaacaucaaguucgccgacgaccucaaccagcugaccggguacaagaagcccgcgucccgcgagcugaaggugacguucuucccggaccucaacggcgacguggucgccaucgacuacaagcacuacacccccagcuucaagaagggcgccaagcugcugcacaagcccaucguguggcacgugaacaacgccaccaacaaggcgaccuacaagcccaacacguggugcauccggugccucugguccaccaagccggucgagaccagcaacuccuucgacgugcugaagagcgaggacgcccaggggauggacaaccuggccugcgaggaccucaagcccguguccgaggaggucguggagaaccccaccauccagaaggacgugcuggagugcaacgucaagacgaccgagguggugggcgacaucauccugaagcccgccaacaacagccucaagaucaccgaggaggucgggcacaccgaccugauggccgcguacguggacaacuccagccugacgaucaagaagccgaacgagcucucccgcgugcugggccugaagacccucgccacccacgggcuggccgccgucaacagcgugcccugggacaccaucgccaacuacgcgaagcccuuccugaacaagguggucuccacgaccaccaacaucgugacccgcugccucaaccgggugugcacgaacuacaugccguacuucuucacccugcugcuccagcugugcaccuucacccgcagcaccaacucccggaucaaggccagcaugcccacgaccaucgccaagaacaccgucaagagcgugggcaaguucugccuggaggccuccuucaacuaccucaagagccccaacuucuccaagcugaucaacaucaucaucugguuccugcuccugagcgugugccugggcucccucaucuacagcaccgccgcgcuggggguccugauguccaaccucggcaugcccagcuacugcacgggguaccgcgagggcuaccugaacuccaccaacgugaccaucgccaccuacugcacgggcagcaucccgugcuccgugugccugagcgggcucgacucccuggacaccuaccccagccuggagaccauccagaucaccaucuccagcuucaagugggaccucacggccuucggccuggucgccgagugguuccuggccuacauccucuucacccgguucuucuacgugcuggggcuggcggccaucaugcagcucuucuucuccuacuucgccgugcacuucaucagcaacuccuggcugauguggcugaucaucaaccugguccagauggcccccaucagcgcgauggugcgcauguacaucuucuucgccagcuucuacuacguguggaaguccuacguccacgugguggacggcugcaacagcuccaccugcaugaugugcuacaagcggaaccgcgccacccgggucgagugcacgaccaucgugaacgggguccgccggagcuucuacguguacgccaacggcggcaagggguucugcaagcuccacaacuggaacugcgugaacugcgacaccuucugcgccggcuccaccuucaucagcgacgaggucgcgcgcgaccugucccugcaguucaagcggcccaucaacccgacggaccagagcuccuacaucguggacagcgugaccgucaagaacggguccauccaccucuacuucgacaaggccggccagaagaccuacgagcgccacagccugucccacuucgugaaccuggacaaccuccgggccaacaacaccaaggggagccugcccaucaacgugaucgucuucgacggcaaguccaagugcgaggagagcuccgccaagagcgccuccguguacuacagccagcugaugugccagcccauccuccugcuggaccaggcgcucgugagcgacgucggcgacuccgccgagguggccgugaagauguucgacgccuacgucaacacguucagcuccaccuucaacgugcccauggagaagcugaagacccugguggccaccgcggaggccgagcucgccaagaacgucagccuggacaacgugcuguccacguucaucagcgccgcgcgccagggguucguggacuccgacgucgagaccaaggacgugguggagugccucaagcugagccaccaguccgacaucgaggucaccggcgacagcugcaacaacuacaugcugaccuacaacaagguggagaacaugacgccgcgggaccucggggccugcaucgacugcuccgcccgccacaucaacgcccagguggccaagagccacaacaucgcgcugaucuggaacgucaaggacuucaugucccugagcgagcagcuccggaagcagauccgcuccgccgccaagaagaacaaccugcccuucaagcugaccugcgccaccacccgccagguggugaacgucgugacgaccaagaucgcccucaagggcggguga

SEQ ID NO: 17638 - RNA, 5841 nt, Artificial Sequence
  SARS-CoV-2__MT913146.1__non-structural protein 3 (NSP3) CDS gc
auggcccccaccaaggugaccuucggcgacgacacggucaucgaggugcagggguacaagagcgugaacaucaccuucgagcuggacgagcgcaucgacaagguccucaacgagaagugcuccgccuacaccguggagcugggcaccgaggugaacgaguucgcgugcgucguggccgacgccgugaucaagacgcugcagccggucagcgagcuccugaucccccuggggaucgaccucgacgagugguccauggccaccuacuaccuguucgacgagagcggcgaguucaagcuggccucccacauguacugcagcuucuacccccccgacgaggacgaggaggagggggacugcgaggaggaggaguucgagccguccacccaguacgaguacggcaccgaggacgacuaccagggcaagccccucgaguucggggcgacgagcgccgcccugcagcccgaggaggagcaggaggaggacuggcuggacgacgacucccagcagaccgugggccagcaggacgggagcgaggacaaccagaccaccacgauccagaccaucguggagguccagccccagcucgagauggagcugaccccgguggugcagaccaucgaggucaacuccuucagcggcuaccugaagcucacggacaacguguacaucaagaacgccgacaucguggaggaggcgaagaaggucaagcccaccgugguggucaacgccgccaacguguaccugaagcacgggggcggcguggccggggcccugaacaaggcgaccaacaacgccaugcaggucgaguccgacgacuacaucgccaccaacggcccccucaagguggggggcagcugcguccuguccggccacaaccuggccaagcacugccuccacgugguggggcccaacgucaacaagggcgaggacauccagcugcugaagagcgccuacgagaacuucaaccagcacgaggugcuccuggcgccgcugcucuccgccgggaucuucggcgccgaccccauccacagccugcgggugugcgucgacacggugcgcaccaacguguaccuggccgucuucgacaagaaccucuacgacaagcugguguccagcuuccuggagaugaagagcgagaagcagguggagcagaagaucgccgagauccccaaggaggaggucaagcccuucaucaccgaguccaagccgagcguggagcagcggaagcaggacgacaagaagaucaaggcgugcguggaggaggucaccacgacccucgaggagaccaaguuccugaccgagaaccugcuccuguacaucgacaucaacgggaaccugcaccccgacuccgccacgcucgugagcgacaucgacaucaccuuccugaagaaggacgcccccuacaucgugggcgacgucgugcaggagggcgugcugaccgccgucgugauccccaccaagaaggccgggggcacgaccgagaugcucgcgaaggcccugcgcaaggugccgaccgacaacuacaucaccacguaccccgggcagggccugaacggguacaccgucgaggaggccaagaccgugcucaagaagugcaaguccgccuucuacauccugcccagcaucaucuccaacgagaagcaggagauccugggcaccgugagcuggaaccuccgggagaugcuggcgcacgccgaggagacccgcaagcugaugcccgucugcguggagacgaaggccaucguguccaccauccagcggaaguacaagggcaucaagauccaggagggggucguggacuacggcgcccgcuucuacuucuacaccagcaagaccacgguggccucccugaucaacacccucaacgaccugaacgagacccuggucaccaugccgcucggguacgugacgcacggccugaaccuggaggaggcggcccgguacaugcgcagccucaaggugcccgccaccgucuccgugagcucccccgacgccgugaccgccuacaacggguaccugaccagcuccagcaagacgcccgaggagcacuucaucgagaccaucucccuggcgggcagcuacaaggacuggagcuacuccggccagagcacccagcucgggaucgaguuccugaagcggggcgacaaguccgucuacuacaccagcaacccgacgaccuuccaccuggacggggaggugaucaccuucgacaaccucaagacccugcugucccuccgcgaggugcggacgaucaaggucuucaccaccguggacaacaucaaccugcacacccagguggucgacaugagcaugacguacggccagcaguucggccccaccuaccuggacggggccgacgugaccaagaucaagccccacaacucccacgagggcaagaccuucuacgugcucccgaacgacgacacgcugcgcgucgaggccuucgaguacuaccacaccaccgaccccagcuuccuggggcgguacauguccgcccucaaccacaccaagaaguggaaguacccccaggugaacggccugacgagcaucaagugggccgacaacaacugcuaccuggcgaccgcccuccugacccugcagcagaucgagcucaaguucaaccccccggcccugcaggacgccuacuaccgcgcgcgggccggggaggccgccaacuucugcgcccugauccucgcguacugcaacaagaccgugggcgagcugggcgacguccgcgagacgauguccuaccuguuccagcacgccaaccucgacagcugcaagcgggugcugaacgucgugugcaagaccugcgggcagcagcagaccacccugaagggcguggaggccgucauguacauggggacccucuccuacgagcaguucaagaagggcgugcagauccccugcacgugcgggaagcaggccaccaaguaccuggugcagcaggagagccccuucgucaugauguccgcccccccggcgcaguacgagcugaagcacggcaccuucaccugcgccagcgaguacacgggcaacuaccagugcgggcacuacaagcacaucaccuccaaggagacccucuacugcaucgacggcgcccugcugaccaagagcagcgaguacaaggggcccaucacggacguguucuacaaggagaacuccuacaccaccaccaucaagcccgugacguacaagcucgacggcgucgugugcaccgagaucgaccccaagcuggacaacuacuacaagaaggacaacagcuacuucaccgagcagccgaucgaccuggugcccaaccagcccuaccccaacgccuccuucgacaacuucaaguucgucugcgacaacaucaaguucgccgacgaccucaaccagcugaccggguacaagaagccggcgagccgcgagcugaaggugacguucuuccccgaccucaacggcgacguggucgccaucgacuacaagcacuacacccccuccuucaagaagggcgccaagcugcugcacaagcccaucguguggcacgugaacaacgccaccaacaaggcgaccuacaagccgaacacguggugcauccggugccucuggagcaccaagcccgucgagaccuccaacagcuucgacgugcugaaguccgaggacgcccaggggauggacaaccuggccugcgaggaccucaagcccgugagcgaggaggucguggagaaccccaccauccagaaggacgugcuggagugcaacgucaagacgaccgagguggugggcgacaucauccugaagccggccaacaacucccucaagaucaccgaggaggucgggcacaccgaccugauggccgcguacguggacaacagcucccugacgaucaagaagcccaacgagcucagccgcgugcugggccugaagacccucgccacccacgggcuggccgccgucaacuccgugcccugggacaccaucgccaacuacgcgaagccguuccugaacaagguggucagcacgaccaccaacaucgugacccgcugccucaaccgggugugcacgaacuacaugcccuacuucuucacccugcugcuccagcugugcaccuucacccgcuccaccaacagccggaucaaggccuccaugcccacgaccaucgccaagaacaccgucaagagcgugggcaaguucugccuggaggccagcuucaacuaccucaagucccccaacuucagcaagcugaucaacaucaucaucugguuccugcuccuguccgugugccugggcagccucaucuacuccaccgccgcgcuggggguccugaugagcaaccucggcaugccguccuacugcacgggguaccgcgagggcuaccugaacagcaccaacgugaccaucgccaccuacugcacgggcuccauccccugcagcgugugccuguccgggcucgacagccuggacaccuaccccucccuggagaccauccagaucaccaucagcuccuucaagugggaccucacggccuucggccuggucgccgagugguuccuggccuacauccucuucacccgguucuucuacgugcuggggcuggcggccaucaugcagcucuucuucagcuacuucgccgugcacuucaucuccaacagcuggcugauguggcugaucaucaaccugguccagauggcccccaucuccgcgauggugcgcauguacaucuucuucgccagcuucuacuacguguggaagagcuacguccacgugguggacggcugcaacuccagcaccugcaugaugugcuacaagcggaaccgcgccacccgggucgagugcacgaccaucgugaacgggguccgccgguccuucuacguguacgccaacggcggcaagggguucugcaagcuccacaacuggaacugcgugaacugcgacaccuucugcgccggcagcaccuucaucuccgacgaggucgcgcgcgaccugagccugcaguucaagcggccgaucaaccccacggaccaguccagcuacaucguggacuccgugaccgucaagaacgggagcauccaccucuacuucgacaaggccggccagaagaccuacgagcgccacucccugagccacuucgugaaccuggacaaccuccgggccaacaacaccaaggggucccugcccaucaacgugaucgucuucgacggcaagagcaagugcgaggaguccagcgccaaguccgccagcguguacuacucccagcugaugugccagcccauccuccugcuggaccaggcgcucgugagcgacgucggcgacagcgccgagguggccgugaagauguucgacgccuacgucaacacguucuccagcaccuucaacgugccgauggagaagcugaagacccugguggccaccgcggaggccgagcucgccaagaacgucucccuggacaacgugcugagcacguucaucuccgccgcgcgccagggguucguggacagcgacgucgagaccaaggacgugguggagugccucaagcugucccaccagagcgacaucgaggucaccggcgacuccugcaacaacuacaugcugaccuacaacaagguggagaacaugacgccccgggaccucggggccugcaucgacugcagcgcccgccacaucaacgcccagguggccaagucccacaacaucgcgcugaucuggaacgucaaggacuucaugagccuguccgagcagcuccggaagcagauccgcagcgccgccaagaagaacaaccugcccuucaagcugaccugcgccaccacccgccagguggugaacgucgugacgaccaagaucgcccucaagggcggguga

SEQ ID NO: 17639 - RNA, 5841 nt, Artificial Sequence
  SARS-CoV-2__MT913147.1__non-structural protein 3 (NSP3) CDS gc
auggcccccaccaaggugaccuucggcgacgacacggucaucgaggugcagggguacaagagcgugaacaucaccuucgagcuggacgagcgcaucgacaagguccucaacgagaagugcuccgccuacaccguggagcugggcaccgaggugaacgaguucgcgugcgucguggccgacgccgugaucaagacgcugcagccggucagcgagcuccugaccccccuggggaucgaccucgacgagugguccauggccaccuacuaccuguucgacgagagcggcgaguucaagcuggccucccacauguacugcagcuucuacccccccgacgaggacgaggaggagggggacugcgaggaggaggaguucgagccguccacccaguacgaguacggcacggaggacgacuaccagggcaagccccucgaguucggggcgaccagcgccgcccugcagcccgaggaggagcaggaggaggacuggcuggacgacgacucccagcagaccgugggccagcaggacgggagcgaggacaaccagaccacgaccauccagaccaucguggagguccagccccagcucgagauggagcugaccccgguggugcagacgaucgaggucaacuccuucagcggcuaccugaagcucaccgacaacguguacaucaagaacgccgacaucguggaggaggcgaagaaggucaagcccaccgugguggucaacgccgccaacguguaccugaagcacgggggcggcguggccggggcccugaacaaggcgaccaacaacgccaugcaggucgaguccgacgacuacaucgccacgaacggcccccucaagguggggggcagcugcguccuguccggccacaaccuggccaagcacugccuccacgugguggggcccaacgucaacaagggcgaggacauccagcugcugaagagcgccuacgagaacuucaaccagcacgaggugcuccuggcgccgcugcucuccgccgggaucuucggcgccgaccccauccacagccugcgggugugcgucgacaccgugcgcaccaacguguaccuggccgucuucgacaagaaccucuacgacaagcugguguccagcuuccuggagaugaagagcgagaagcagguggagcagaagaucgccgagauccccaaggaggaggucaagcccuucaucaccgaguccaagccgagcguggagcagcggaagcaggacgacaagaagaucaaggcgugcguggaggaggucacgaccauccucgaggagaccaaguuccugaccgagaaccugcuccuguacaucgacaucaacgggaaccugcaccccgacuccgccacgcucgugagcgacaucgacaucaccuuccugaagaaggacgcccccuacaucgugggcgacgucgugcaggagggcgugcugaccgccgucgugauccccaccaagaaggccgggggcacgaccgagaugcucgcgaaggcccugcgcaaggugccgaccgacaacuacaucaccacguaccccgggcagggccugaacggguacaccgucgaggaggccaagaccgugcucaagaagugcaaguccgccuucuacauccugcccagcaucaucuccaacgagaagcaggagauccugggcaccgugagcuggaaccuccgggagaugcuggcgcacgccgaggagacccgcaagcugaugcccgucugcguggagacgaaggccaucguguccaccauccagcggaaguacaagggcaucaagauccaggagggggucguggacuacggcgcccgcuucuacuucuacaccagcaagaccacgguggccucccugaucaacacccucaacgaccugaacgagacccuggucaccaugccgcucggguacgugacgcacggccugaaccuggaggaggcggcccgguacaugcgcagccucaaggugcccgccaccgucuccgugagcucccccgacgccgugaccgccuacaacggguaccugaccagcuccagcaagacgcccgaggagcacuucaucgagaccaucucccuggcgggcagcuacaaggacuggagcuacuccggccagagcacccagcucgggaucgaguuccugaagcggggcgacaaguccgucuacuacaccagcaacccgacgaccuuccaccuggacggggaggugaucaccuucgacaaccucaagacccugcugucccuccgcgaggugcggacgaucaaggucuucaccaccguggacaacaucaaccugcacacccagguggucgacaugagcaugacguacggccagcaguucggccccaccuaccuggacggggccgacgugaccaagaucaagccccacaacucccacgagggcaagaccuucuacgugcucccgaacgacgacacgcugcgcgucgaggccuucgaguacuaccacaccaccgaccccagcuuccuggggcgguacauguccgcccucaaccacaccaagaaguggaaguacccccaggugaacggccugacgagcaucaagugggccgacaacaacugcuaccuggcgaccgcccuccugacccugcagcagaucgagcucaaguucaaccccccggcccugcaggacgccuacuaccgcgcgcgggccggggaggccgccaacuucugcgcccugauccucgcguacugcaacaagaccgugggcgagcugggcgacguccgcgagacgauguccuaccuguuccagcacgccaaccucgacagcugcaagcgggugcugaacgucgugugcaagaccugcgggcagcagcagaccacccugaagggcguggaggccgucauguacauggggacccucuccuacgagcaguucaagaagggcgugcagauccccugcacgugcgggaagcaggccaccaaguaccuggugcagcaggagagccccuucgucaugauguccgcccccccggcgcaguacgagcugaagcacggcaccuucaccugcgccagcgaguacacgggcaacuaccagugcgggcacuacaagcacaucaccuccaaggagacccucuacugcaucgacggcgcccugcugaccaagagcagcgaguacaaggggcccaucacggacguguucuacaaggagaacuccuacaccaccaccaucaagcccgugacguacaagcucgacggcgucgugugcaccgagaucgaccccaagcuggacaacuacuacaagaaggacaacagcuacuucaccgagcagccgaucgaccuggugcccaaccagcccuaccccaacgccuccuucgacaacuucaaguucgucugcgacaacaucaaguucgccgacgaccucaaccagcugaccggguacaagaagccggcgagccgcgagcugaaggugacguucuuccccgaccucaacggcgacguggucgccaucgacuacaagcacuacacccccuccuucaagaagggcgccaagcugcugcacaagcccaucguguggcacgugaacaacgccaccaacaaggcgaccuacaagccgaacacguggugcauccggugccucuggagcaccaagcccgucgagaccuccaacagcuucgacgugcugaaguccgaggacgcccaggggauggacaaccuggccugcgaggaccucaagcccgugagcgaggaggucguggagaaccccaccauccagaaggacgugcuggagugcaacgucaagacgaccgagguggugggcgacaucauccugaagccggccaacaacucccucaagaucaccgaggaggucgggcacaccgaccugauggccgcguacguggacaacagcucccugacgaucaagaagcccaacgagcucagccgcgugcugggccugaagacccucgccacccacgggcuggccgccgucaacuccgugcccugggacaccaucgccaacuacgcgaagccguuccugaacaagguggucagcacgaccaccaacaucgugacccgcugccucaaccgggugugcacgaacuacaugcccuacuucuucacccugcugcuccagcugugcaccuucacccgcuccaccaacagccggaucaaggccuccaugcccacgaccaucgccaagaacaccgucaagagcgugggcaaguucugccuggaggccagcuucaacuaccucaagucccccaacuucagcaagcugaucaacaucaucaucugguuccugcuccuguccgugugccugggcagccucaucuacuccaccgccgcgcuggggguccugaugagcaaccucggcaugccguccuacugcacgggguaccgcgagggcuaccugaacagcaccaacgugaccaucgccaccuacugcacgggcuccauccccugcagcgugugccuguccgggcucgacagccuggacaccuaccccucccuggagaccauccagaucaccaucagcuccuucaagugggaccucacggccuucggccuggucgccgagugguuccuggccuacauccucuucacccgguucuucuacgugcuggggcuggcggccaucaugcagcucuucuucagcuacuucgccgugcacuucaucuccaacagcuggcugauguggcugaucaucaaccugguccagauggcccccaucuccgcgauggugcgcauguacaucuucuucgccagcuucuacuacguguggaagagcuacguccacgugguggacggcugcaacuccagcaccugcaugaugugcuacaagcggaaccgcgccacccgggucgagugcacgaccaucgugaacgggguccgccgguccuucuacguguacgccaacggcggcaagggguucugcaagcuccacaacuggaacugcgugaacugcgacaccuucugcgccggcagcaccuucaucuccgacgaggucgcgcgcgaccugagccugcaguucaagcggccgaucaaccccacggaccaguccagcuacaucguggacuccgugaccgucaagaacgggagcauccaccucuacuucgacaaggccggccagaagaccuacgagcgccacucccugagccacuucgugaaccuggacaaccuccgggccaacaacaccaaggggucccugcccaucaacgugaucgucuucgacggcaagagcaagugcgaggaguccagcgccaaguccgccagcguguacuacucccagcugaugugccagcccauccuccugcuggaccaggcgcucgugagcgacgucggcgacagcgccgagguggccgugaagauguucgacgccuacgucaacacguucuccagcaccuucaacgugccgauggagaagcugaagacccugguggccaccgcggaggccgagcucgccaagaacgucucccuggacaacgugcugagcacguucaucuccgccgcgcgccagggguucguggacagcgacgucgagaccaaggacgugguggagugccucaagcugucccaccagagcgacaucgaggucaccggcgacuccugcaacaacuacaugcugaccuacaacaagguggagaacaugacgccccgggaccucggggccugcaucgacugcagcgcccgccacaucaacgcccagguggccaagucccacaacaucgcgcugaucuggaacgucaaggacuucaugagccuguccgagcagcuccggaagcagauccgcagcgccgccaagaagaacaaccugcccuucaagcugaccugcgccaccacccgccagguggugaacgucgugacgaccaagaucgcccucaagggcggguga

SEQ ID NO: 17640 - RNA, 5841 nt, Artificial Sequence
  SARS-CoV-2__MT913148.1__non-structural protein 3 (NSP3) CDS gc
auggcccccaccaaggugaccuucggcgacgacacggucaucgaggugcagggguacaagagcgugaacaucaccuucgagcuggacgagcgcaucgacaagguccucaacgagaagugcuccgccuacaccguggagcugggcaccgaggugaacgaguucgcgugcgucguggccgacgccgugaucaagacgcugcagccggucagcgagcuccugaccccccuggggaucgaccucgacgagugguccauggccaccuacuaccuguucgacgagagcggcgaguucaagcuggccucccacauguacugcagcuucuacccccccgacgaggacgaggaggagggggacugcgaggaggaggaguucgagccguccacccaguacgaguacggcacggaggacgacuaccagggcaagccccucgaguucggggcgaccagcgccgcccugcagcccgaggaggagcaggaggaggacuggcuggacgacgacucccagcagaccgugggccagcaggacgggagcgaggacaaccagaccacgaccauccagaccaucguggagguccagccccagcucgagauggagcugaccccgguggugcagacgaucgaggucaacuccuucagcggcuaccugaagcucaccgacaacguguacaucaagaacgccgacaucguggaggaggcgaagaaggucaagcccaccgugguggucaacgccgccaacguguaccugaagcacgggggcggcguggccggggcccugaacaaggcgaccaacaacgccaugcaggucgaguccgacgacuacaucgccacgaacggcccccucaagguggggggcagcugcguccuguccggccacaaccuggccaagcacugccuccacgugguggggcccaacgucaacaagggcgaggacauccagcugcugaagagcgccuacgagaacuucaaccagcacgaggugcuccuggcgccgcugcucuccgccgggaucuucggcgccgaccccauccacagccugcgggugugcgucgacaccgugcgcaccaacguguaccuggccgucuucgacaagaaccucuacgacaagcugguguccagcuuccuggagaugaagagcgagaagcagguggagcagaagaucgccgagauccccaaggaggaggucaagcccuucaucaccgaguccaagccgagcguggagcagcggaagcaggacgacaagaagaucaaggcgugcguggaggaggucacgaccacccucgaggagaccaaguuccugacggagaaccugcuccuguacaucgacaucaacgggaaccugcaccccgacuccgccacccucgugagcgacaucgacaucaccuuccugaagaaggacgcccccuacaucgugggcgacgucgugcaggagggcgugcugaccgccgucgugauccccacgaagaaggccgggggcaccaccgagaugcucgcgaaggcccugcgcaaggugccgaccgacaacuacaucacgaccuaccccgggcagggccugaacggguacaccgucgaggaggccaagaccgugcucaagaagugcaaguccgccuucuacauccugcccagcaucaucuccaacgagaagcaggagauccugggcaccgugagcuggaaccuccgggagaugcuggcgcacgccgaggagacgcgcaagcugaugcccgucugcguggagaccaaggccaucguguccaccauccagcggaaguacaagggcaucaagauccaggagggggucguggacuacggcgcccgcuucuacuucuacaccagcaagacgaccguggccucccugaucaacacccucaacgaccugaacgagacccuggucacgaugccgcucggguacgugacccacggccugaaccuggaggaggcggcccgguacaugcgcagccucaaggugcccgccaccgucuccgugagcucccccgacgccgugaccgccuacaacggguaccugacgagcuccagcaagacccccgaggagcacuucaucgagaccaucucccuggcgggcagcuacaaggacuggagcuacuccggccagagcacccagcucgggaucgaguuccugaagcggggcgacaaguccgucuacuacacgagcaacccgaccaccuuccaccuggacggggaggugaucaccuucgacaaccucaagacgcugcugucccuccgcgaggugcggaccaucaaggucuucaccaccguggacaacaucaaccugcacacgcagguggucgacaugagcaugaccuacggccagcaguucggccccaccuaccuggacggggccgacgugaccaagaucaagccccacaacucccacgagggcaagacguucuacgugcucccgaacgacgacacccugcgcgucgaggccuucgaguacuaccacaucaccgaccccagcuuccuggggcgguacauguccgcccucaaccacaccaagaaguggaaguacccccaggugaacggccugacgagcaucaagugggccgacaacaacugcuaccuggcgaccgcccuccugacccugcagcagaucgagcucaaguucaaccccccggcccugcaggacgccuacuaccgcgcgcgggccggggaggccgccaacuucugcgcccugauccucgcguacugcaacaagaccgugggcgagcugggcgacguccgcgagacgauguccuaccuguuccagcacgccaaccucgacagcugcaagcgggugcugaacgucgugugcaagaccugcgggcagcagcagaccacccugaagggcguggaggccgucauguacauggggacccucuccuacgagcaguucaagaagggcgugcagauccccugcacgugcgggaagcaggccaccaaguaccuggugcagcaggagagccccuucgucaugauguccgcccccccggcgcaguacgagcugaagcacggcaccuucaccugcgccagcgaguacacgggcaacuaccagugcgggcacuacaagcacaucaccuccaaggagacccucuacugcaucgacggcgcccugcugaccaagagcagcgaguacaaggggcccaucacggacguguucuacaaggagaacuccuacaccaccaccaucaagcccgugacguacaagcucgacggcgucgugugcaccgagaucgaccccaagcugaacaacuacuacaagaaggacaacagcuacuucaccgagcagccgaucgaccuggugcccaaccagcccuaccccaacgccuccuucgacaacuucaaguucgucugcgacaacaucaaguucgccgacgaccucaaccagcugaccggguacaagaagccggcgagccgcgagcugaaggugacguucuuccccgaccucaacggcgacguggucgccaucgacuacaagcacuacacccccuccuucaagaagggcgccaagcugcugcacaagcccaucguguggcacgugaacaacgccaccaacaaggcgaccuacaagccgaacacguggugcauccggugccucuggagcaccaagcccgucgagaccuccaacagcuucgacgugcugaaguccgaggacgcccaggggauggacaaccuggccugcgaggaccucaagcccgugagcgaggaggucguggagaaccccaccauccagaaggacgugcuggagugcaacgucaagacgaccgagguggugggcgacaucauccugaagccggccaacaacucccucaagaucaccgaggaggucgggcacaccgaccugauggccgcguacguggacaacagcucccugacgaucaagaagcccaacgagcucagccgcgugcugggccugaagacccucgccacccacgggcuggccgccgucaacuccgugcccugggacaccaucgccaacuacgcgaagccguuccugaacaagguggucagcacgaccaccaacaucgugacccgcugccucaaccgggugugcacgaacuacaugcccuacuucuucacccugcugcuccagcugugcaccuucacccgcuccaccaacagccggaucaaggccuccaugcccacgaccaucgccaagaacaccgucaagagcgugggcaaguucugccuggaggccagcuucaacuaccucaagucccccaacuucagcaagcugaucaacaucaucaucugguuccugcuccuguccgugugccugggcagccucaucuacuccaccgccgcgcuggggguccugaugagcaaccucggcaugccguccuacugcacgggguaccgcgagggcuaccugaacagcaccaacgugaccaucgccaccuacugcacgggcuccauccccugcagcgugugccuguccgggcucgacagccuggacaccuaccccucccuggagaccauccagaucaccaucagcuccuucaagugggaccucacggccuucggccuggucgccgagugguuccuggccuacauccucuucacccgguucuucuacgugcuggggcuggcggccaucaugcagcucuucuucagcuacuucgccgugcacuucaucuccaacagcuggcugauguggcugaucaucaaccugguccagauggcccccaucuccgcgauggugcgcauguacaucuucuucgccagcuucuacuacguguggaagagcuacguccacgugguggacggcugcaacuccagcaccugcaugaugugcuacaagcggaaccgcgccacccgggucgagugcacgaccaucgugaacgggguccgccgguccuucuacguguacgccaacggcggcaagggguucugcaagcuccacaacuggaacugcgugaacugcgacaccuucugcgccggcagcaccuucaucuccgacgaggucgcgcgcgaccugagccugcaguucaagcggccgaucaaccccacggaccaguccagcuacaucguggacuccgugaccgucaagaacgggagcauccaccucuacuucgacaaggccggccagaagaccuacgagcgccacucccugagccacuucgugaaccuggacaaccuccgggccaacaacaccaaggggucccugcccaucaacgugaucgucuucgacggcaagagcaagugcgaggaguccagcgccaaguccgccagcguguacuacucccagcugaugugccagcccauccuccugcuggaccaggcgcucgugagcgacgucggcgacagcgccgagguggccgugaagauguucgacgccuacgucaacacguucuccagcaccuucaacgugccgauggagaagcugaagacccugguggccaccgcggaggccgagcucgccaagaacgucucccuggacaacgugcugagcacguucaucuccgccgcgcgccagggguucguggacagcgacgucgagaccaaggacgugguggagugccucaagcugucccaccagagcgacaucgaggucaccggcgacuccugcaacaacuacaugcugaccuacaacaagguggagaacaugacgccccgggaccucggggccugcaucgacugcagcgcccgccacaucaacgcccagguggccaagucccacaacaucgcgcugaucuggaacgucaaggacuucaugagccuguccgagcagcuccggaagcagauccgcagcgccgccaagaagaacaaccugcccuucaagcugaccugcgccaccacccgccagguggugaacgucgugacgaccaagaucgcccucaagggcggguga

SEQ ID NO: 17641 - RNA, 5841 nt, Artificial Sequence
  SARS-CoV-2__MT913149.1__non-structural protein 3 (NSP3) CDS gc
auggcccccaccaaggugaccuucggcgacgacacggucaucgaggugcagggguacaagagcgugaacaucaccuucgagcuggacgagcgcaucgacaagguccucaacgagaagugcuccgccuacaccguggagcugggcaccgaggugaacgaguucgcgugcgucguggccgacgccgugaucaagacgcugcagccggucagcgagcuccugaccccccuggggaucgaccucgacgagugguccauggccaccuacuaccuguucgacgagagcggcgaguucaagcuggccucccacauguacugcagcuucuacccccccgacgaggacgaggaggagggggacugcgaggaggaggaguucgagccguccacccaguacgaguacggcacggaggcggacuaccagggcaagccccucgaguucggggccaccagcgccgcccugcagcccgaggaggagcaggaggaggacuggcuggacgacgacucccagcagaccgugggccagcaggacgggagcgaggacaaccagaccacgaccauccagaccaucguggagguccagccccagcucgagauggagcugaccccgguggugcagacgaucgaggucaacuccuucagcggcuaccugaagcucaccgacaacguguacaucaagaacgcggacaucguggaggaggccaagaaggucaagcccaccgugguggucaacgccgccaacguguaccugaagcacgggggcggcguggccggggcgcugaacaaggccaccaacaacgccaugcaggucgaguccgacgacuacaucgccacgaacggcccccucaagguggggggcagcugcguccuguccggccacaaccuggccaagcacugccuccacgugguggggcccaacgucaacaagggcgaggacauccagcugcugaagagcgcguacgagaacuucaaccagcacgaggugcuccuggccccgcugcucuccgccgggaucuucggcgccgaccccauccacagccugcgggugugcgucgacaccgugcgcaccaacguguaccuggccgucuucgacaagaaccucuacgacaagcugguguccagcuuccuggagaugaagagcgagaagcagguggagcagaagaucgcggagauccccaaggaggaggucaagcccuucaucaccgaguccaagccgagcguggagcagcggaagcaggacgacaagaagaucaaggccugcguggaggaggucacgaccacccucgaggagaccaaguuccugacggagaaccugcuccuguacaucgacaucaacgggaaccugcaccccgacuccgccacccucgugagcgacaucgacaucaccuuccugaagaaggacgcccccuacaucgugggcgacgucgugcaggagggcgugcugaccgccgucgugauccccacgaagaaggcggggggcaccaccgagaugcucgccaaggcccugcgcaaggugccgaccgacaacuacaucacgaccuaccccgggcagggccugaacggguacaccgucgaggaggccaagaccgugcucaagaagugcaaguccgcguucuacauccugcccagcaucaucuccaacgagaagcaggagauccugggcaccgugagcuggaaccuccgggagaugcuggcccacgccgaggagacgcgcaagcugaugcccgucugcguggagaccaaggccaucguguccaccauccagcggaaguacaagggcaucaagauccaggagggggucguggacuacggcgcccgcuucuacuucuacaccagcaagacgaccguggcgucccugaucaacacccucaacgaccugaacgagacccuggucacgaugccgcucggguacgugacccacggccugaaccuggaggaggccgcccgguacaugcgcagccucaaggugcccgccaccgucuccgugagcucccccgacgccgugaccgcguacaacggguaccugacgagcuccagcaagacccccgaggagcacuucaucgagaccaucucccuggccggcagcuacaaggacuggagcuacuccggccagagcacccagcucgggaucgaguuccugaagcggggcgacaaguccgucuacuacacgagcaacccgaccaccuuccaccuggacggggaggugaucaccuucgacaaccucaagacgcugcugucccuccgcgaggugcggaccaucaaggucuucaccaccguggacaacaucaaccugcacacgcagguggucgacaugagcaugaccuacggccagcaguucggccccaccuaccuggacggggccgacgugaccaagaucaagccccacaacucccacgagggcaagacguucuacgugcucccgaacgacgacacccugcgcgucgaggccuucgaguacuaccacaccaccgaccccagcuuccuggggcgguacauguccgcccucaaccacacgaagaaguggaaguacccccaggugaacggccugaccagcaucaagugggcggacaacaacugcuaccuggccaccgcccuccugacccugcagcagaucgagcucaaguucaaccccccggcccugcaggacgcguacuaccgcgcccgggccggggaggccgccaacuucugcgcgcugauccucgccuacugcaacaagacggugggcgagcugggcgacguccgcgagaccauguccuaccuguuccagcacgccaaccucgacagcugcaagcgggugcugaacgucgugugcaagaccugcgggcagcagcagaccacccugaagggcguggaggccgucauguacauggggacgcucuccuacgagcaguucaagaagggcgugcagauccccugcaccugcgggaagcaggccaccaaguaccuggugcagcaggagagccccuucgucaugauguccgcgcccccggcccaguacgagcugaagcacggcaccuucacgugcgccagcgaguacaccggcaacuaccagugcgggcacuacaagcacaucaccuccaaggagacccucuacugcaucgacggcgcccugcugacgaagagcagcgaguacaaggggcccaucaccgacguguucuacaaggagaacuccuacaccaccacgaucaagcccgugaccuacaagcucgacggcgucgugugcaccgagaucgaccccaagcuggacaacuacuacaagaaggacaacagcuacuucaccgagcagccgaucgaccuggugcccaaccagcccuaccccaacgccuccuucgacaacuucaaguucgucugcgacaacaucaaguucgcggacgaccucaaccagcugacgggguacaagaagccggccagccgcgagcugaaggugaccuucuuccccgaccucaacggcgacguggucgccaucgacuacaagcacuacacccccuccuucaagaagggcgccaagcugcugcacaagcccaucguguggcacgugaacaacgcgaccaacaaggccacguacaagccgaacaccuggugcauccggugccucuggagcaccaagcccgucgagaccuccaacagcuucgacgugcugaaguccgaggacgcccaggggauggacaaccuggccugcgaggaccucaagcccgugagcgaggaggucguggagaaccccacgauccagaaggacgugcuggagugcaacgucaagaccaccgagguggugggcgacaucauccugaagccggccaacaacucccucaagaucaccgaggaggucgggcacacggaccugauggcggccuacguggacaacagcucccugaccaucaagaagcccaacgagcucagccgcgugcugggccugaagacccucgccacccacgggcuggccgccgucaacuccgugcccugggacacgaucgcgaacuacgccaagccguuccugaacaagguggucagcaccaccaccaacaucgugacgcgcugccucaaccgggugugcaccaacuacaugcccuacuucuucacccugcugcuccagcugugcaccuucacccgcuccacgaacagccggaucaaggccuccaugcccaccaccaucgccaagaacaccgucaagagcgugggcaaguucugccuggaggccagcuucaacuaccucaagucccccaacuucagcaagcugaucaacaucaucaucugguuccugcuccuguccgugugccugggcagccucaucuacuccacggcggcccuggggguccugaugagcaaccucggcaugccguccuacugcaccggguaccgcgagggcuaccugaacagcaccaacgugaccaucgccacguacugcaccggcuccauccccugcagcgugugccuguccgggcucgacagccuggacaccuaccccucccuggagaccauccagaucacgaucagcuccuucaagugggaccucaccgccuucggccuggucgccgagugguuccuggcguacauccucuucacccgguucuucuacgugcuggggcuggccgccaucaugcagcucuucuucagcuacuucgccgugcacuucaucuccaacagcuggcugauguggcugaucaucaaccugguccagauggcgcccaucuccgccauggugcgcauguacaucuucuucgccagcuucuacuacguguggaagagcuacguccacgugguggacggcugcaacuccagcaccugcaugaugugcuacaagcggaaccgcgccacgcgggucgagugcaccaccaucgugaacgggguccgccgguccuucuacguguacgccaacggcggcaagggguucugcaagcuccacaacuggaacugcgugaacugcgacaccuucugcgcgggcagcacguucaucuccgacgaggucgcccgcgaccugagccugcaguucaagcggccgaucaaccccaccgaccaguccagcuacaucguggacuccgugaccgucaagaacgggagcauccaccucuacuucgacaaggccggccagaagaccuacgagcgccacucccugagccacuucgugaaccuggacaaccuccgggccaacaacacgaaggggucccugcccaucaacgugaucgucuucgacggcaagagcaagugcgaggaguccagcgccaaguccgcgagcguguacuacucccagcugaugugccagcccauccuccugcuggaccaggcccucgugagcgacgucggcgacagcgccgagguggccgugaagauguucgacgccuacgucaacaccuucuccagcaccuucaacgugccgauggagaagcugaagacccugguggcgacggccgaggccgagcucgccaagaacgucucccuggacaacgugcugagcaccuucaucuccgcggcccgccagggguucguggacagcgacgucgagaccaaggacgugguggagugccucaagcugucccaccagagcgacaucgaggucaccggcgacuccugcaacaacuacaugcugacguacaacaagguggagaacaugaccccccgggaccucggggccugcaucgacugcagcgcccgccacaucaacgcccagguggcgaagucccacaacaucgcccugaucuggaacgucaaggacuucaugagccuguccgagcagcuccggaagcagauccgcagcgccgccaagaagaacaaccugcccuucaagcugaccugcgccaccacgcgccagguggugaacgucgugaccaccaagaucgcgcucaagggcggguga

SEQ ID NO: 17642 - RNA, 5841 nt, Artificial Sequence
  SARS-CoV-2__MT913150.1__non-structural protein 3 (NSP3) CDS gc
auggcccccaccaaggugaccuucggcgacgacacggucaucgaggugcagggguacaagagcgugaacaucaccuucgagcuggacgagcgcaucgacaagguccucaacgagaagugcuccgccuacaccguggagcugggcaccgaggugaacgaguucgcgugcgucguggccgacgccgugaucaagacgcugcagccggucagcgagcuccugaccccccuggggaucgaccucgacgagugguccauggccaccuacuaccuguucgacgagagcggcgaguucaagcuggccucccacauguacugcagcuucuacccccccgacgaggacgaggaggagggggacugcgaggaggaggaguucgagccguccacccaguacgaguacggcacggaggacgacuaccagggcaagccccucgaguucggggcgaccagcgccgcccugcagcccgaggaggagcaggaggaggacuggcuggacgacgacucccagcagaccgugggccagcaggacgggagcgaggacaaccagaccacgaccauccagaccaucguggagguccagccccagcucgagauggagcugaccccgguggugcagacgaucgaggucaacuccuucagcggcuaccugaagcucaccgacaacguguacaucaagaacgccgacaucguggaggaggcgaagaaggucaagcccaccgugguggucaacgccgccaacguguaccugaagcacgggggcggcguggccggggcccugaacaaggcgaccaacaacgccaugcaggucgaguccgacgacuacaucgccacgaacggcccccucaagguggggggcagcugcguccuguccggccacaaccuggccaagcacugccuccacgugguggggcccaacgucaacaagggcgaggacauccagcugcugaagagcgccuacgagaacuucaaccagcacgaggugcuccuggcgccgcugcucuccgccgggaucuucggcgccgaccccauccacagccugcgggugugcgucgacaccgugcgcaccaacguguaccuggccgucuucgacaagaaccucuacgacaagcugguguccagcuuccuggagaugaagagcgagaagcagguggagcagaagaucgccgagauccccaaggaggaggucaagcccuucaucaccgaguccaagccgagcguggagcagcggaagcaggacgacaagaagaucaaggcgugcguggaggaggucacgaccacccucgaggagaccaaguuccugacggagaaccugcuccuguacaucgacaucaacgggaaccugcaccccgacuccgccacccucgugagcgacaucgacaucaccuuccugaagaaggacgcccccuacaucgugggcgacgucgugcaggagggcgugcugaccgccgucgugauccccacgaagaaggccgggggcaccaccgagaugcucgcgaaggcccugcgcaaggugccgaccgacaacuacaucacgaccuaccccgggcagggccugaacggguacaccgucgaggaggccaagaccgugcucaagaagugcaaguccgccuucuacauccugcccagcaucaucuccaacgagaagcaggagauccugggcaccgugagcuggaaccuccgggagaugcuggcgcacgccgaggagacgcgcaagcugaugcccgucugcguggagaccaaggccaucguguccaccauccagcggaaguacaagggcaucaagauccaggagggggucguggacuacggcgcccgcuucuacuucuacaccagcaagacgaccguggccucccugaucaacacccucaacgaccugaacgagacccuggucacgaugccgcucggguacgugacccacggccugaaccuggaggaggcggcccgguacaugcgcagccucaaggugcccgccaccgucuccgugagcucccccgacgccgugaccgccuacaacggguaccugacgagcuccagcaagacccccgaggagcacuucaucgagaccaucucccuggcgggcagcuacaaggacuggagcuacuccggccagagcacccagcucgggaucgaguuccugaagcggggcgacaaguccgucuacuacacgagcaacccgaccaccuuccaccuggacggggaggugaucaccuucgacaaccucaagacgcugcugucccuccgcgaggugcggaccaucaaggucuucaccaccguggacaacaucaaccugcacacgcagguggucgacaugagcaugaccuacggccagcaguucggccccaccuaccuggacggggccgacgugaccaagaucaagccccacaacucccacgagggcaagacguucuacgugcucccgaacgacgacacccugcgcgucgaggccuucgaguacuaccacaccaccgaccccagcuuccuggggcgguacauguccgcccucaaccacacgaagaaguggaaguacccccaggugaacggccugaccagcaucaagugggccgacaacaacugcuaccuggcgaccgcccuccugacccugcagcagaucgagcucaaguucaaccccccggcccugcaggacgccuacuaccgcgcgcgggccggggaggccgccaacuucugcgcccugauccucgcguacugcaacaagacggugggcgagcugggcgacguccgcgagaccauguccuaccuguuccagcacgccaaccucgacagcugcaagcgggugcugaacgucgugugcaagaccugcgggcagcagcagaccacccugaagggcguggaggccgucauguacauggggacgcucuccuacgagcaguucaagaagggcgugcagauccccugcaccugcgggaagcaggccaccaaguaccuggugcagcaggagagccccuucgucaugauguccgcccccccggcgcaguacgagcugaagcacggcaccuucacgugcgccagcgaguacaccggcaacuaccagugcgggcacuacaagcacaucaccuccaaggagacccucuacugcaucgacggcgcccugcugacgaagagcagcgaguacaaggggcccaucaccgacguguucuacaaggagaacuccuacaccaccacgaucaagcccgugaccuacaagcucgacggcgucgugugcaccgagaucgaccccaagcuggacaacuacuacaagaaggacaacagcuacuucaccgagcagccgaucgaccuggugcccaaccagcccuaccccaacgccuccuucgacaacuucaaguucgucugcgacaacaucaaguucgccgacgaccucaaccagcugacgggguacaagaagccggcgagccgcgagcugaaggugaccuucuuccccgaccucaacggcgacguggucgccaucgacuacaagcacuacacccccuccuucaagaagggcgccaagcugcugcacaagcccaucguguggcacgugaacaacgccaccaacaaggcgacguacaagccgaacaccuggugcauccggugccucuggagcaccaagcccgucgagaccuccaacagcuucgacgugcugaaguccgaggacgcccaggggauggacaaccuggccugcgaggaccucaagcccgugagcgaggaggucguggagaaccccacgauccagaaggacgugcuggagugcaacgucaagaccaccgagguggugggcgacaucauccugaagccggccaacaacucccucaagaucaccgaggaggucgggcacacggaccugauggccgcguacguggacaacagcucccugaccaucaagaagcccaacgagcucagccgcgugcugggccugaagacccucgccacccacgggcuggccgccgucaacuccgugcccugggacacgaucgccaacgcgaagccguuccugaacaagguggucagcaccaccaccaacaucgugacgcgcugccucaaccgggugugcaccaacuacaugcccuacuucuucacccugcugcuccagcugugcaccuucacccgcuccacgaacagccggaucaaggccuccaugcccaccaccaucgccaagaacaccgucaagagcgugggcaaguucugccuggaggccagcuucaacuaccucaagucccccaacuucagcaagcugaucaacaucaucaucugguuccugcuccuguccgugugccugggcagccucaucuacuccacggccgcgcuggggguccugaugagcaaccucggcaugccguccuacugcaccggguaccgcgagggcuaccugaacagcaccaacgugaccaucgccacguacugcaccggcuccauccccugcagcgugugccuguccgggcucgacagccuggacaccuaccccucccuggagaccauccagaucacgaucagcuccuucaagugggaccucaccgccuucggccuggucgccgagugguuccuggccuacauccucuucacccgguucuucuacgugcuggggcuggcggccaucaugcagcucuucuucagcuacuucgccgugcacuucaucuccaacagcuggcugauguggcugaucaucaaccugguccagauggcccccaucuccgcgauggugcgcauguacaucuucuucgccagcuucuacuacguguggaagagcuacguccacgugguggacggcugcaacuccagcaccugcaugaugugcuacaagcggaaccgcgccacgcgggucgagugcaccaccaucgugaacgggguccgccgguccuucuacguguacgccaacggcggcaagggguucugcaagcuccacaacuggaacugcgugaacugcgacaccuucugcgccggcagcacguucaucuccgacgaggucgcgcgcgaccugagccugcaguucaagcggccgaucaaccccaccgaccaguccagcuacaucguggacuccgugaccgucaagaacgggagcauccaccucuacuucgacaaggccggccagaagaccuacgagcgccacucccugagccacuucgugaaccuggacaaccuccgggccaacaacacgaaggggucccugcccaucaacgugaucgucuucgacggcaagagcaagugcgaggaguccagcgccaaguccgccagcguguacuacucccagcugaugugccagcccauccuccugcuggaccaggcgcucgugagcgacgucggcgacagcgccgagguggccgugaagauguucgacgccuacgucaacaccuucuccagcaccuucaacgugccgauggagaagcugaagacccugguggccacggcggaggccgagcucgccaagaacgucucccuggacaacgugcugagcaccuucaucuccgccgcgcgccagggguucguggacagcgacgucgagaccaaggacgugguggagugccucaagcugucccaccagagcgacaucgaggucaccggcgacuccugcaacaacuacaugcugacguacaacaagguggagaacaugaccccccgggaccucggggccugcaucgacugcagcgcccgccacaucaacgcccagguggccaagucccacaacaucgcgcugaucuggaacgucaaggacuucaugagccuguccgagcagcuccggaagcagauccgcagcgccgccaagaagaacaaccugcccuucaagcugaccugcgccaccacgcgccagguggugaacgucgugaccaccaagaucgcccucaagggcgggaaguga

SEQ ID NO: 17643 - RNA, 5841 nt, Artificial Sequence
  SARS-CoV-2__MT913152.1__non-structural protein 3 (NSP3) CDS gc
auggcccccaccaaggugaccuucggcgacgacacggucaucgaggugcagggguacaagagcgugaacaucaccuucgagcuggacgagcgcaucgacaagguccucaacgagaagugcuccgccuacaccguggagcugggcaccgaggugaacgaguucgcgugcgucguggccgacgccgugaucaagacgcugcagccggucagcgagcuccugaccccccuggggaucgaccucgacgagugguccauggccaccuacuaccuguucgacgagagcggcgaguucaagcuggccucccacauguacugcagcuucuacccccccgacgaggacgaggaggagggggacugcgaggaggaggaguucgagccguccacccaguacgaguacggcacggaggacgacuaccagggcaagccccucgaguucggggcgaccagcgccgcccugcagcccgaggaggagcaggaggaggacuggcuggacgacgacucccagcagaccgugggccagcaggacgggagcgaggacaaccagaccacgaccauccagaccaucguggagguccagccccagcucgagauggagcugaccccgguggugcagacgaucgaggucaacuccuucagcggcuaccugaagcucaccgacaacguguacaucaagaacgccgacaucguggaggaggcgaagaaggucaagcccaccgugguggucaacgccgccaacguguaccugaagcacgggggcggcguggccggggcccugaacaaggcgaccaacaacgccaugcaggucgaguccgacgacuacaucgccacgaacggcccccucaagguggggggcagcugcguccuguccggccacaaccuggccaagcacugccuccacgugguggggcccaacgucaacaagggcgaggacauccagcugcugaagagcgccuacgagaacuucaaccagcacgaggugcuccuggcgccgcugcucuccgccgggaucuucggcgccgaccccauccacagccugcgggugugcgucgacaccgugcgcaccaacguguaccuggccgucuucgacaagaaccucuacgacaagcugguguccagcuuccuggagaugaagagcgagaagcagguggagcagaagaucgccgagauccccaaggaggaggucaagcccuucaucaccgaguccaagccgagcguggagcagcggaagcaggacgacaagaagaucaaggcgugcguggaggaggucacgaccacccucgaggagaccaaguuccugacggagaaccugcuccuguacaucgacaucaacgggaaccugcaccccgacuccgccacccucgugagcgacaucgacaucaccuuccugaagaaggacgcccccuacaucgugggcgacgucgugcaggagggcgugcugaccgccgucgugauccccacgaagaaggccgggggcaccaccgagaugcucgcgaaggcccugcgcaaggugccgaccgacaacuacaucacgaccuaccccgggcagggccugaacggguacaccgucgaggaggccaagaccgugcucaagaagugcaaguccgccuucuacauccugcccagcaucaucuccaacgagaagcaggagauccugggcaccgugagcuggaaccuccgggagaugcuggcgcacgccgaggagacgcgcaagcugaugcccgucugcguggagaccaaggccaucguguccaccauccagcggaaguacaagggcaucaagauccaggagggggucguggacuacggcgcccgcuucuacuucuacaccagcaagacgaccguggccucccugaucaacacccucaacgaccugaacgagacccuggucacgaugccgcucggguacgugacccacggccugaaccuggaggaggcggcccgguacaugcgcagccucaaggugcccgccaccgucuccgugagcucccccgacgccgugaccgccuacaacggguaccugacgagcuccagcaagacccccgaggagcacuucaucgagaccaucucccuggcgggcagcuacaaggacuggagcuacuccggccagagcacccagcucgggaucgaguuccugaagcggggcgacaaguccgucuacuacacgagcaacccgaccaccuuccaccuggacggggaggugaucaccuucgacaaccucaagacgcugcugucccuccgcgaggugcggaccaucaaggucuucaccaccguggacaacaucaaccugcacacgcagguggucgacaugagcaugaccuacggccagcaguucggccccaccuaccuggacggggccgacgugaccaagaucaagccccacaacucccacgagggcaagacguucuacgugcucccgaacgacgacacccugcgcgucgaggccuucgaguacuaccacaccaccgaccccagcuuccuggggcgguacauguccgcccucaaccacacgaagaaguggaaguacccccaggugaacggccugaccagcaucaagugggccgacaacaacugcuaccuggcgaccgcccuccugacccugcagcagaucgagcucaaguucaaccccccggcccugcaggacgccuacuaccgcgcgcgggccggggaggccgccaacuucugcgcccugauccucgcguacugcaacaagacggugggcgagcugggcgacguccgcgagaccauguccuaccuguuccagcacgccaaccucgacagcugcaagcgggugcugaacgucgugugcaagaccugcgggcagcagcagaccacccugaagggcguggaggccgucauguacauggggacgcucuccuacgagcaguucaagaagggcgugcagauccccugcaccugcgggaagcaggccaccaaguaccuggugcagcaggagagccccuucgucaugauguccgcccccccggcgcaguacgagcugaagcacggcaccuucacgugcgccagcgaguacaccggcaacuaccagugcgggcacuacaagcacaucaccuccaaggagacccucuacugcaucgacggcgcccugcugacgaagagcagcgaguacaaggggcccaucaccgacguguucuacaaggagaacuccuacaccaccacgaucaagcccgugaccuacaagcucgacggcgucgugugcaccgagaucgaccccaagcuggacaacuacuacaagaaggacaacagcuacuucaccgagcagccgaucgaccuggugcccaaccagcccuaccccaacgccuccuucgacaacuucaaguucgucugcgacaacaucaaguucgccgacgaccucaaccagcugacgggguacaagaagccggcgagccgcgagcugaaggugaccuucuuccccgaccucaacggcgacguggucgccaucgacuacaagcacuacacccccuccuucaagaagggcgccaagcugcugcacaagcccaucguguggcacgugaacaacgccaccaacaaggcgacguacaagccgaacaccuggugcauccggugccucuggagcaccaagcccgucgagaccuccaacagcuucgacgugcugaaguccgaggacgcccaggggauggacaaccuggccugcgaggaccucaagcccgugagcgaggaggucguggagaaccccacgauccagaaggacgugcuggagugcaacgucaagaccaccgagguggugggcgacaucauccugaagccggccaacaacucccucaagaucaccgaggaggucgggcacaucgaccugauggccgcguacguggacaacagcucccugacgaucaagaagcccaacgagcucagccgcgugcugggccugaagacccucgccacccacgggcuggccgccgucaacuccgugcccugggacaccaucgccaacuacgcgaagccguuccugaacaagguggucagcacgaccaccaacaucgugacccgcugccucaaccgggugugcacgaacuacaugcccuacuucuucacccugcugcuccagcugugcaccuucacccgcuccaccaacagccggaucaaggccuccaugcccacgaccaucgccaagaacaccgucaagagcgugggcaaguucugccuggaggccagcuucaacuaccucaagucccccaacuucagcaagcugaucaacaucaucaucugguuccugcuccuguccgugugccugggcagccucaucuacuccaccgccgcgcuggggguccugaugagcaaccucggcaugccguccuacugcacgggguaccgcgagggcuaccugaacagcaccaacgugaccaucgccaccuacugcacgggcuccauccccugcagcgugugccuguccgggcucgacagccuggacaccuaccccucccuggagaccauccagaucaccaucagcuccuucaagugggaccucacggccuucggccuggucgccgagugguuccuggccuacauccucuucacccgguucuucuacgugcuggggcuggcggccaucaugcagcucuucuucagcuacuucgccgugcacuucaucuccaacagcuggcugauguggcugaucaucaaccugguccagauggcccccaucuccgcgauggugcgcauguacaucuucuucgccagcuucuacuacguguggaagagcuacguccacgugguggacggcugcaacuccagcaccugcaugaugugcugcaagcggaaccgcgccacccgggucgagugcacgaccaucgugaacgggguccgccgguccuucuacguguacgccaacggcggcaagggguucugcaagcuccacaacuggaacugcgugaacugcgacaccuucugcgccggcagcaccuucaucuccgacgaggucgcgcgcgaccugagccugcaguucaagcggccgaucaaccccacggaccaguccagcuacaucguggacuccgugaccgucaagaacgggagcauccaccucuacuucgacaaggccggccagaagaccuacgagcgccacucccugagccacuucgugaaccuggacaaccuccgggccaacaacaccaaggggucccugcccaucaacgugaucgucuucgacggcaagagcaagugcgaggaguccagcgccaaguccgccagcguguacuacucccagcugaugugccagcccauccuccugcuggaccaggcgcucgugagcgacgucggcgacagcgccgagguggccgugaagauguucgacgccuacgucaacacguucuccagcaccuucaacgugccgauggagaagcugaagacccugguggccaccgcggaggccgagcucgccaagaacgucucccuggacaacgugcugagcacguucaucuccgccgcgcgccagggguucguggacagcgacgucgagaccaaggacgugguggagugccucaagcugucccaccagagcgacaucgaggucaccggcgacuccugcaacaacuacaugcugaccuacaacaagguggagaacaugacgccccgggaccucggggccugcaucgacugcagcgcccgccacaucaacgcccagguggccaagucccacaacaucgcgcugaucuggaacgucaaggacuucaugagccuguccgagcagcuccggaagcagauccgcagcgccgccaagaagaacaaccugcccuucaagcugaccugcgccaccacccgccagguggugaacgucgugacgaccaagaucgcccucaagggcggguga

SEQ ID NO: 17644 - RNA, 5841 nt, Artificial Sequence
  SARS-CoV-2__MT907517.1__non-structural protein 3 (NSP3) CDS gc
auggcccccaccaaggugaccuucggcgacgacacggucaucgaggugcagggguacaagagcgugaacaucaccuucgagcuggacgagcgcaucgacaagguccucaacgagaagugcuccgccuacaccguggagcugggcaccgaggugaacgaguucgcgugcgucguggccgacgccgugaucaagacgcugcagccggucagcgagcuccugaccccccuggggaucgaccucgacgagugguccauggccaccuacuaccuguucgacgagagcggcgaguucaagcuggccucccacauguacugcagcuucuacccccccgacgaggacgaggaggagggggacugcgaggaggaggaguucgagccguccacccaguacgaguacggcacggaggacgacuaccagggcaagccccucgaguucggggcgaccagcgccgcccugcagcccgaggaggagcaggaggaggacuggcuggacgacgacucccagcagaccgugggccagcaggacgggagcgaggacaaccagaccacgaccauccagaccaucguggagguccagccccagcucgagauggagcugaccccgguggugcagacgaucgaggucaacuccuucagcggcuaccugaagcucaccgacaacguguacaucaagaacgccgacaucguggaggaggcgaagaaggucaagcccaccgugguggucaacgccgccaacguguaccugaagcacgggggcggcguggccggggcccugaacaaggcgaccaacaacgccaugcaggucgaguccgacgacuacaucgccacgaacggcccccucaagguggggggcagcugcguccuguccggccacaaccuggccaagcacugccuccacgugguggggcccaacgucaacaagggcgaggacauccagcugcugaagagcgccuacgagaacuucaaccagcacgaggugcuccuggcgccgcugcucuccgccgggaucuucggcgccgaccccauccacagccugcgggugugcgucgacaccgugcgcaccaacguguaccuggccgucuucgacaagaaccucuacgacaagcugguguccagcuuccuggagaugaagagcgagaagcagguggagcagaagaucgccgagauccccaaggaggaggucaagcccuucaucaccgaguccaagccgagcguggagcagcggaagcaggacgacaagaagaucaaggcgugcguggaggaggucacgaccacccucgaggagaccaaguuccugacggagaaccugcuccuguacaucgacaucaacgggaaccugcaccccgacuccgccacccucgugagcgacaucgacaucaccuuccugaagaaggacgcccccuacaucgugggcgacgucgugcaggagggcgugcugaccgccgucgugauccccacgaagaaggccgggggcaccaccgagaugcucgcgaaggcccugcgcaaggugccgaccgacaacuacaucacgaccuaccccgggcagggccugaacggguacaccgucgaggaggccaagaccgugcucaagaagugcaaguccgccuucuacauccugcccagcaucaucuccaacgagaagcaggagauccugggcaccgugagcuggaaccuccgggagaugcuggcgcacgccgaggagacgcgcaagcugaugcccgucugcguggagaccaaggccaucguguccaccauccagcggaaguacaagggcaucaagauccaggagggggucguggacuacggcgcccgcuucuacuucuacaccagcaagacgaccguggccucccugaucaacacccucaacgaccugaacgagacccuggucacgaugccgcucggguacgugacccacggccugaaccuggaggaggcggcccgguacaugcgcagccucaaggugcccgccaccgucuccgugagcucccccgacgccgugaccgccuacaacggguaccugacgagcuccagcaagacccccgaggagcacuucaucgagaccaucucccuggcgggcagcuacaaggacuggagcuacuccggccagagcacccagcucgggaucgaguuccugaagcggggcgacaaguccgucuacuacacgagcaacccgaccaccuuccaccuggacggggaggugaucaccuucgacaaccucaagacgcugcugucccuccgcgaggugcggaccaucaaggucuucaccaccguggacaacaucaaccugcacacgcagguggucgacaugagcaugaccuacggccagcaguucggccccaccuaccuggacggggccgacgugaccaagaucaagccccacaacucccacgagggcaagacguucuacgugcucccgaacgacgacacccugcgcgucgaggccuucgaguacuaccacaccaccgaccccagcuuccuggggcgguacauguccgcccucaaccacacgaagaaguggaaguacccccaggugaacggccugaccagcaucaagugggccgacaacaacugcuaccuggcgaccgcccuccugacccugcagcagaucgagcucaaguucaaccccccggcccugcaggacgccuacuaccgcgcgcgggccggggaggccgccaacuucugcgcccugauccucgcguacugcaacaagacggugggcgagcugggcgacguccgcgagaccauguccuaccuguuccagcacgccaaccucgacagcugcaagcgggugcugaacgucgugugcaagaccugcgggcagcagcagaccacccugaagggcguggaggccgucauguacauggggacgcucuccuacgagcaguucaagaagggcgugcagauccccugcaccugcgggaagcaggccaccaaguaccuggugcagcaggagagccccuucgucaugauguccgcccccccggcgcaguacgagcugaagcacggcaccuucacgugcgccagcgaguacaccggcaacuaccagugcgggcacuacaagcacaucaccuccaaggagacccucuacugcaucgacggcgcccugcugacgaagagcagcgaguacaaggggcccaucaccgacguguucuacaaggagaacuccuacaccaccacgaucaagcccgugaccuacaagcucgacggcgucgugugcaccgagaucgaccccaagcuggacaacuacuacaagaaggacaacagcuacuucaccgagcagccgaucgaccuggugcccaaccagcccuaccccaacgccuccuucgacaacuucaaguucgucugcgacaacaucaaguucgccgacgaccucaaccagcugacgggguacaagaagccggcgagccgcgagcugaaggugaccuucuuccccgaccucaacggcgacguggucgccaucgacuacaagcacuacacccccuccuucaagaagggcgccaagcugcugcacaagcccaucguguggcacgugaacaacgccaccaacaaggcgacguacaagccgaacaccuggugcauccggugccucuggagcaccaagcccgucgagaccuccaacagcuucgacgugcugaaguccgaggacgcccaggggauggacaaccuggccugcgaggaccucaagcccgugagcgaggaggucguggagaaccccacgauccagaaggacgugcuggagugcaacgucaagaccaccgagguggugggcgacaucauccugaagccggccaacaacucccucaagaucaccgaggaggucgggcacacggaccugauggccgcguacguggacaacagcucccugaccaucaagaagcccaacgagcucagccgcgugcugggccugaagacccucgccacccacgggcuggccgccgucaacuccgugcccugggacacgaucgccaacuacgcgaagccguuccugaacaagguggucagcaccaccaccaacaucgugacgcgcugccucaaccgggugugcaccaacuacaugcccuacuucuucacccugcugcuccagcugugcaccuucacccgcuccacgaacagccggaucaaggccuccaugcccaccaccaucgccaagaacaccgucaagagcgugggcaaguucugccuggaggccagcuucaacuaccucaagucccccaacuucagcaagcugaucaacaucaucaucugguuccugcuccuguccgugugccugggcagccucaucuacuccacggccgcgcuggggguccugaugagcaaccucggcaugccguccuacugcaccggguaccgcgagggcuaccugaacagcaccaacgugaccaucgccacguacugcaccggcuccauccccugcagcgugugccuguccgggcucgacagccuggacaccuaccccucccuggagaccauccagaucacgaucagcuccuucaagugggaccucaccgccuucggccuggucgccgagugguuccuggccuacauccucuucacccgguucuucuacgugcuggggcuggcggccaucaugcagcucuucuucagcuacuucgccgugcacuucaucuccaacagcuggcugauguggcugaucaucaaccugguccagauggcccccaucuccgcgauggugcgcauguacaucuucuucgccagcuucuacuacguguggaagagcuacguccacgugguggacggcugcaacuccagcaccugcaugaugugcuacaagcggaaccgcgccacgcgggucgagugcaccaccaucgugaacgggguccgccgguccuucuacguguacgccaacggcggcaagggguucugcaagcuccacaacuggaacugcgugaacugcgacaccuucugcgccggcagcacguucaucuccgacgaggucgcgcgcgaccugagccugcaguucaagcggccgaucaaccccaccgaccaguccagcuacaucguggacuccgugaccgucaagaacgggagcauccaccucuacuucgacaaggccggccagaagaccuacgagcgccacucccugagccacuucgugaaccuggacaaccuccgggccaacaacacgaaggggucccugcccaucaacgugaucgucuucgacggcaagagcaagugcgaggaguccagcgccaaguccgccagcguguacuacucccagcugaugugccagcccauccuccugcuggaccaggcgcucgugagcgacgucggcgacagcgccgagguggccgugaagauguucgacgccuacgucaacaccuucuccagcaccuucaacgugccgauggagaagcugaagacccugguggccacggcggaggccgagcucgccaagaacgucucccuggacaacgugcugagcaccuucaucuccgccgcgcgccagggguucguggacagcgacgucgagaccaaggacgugguggagugccucaagcugucccaccagagcgacaucgaggucaccggcgacuccugcaacaacuacaugcugacguacaacaagguggagaacaugaccccccgggaccucggggcccgcaucgacugcagcgcccggcacaucaacgcccagguggccaagucccacaacaucgcgcugaucuggaacgucaaggacuucaugagccuguccgagcagcuccgcaagcagauccgcagcgccgccaagaagaacaaccugcccuucaagcugaccugcgccaccacgcggcagguggugaacgucgugaccaccaagaucgcccucaagggcggguga

SEQ ID NO: 17645 - RNA, 5841 nt, Artificial Sequence
  SARS-CoV-2__MT911561.1__non-structural protein 3 (NSP3) CDS gc
auggcccccaccaaggugaccuucggcgacgacacggucaucgaggugcagggguacaagagcgugaacaucaccuucgagcuggacgagcgcaucgacaagguccucaacgagaagugcuccgccuacaccguggagcugggcaccgaggugaacgaguucgcgugcgucguggccgacgccgugaucaagacgcugcagccggucagcgagcuccugaccccccuggggaucgaccucgacgagugguccauggccaccuacuaccuguucgacgagagcggcgaguucaagcuggccucccacauguacugcagcuucuacccccccgacgaggacgaggaggagggggacugcgaggaggaggaguucgagccguccacccaguacgaguacggcacggaggacgacuaccagggcaagccccucgaguucggggcgaccagcgccgcccugcagcccgaggaggagcaggaggaggacuggcuggacgacgacucccagcagaccgugggccagcaggacgggagcgaggacaaccagaccacgaccauccagaccaucguggagguccagccccagcucgagauggagcugaccccgguggugcagacgaucgaggucaacuccuucagcggcuaccugaagcucaccgacaacguguacaucaagaacgccgacaucguggaggaggcgaagaaggucaagcccaccgugguggucaacgccgccaacguguaccugaagcacgggggcggcguggccggggcccugaacaaggcgaccaacaacgccaugcaggucgaguccgacgacuacaucgccacgaacggcccccucaagguggggggcagcugcguccuguccggccacaaccuggccaagcacugccuccacgugguggggcccaacgucaacaagggcgaggacauccagcugcugaagagcgccuacgagaacuucaaccagcacgaggugcuccuggcgccgcugcucuccgccgggaucuucggcgccgaccccauccacagccugcgggugugcgucgacaccgugcgcaccaacguguaccuggccgucuucgacaagaaccucuacgacaagcugguguccagcuuccuggagaugaagagcgagaagcagguggagcagaagaucgccgagauccccaaggaggaggucaagcccuucaucaccgaguccaagccgagcguggagcagcggaagcaggacgacaagaagaucaaggcgugcguggaggaggucacgaccacccucgaggagaccaaguuccugacggagaaccugcuccuguacaucgacaucaacgggaaccugcaccccgacuccgccacccucgugagcgacaucgacaucaccuuccugaagaaggacgcccccuacaucgugggcgacgucgugcaggagggcgugcugaccgccgucgugauccccacgaagaaggccgggggcaccaccgagaugcucgcgaaggcccugcgcaaggugccgaccgacaacuacaucacgaccuaccccgggcagggccugaacggguacaccgucgaggaggccaagaccgugcucaagaagugcaaguccgccuucuacauccugcccagcaucaucuccaacgagaagcaggagauccugggcaccgugagcuggaaccuccgggagaugcuggcgcacgccgaggagacgcgcaagcugaugcccgucugcguggagaccaaggccaucguguccaccauccagcggaaguacaagggcaucaagauccaggagggggucguggacuacggcgcccgcuucuacuucuacaccagcaagacgaccguggccucccugaucaacacccucaacgaccugaacgagacccuggucacgaugccgcucggguacgugacccacggccugaaccuggaggaggcggcccgguacaugcgcagccucaaggugcccgccaccgucuccgugagcucccccgacgccgugaccgccuacaacggguaccugacgagcuccagcaagacccccgaggagcacuucaucgagaccaucucccuggcgggcagcuacaaggacuggagcuacuccggccagagcacccagcucgggaucgaguuccugaagcggggcgacaaguccgucuacuacacgagcaacccgaccaccuuccaccuggacggggaggugaucaccuucgacaaccucaagacgcugcugucccuccgcgaggugcggaccaucaaggucuucaccaccguggacaacaucaaccugcacacgcagguggucgacaugagcaugaccuacggccagcaguucggccccaccuaccuggacggggccgacgugaccaagaucaagccccacaacucccacgagggcaagacguucuacgugcucccgaacgacgacacccugcgcgucgaggccuucgaguacuaccacaccaccgaccccagcuuccuggggcgguacauguccgcccucaaccacacgaagaaguggaaguacccccaggugaacggccugaccagcaucaagugggccgacaacaacugcuaccuggcgaccgcccuccugacccugcagcagaucgagcucaaguucaaccccccggcccugcaggacgccuacuaccgcgcgcgggccggggaggccgccaacuucugcgcccugauccucgcguacugcaacaagacggugggcgagcugggcgacguccgcgagaccauguccuaccuguuccagcacgccaaccucgacagcugcaagcgggugcugaacgucgugugcaagaccugcgggcagcagcagaccacccugaagggcguggaggccgucauguacauggggacgcucuccuacgagcaguucaagaagggcgugcagauccccugcaccugcgggaagcaggccaccaaguaccuggugcagcaggagagccccuucgucaugauguccgcccccccggcgcaguacgagcugaagcacggcaccuucacgugcgccagcgaguacaccggcaacuaccagugcgggcacuacaagcacaucaccuccaaggagacccucuacugcaucgacggcgcccugcugacgaagagcagcgaguacaaggggcccaucaccgacguguucuacaaggagaacuccuacaccaccacgaucaagcccgugaccuacaagcucgacggcgucgugugcaccgagaucgaccccaagcuggacaacuacuacaagaaggacaacagcuacuucaccgagcagccgaucgaccuggugcccaaccagcccuaccccaacgccuccuucgacaacuucacguucgucugcgacaacaucaaguucgccgacgaccucaaccagcugaccggguacaagaagccggcgagccgcgagcugaaggugaccuucuuccccgaccucaacggcgacguggucgccaucgacuacaagcacuacacccccuccuucaagaagggcgccaagcugcugcacaagcccaucguguggcacgugaacaacgccacgaacaaggcgaccuacaagccgaacaccuggugcauccggugccucuggagcaccaagcccgucgagacguccaacagcuucgacgugcugaaguccgaggacgcccaggggauggacaaccuggccugcgaggaccucaagcccgugagcgaggaggucguggagaaccccaccauccagaaggacgugcuggagugcaacgucaagaccaccgagguggugggcgacaucauccugaagccggccaacaacucccucaagaucacggaggaggucgggcacaccgaccugauggccgcguacguggacaacagcucccugaccaucaagaagcccaacgagcucagccgcgugcugggccugaagacccucgccacgcacgggcuggccgccgucaacuccgugcccugggacaccaucgccaacuacgcgaagccguuccugaacaagguggucagcaccaccacgaacaucgugacccgcugccucaaccgggugugcaccaacuacaugcccuacuucuucacccugcugcuccagcugugcaccuucacgcgcuccaccaacagccggaucaaggccuccaugcccaccaccaucgccaagaacacggucaagagcgugggcaaguucugccuggaggccagcuucaacuaccucaagucccccaacuucagcaagcugaucaacaucaucaucugguuccugcuccuguccgugugccugggcagccucaucuacuccaccgccgcgcuggggguccugaugagcaaccucggcaugccguccuacugcaccggguaccgcgagggcuaccugaacagcaccaacgugacgaucgccaccuacugcaccggcuccauccccugcagcgugugccuguccgggcucgacagccuggacaccuaccccucccuggagacgauccagaucaccaucagcuccuucaagugggaccucaccgccuucggccuggucgccgagugguuccuggccuacauccucuucacccgguucuucuacgugcuggggcuggcggccaucaugcagcucuucuucagcuacuucgccgugcacuucaucuccaacagcuggcugauguggcugaucaucaaccugguccagauggcccccaucuccgcgauggugcgcauguacaucuucuucgccagcuucuacuacguguggaagagcuacguccacgugguggacggcugcaacuccagcacgugcaugaugugcuacaagcggaaccgcgccacccgggucgagugcaccaccaucgugaacgggguccgccgguccuucuacguguacgccaacggcggcaagggguucugcaagcuccacaacuggaacugcgugaacugcgacacguucugcgccggcagcaccuucaucuccgacgaggucgcgcgcgaccugagccugcaguucaagcggccgaucaaccccaccgaccaguccagcuacaucguggacuccgugaccgucaagaacgggagcauccaccucuacuucgacaaggccggccagaagacguacgagcgccacucccugagccacuucgugaaccuggacaaccuccgggccaacaacaccaaggggucccugcccaucaacgugaucgucuucgacggcaagagcaagugcgaggaguccagcgccaaguccgccagcguguacuacucccagcugaugugccagcccauccuccugcuggaccaggcgcucgugagcgacgucggcgacagcgccgagguggccgugaagauguucgacgccuacgucaacaccuucuccagcaccuucaacgugccgauggagaagcugaagacgcugguggccaccgcggaggccgagcucgccaagaacgucucccuggacaacgugcugagcaccuucaucuccgccgcgcgccagggguucguggacagcgacgucgagaccaaggacgugguggagugccucaagcugucccaccagagcgacaucgaggucacgggcgacuccugcaacaacuacaugcugaccuacaacaagguggagaacaugaccccccgggaccucggggccugcaucgacugcagcgcccgccacaucaacgcccagguggccaagucccacaacaucgcgcugaucuggaacgucaaggacuucaugagccuguccgagcagcuccggaagcagauccgcagcgccgccaagaagaacaaccugcccuucaagcugaccugcgccacgacccgccagguggugaacgucgugaccaccaagaucgcccucaagggcggguga

SEQ ID NO: 17646 - RNA, 5841 nt, Artificial Sequence
  SARS-CoV-2__MT911803.1__non-structural protein 3 (NSP3) CDS gc
auggcccccaccaaggugaccuucggcgacgacacggucaucgaggugcagggguacaagagcgugaacaucaccuucgagcuggacgagcgcaucgacaagguccucaacgagaagugcuccgccuacaccguggagcugggcaccgaggugaacgaguucgcgugcgucguggccgacgccgugaucaagacgcugcagccggucagcgagcuccugaccccccuggggaucgaccucgacgagugguccauggccaccuacuaccuguucgacgagagcggcgaguucaagcuggccucccacauguacugcagcuucuacccccccgacgaggacgaggaggagggggacugcgaggaggaggaguucgagccguccacccaguacgaguacggcacggaggacgacuaccagggcaagccccucgaguucggggcgaccagcgccgcccugcagcccgaggaggagcaggaggaggacuggcuggacgacgacucccagcagaccgugggccagcaggacgggagcgaggacaaccagaccacgaccauccagaccaucguggagguccagccccagcucgagauggagcugaccccgguggugcagacgaucgaggucaacuccuucagcggcuaccugaagcucaccgacaacguguacaucaagaacgccgacaucguggaggaggcgaagaaggucaagcccaccgugguggucaacgccgccaacguguaccugaagcacgggggcggcguggccggggcccugaacaaggcgaccaacaacgccaugcaggucgaguccgacgacuacaucgccacgaacggcccccucaagguggggggcagcugcguccuguccggccacaaccuggccaagcacugccuccacgugguggggcccaacgucaacaagggcgaggacauccagcugcugaagagcgccuacgagaacuucaaccagcacgaggugcuccuggcgccgcugcucuccgccgggaucuucggcgccgaccccauccacagccugcgggugugcgucgacaccgugcgcaccaacguguaccuggccgucuucgacaagaaccucuacgacaagcugguguccagcuuccuggagaugaagagcgagaagcagguggagcagaagaucgccgagauccccaaggaggaggucaagcccuucaucaccgaguccaagccgagcguggagcagcggaagcaggacgacaagaagaucaaggcgugcguggaggaggucacgaccacccucgaggagaccaaguuccugacggagaaccugcuccuguacaucgacaucaacgggaaccugcaccccgacuccgccacccucgugagcgacaucgacaucaccuuccugaagaaggacgcccccuacaucgugggcgacgucgugcaggagggcgugcugaccgccgucgugauccccacgaagaaggccgggggcaccaccgagaugcucgcgaaggcccugcgcaaggugccgaccgacaacuacaucacgaccuaccccgggcagggccugaacggguacaccgucgaggaggccaagaccgugcucaagaagugcaaguccgccuucuacauccugcccagcaucaucuccaacgagaagcaggagauccugggcaccgugagcuggaaccuccgggagaugcuggcgcacgccgaggagacgcgcaagcugaugcccgucugcguggagaccaaggccaucguguccaccauccagcggaaguacaagggcaucaagauccaggagggggucguggacuacggcgcccgcuucuacuucuacaccagcaagacgaccguggccucccugaucaacacccucaacgaccugaacgagacccuggucacgaugccgcucggguacgugacccacggccugaaccuggaggaggcggcccgguacaugcgcagccucaaggugcccgccaccgucuccgugagcucccccgacgccgugaccgccuacaacggguaccugacgagcuccagcaagacccccgaggagcacuucaucgagaccaucucccuggcgggcagcuacaaggacuggagcuacuccggccagagcacccagcucgggaucgaguuccugaagcggggcgacaaguccgucuacuacacgagcaacccgaccaccuuccaccuggacggggaggugaucaccuucgacaaccucaagacgcugcugucccuccgcgaggugcggaccaucaaggucuucaccaccguggacaacaucaaccugcacacgcagguggucgacaugagcaugaccuacggccagcaguucggccccaccuaccuggacggggccgacgugaccaagaucaagccccacaacucccacgagggcaagacguucuacgugcucccgaacgacgacacccugcgcgucgaggccuucgaguacuaccacaccaccgaccccagcuuccuggggcgguacauguccgcccucaaccacacgaagaaguggaaguacccccaggugaacggccugaccagcaucaagugggccgacaacaacugcuaccuggcgaccgcccuccugacccugcagcagaucgagcucaaguucaaccccccggcccugcaggacgccuacuaccgcgcgcgggccggggaggccgccaacuucugcgcccugauccucgcguacugcaacaagacggugggcgagcugggcgacguccgcgagaccauguccuaccuguuccagcacgccaaccucgacagcugcaagcgggugcugaacgucgugugcaagaccugcgggcagcagcgcaccacccugaagggcguggaggccgucauguacauggggacgcucuccuacgagcaguucaagaagggcgugcagauccccugcaccugcgggaagcaggccaccaaguaccuggugcagcaggagagccccuucgucaugauguccgcccccccggcgcaguacgagcugaagcacggcaccuucacgugcgccagcgaguacaccggcaacuaccagugcgggcacuacaagcacaucaccuccaaggagacccucuacugcaucgacggcgcccugcugacgaagagcagcgaguacaaggggcccaucaccgacguguucuacaaggagaacuccuacaccaccacgaucaagcccgugaccuacaagcucgacggcgucgugugcaccgagaucgaccccaagcuggacaacuacuacaagaaggacaacagcuacuucaccgagcagccgaucgaccuggugcccaaccagcccuaccccaacgccuccuucgacaacuucaaguucgucugcgacaacaucaaguucgccgacgaccucaaccagcugacgggguacaagaagccggcgagccgggagcugaaggugaccuucuuccccgaccucaacggcgacguggucgccaucgacuacaagcacuacacccccuccuucaagaagggcgccaagcugcugcacaagcccaucguguggcacgugaacaacgccaccaacaaggcgacguacaagccgaacaccuggugcauccgcugccucuggagcaccaagcccgucgagaccuccaacagcuucgacgugcugaaguccgaggacgcccaggggauggacaaccuggccugcgaggaccucaagcccgugagcgaggaggucguggagaaccccacgauccagaaggacgugcuggagugcaacgucaagaccaccgagguggugggcgacaucauccugaagccggccaacaacucccucaagaucaccgaggaggucgggcacacggaccugauggccgcguacguggacaacagcucccugaccaucaagaagcccaacgagcucagccgcgugcugggccugaagacccucgccacccacgggcuggccgccgucaacuccgugcccugggacacgaucgccaacuacgcgaagccguuccugaacaagguggucagcaccaccaccaacaucgugacgcggugccucaaccgcgugugcaccaacuacaugcccuacuucuucacccugcugcuccagcugugcaccuucacccgguccacgaacagccgcaucaaggccuccaugcccaccaccaucgccaagaacaccgucaagagcgugggcaaguucugccuggaggccagcuucaacuaccucaagucccccaacuucagcaagcugaucaacaucaucaucugguuccugcuccuguccgugugccugggcagccucaucuacuccacggccgcgcuggggguccugaugagcaaccucggcaugccguccuacugcaccggguaccgggagggcuaccugaacagcaccaacgugaccaucgccacguacugcaccggcuccauccccugcagcgugugccuguccgggcucgacagccuggacaccuaccccucccuggagaccauccagaucacgaucagcuccuucaagugggaccucaccgccuucggccuggucgccgagugguuccuggccuacauccucuucacccgcuucuucuacgugcuggggcuggcggccaucaugcagcucuucuucagcuacuucgccgugcacuucaucuccaacagcuggcugauguggcugaucaucaaccugguccagauggcccccaucuccgcgauggugcggauguacaucuucuucgccagcuucuacuacguguggaagagcuacguccacgugguggacggcugcaacuccagcaccugcaugaugugcuacaagcgcaaccgggccacgcgcgucgagugcaccaccaucgugaacgggguccggcgcuccuucuacguguacgccaacggcggcaagggguucugcaagcuccacaacuggaacugcgugaacugcgacaccuucugcgccggcagcacguucaucuccgacgaggucgcgcgggaccugagccugcaguucaagcgcccgaucaaccccaccgaccaguccagcuacaucguggacuccgugaccgucaagaacgggagcauccaccucuacuucgacaaggccggccagaagaccuacgagcggcacucccugagccacuucgugaaccuggacaaccuccgcgccaacaacacgaaggggucccugcccaucaacgugaucgucuucgacggcaagagcaagugcgaggaguccagcgccaaguccgccagcguguacuacucccagcugaugugccagcccauccuccugcuggaccaggcgcucgugagcgacgucggcgacagcgccgagguggccgugaagauguucgacgccuacgucaacaccuucuccagcaccuucaacgugccgauggagaagcugaagacccugguggccacggcggaggccgagcucgccaagaacgucucccuggacaacgugcugagcaccuucaucuccgccgcgcggcagggguucguggacagcgacgucgagaccaaggacgugguggagugccucaagcugucccaccagagcgacaucgaggucaccggcgacuccugcaacaacuacaugcugacguacaacaagguggagaacaugaccccccgcgaccucggggccugcaucgacugcagcgcccggcacaucaacgcccagguggccaagucccacaacaucgcgcugaucuggaacgucaaggacuucaugagccuguccgagcagcuccgcaagcagauccgcagcgccgccaagaagaacaaccugcccuucaagcugaccugcgccaccacgcggcagguggugaacgucgugaccaccaagaucgcccucaagggcggguga

SEQ ID NO: 17647 - RNA, 5841 nt, Artificial Sequence
  SARS-CoV-2__MT911815.1__non-structural protein 3 (NSP3) CDS gc
auggcccccaccaaggugaccuucggcgacgacacggucaucgaggugcagggguacaagagcgugaacaucaccuucgagcuggacgagcgcaucgacaagguccucaacgagaagugcuccgccuacaccguggagcugggcaccgaggugaacgaguucgcgugcgucguggccgacgccgugaucaagacgcugcagccggucagcgagcuccugaccccccuggggaucgaccucgacgagugguccauggccaccuacuaccuguucgacgagagcggcgaguucaagcuggccucccacauguacugcagcuucuacccccccgacgaggacgaggaggagggggacugcgaggaggaggaguucgagccguccacccaguacgaguacggcacggaggacgacuaccagggcaagccccucgaguucggggcgaccagcguggcccugcagcccgaggaggagcaggaggaggacuggcuggacgacgacucccagcagaccgugggccagcaggacgggagcgaggacaaccagaccacgaccauccagaccaucgucgaggugcagccccagcucgagauggagcugaccccggugguccagacgaucgaggugaacuccuucagcggcuaccugaagcucaccgacaacguguacaucaagaacgccgacaucgucgaggaggccaagaaggugaagcccaccguggucgugaacgcggccaacguguaccugaagcacgggggcggcgucgccggggcccugaacaaggccaccaacaacgcgaugcagguggaguccgacgacuacaucgccacgaacggcccccucaaggucgggggcagcugcgugcuguccggccacaaccuggccaagcacugccuccacguggucgggcccaacgugaacaagggcgaggacauccagcugcugaagagcgccuacgagaacuucaaccagcacgaggugcuccuggccccgcugcucuccgcggggaucuucggcgccgaccccauccacagccugcgggucugcguggacaccgugcgcaccaacgucuaccuggccguguucgacaagaaccucuacgacaagcugguguccagcuuccuggagaugaagagcgagaagcaggucgagcagaagaucgccgagauccccaaggaggaggugaagcccuucaucaccgaguccaagccgagcguggagcagcggaagcaggacgacaagaagaucaaggccugcgucgaggaggugacgaccacccucgaggagaccaaguuccugacggagaaccugcuccuguacaucgacaucaacgggaaccugcaccccgacuccgcgacccucgugagcgacaucgacaucaccuuccugaagaaggacgcccccuacaucgucggcgacguggugcaggagggcguccugaccgccguggugauccccacgaagaaggccgggggcaccaccgagaugcucgccaaggcgcugcgcaaggucccgaccgacaacuacaucacgaccuaccccgggcagggccugaacggguacaccguggaggaggccaagaccgugcucaagaagugcaaguccgccuucuacauccugcccagcaucaucuccaacgagaagcaggagauccugggcaccgucagcuggaaccuccgggagaugcuggcccacgcggaggagacgcgcaagcugaugcccgugugcguggagaccaaggccaucgucuccaccauccagcggaaguacaagggcaucaagauccaggagggggugguggacuacggcgcccgcuucuacuucuacaccagcaagacgaccgucgccucccugaucaacacccucaacgaccugaacgagacccuggugacgaugccgcucggguacgugacccacggccugaaccuggaggaggccgcgcgguacaugcgcagccucaagguccccgccaccguguccgugagcucccccgacgccgucaccgccuacaacggguaccugacgagcuccagcaagacccccgaggagcacuucaucgagaccaucucccuggccggcagcuacaaggacuggagcuacuccggccagagcacccagcucgggaucgaguuccugaagcggggcgacaaguccguguacuacacgagcaacccgaccaccuuccaccuggacggggaggugaucaccuucgacaaccucaagacgcugcugucccuccgcgagguccggaccaucaagguguucaccaccguggacaacaucaaccugcacacgcaggucguggacaugagcaugaccuacggccagcaguucggccccaccuaccuggacggggcggacgugaccaagaucaagccccacaacucccacgagggcaagacguucuacguccucccgaacgacgacacccugcgcguggaggccuucgaguacuaccacaccaccgaccccagcuuccuggggcgguacauguccgcccucaaccacacgaagaaguggaaguacccccaggugaacggccugaccagcaucaagugggccgacaacaacugcuaccuggccaccgcgcuccugacccugcagcagaucgagcucaaguucaaccccccggcccugcaggacgccuacuaccgcgcccgggcgggggaggccgccaacuucugcgcccugauccucgccuacugcaacaagacggucggcgagcugggcgacgugcgcgagaccauguccuaccuguuccagcacgcgaaccucgacagcugcaagcggguccugaacguggugugcaagaccugcgggcagcagcagaccacccugaagggcgucgaggccgugauguacauggggacgcucuccuacgagcaguucaagaagggcgugcagauccccugcaccugcgggaagcaggccaccaaguaccugguccagcaggagagccccuucgugaugauguccgcccccccggcccaguacgagcugaagcacggcaccuucacgugcgcgagcgaguacaccggcaacuaccagugcgggcacuacaagcacaucaccuccaaggagacccucuacugcaucgacggcgcccugcugacgaagagcagcgaguacaaggggcccaucaccgacguguucuacaaggagaacuccuacaccaccacgaucaagcccgucaccuacaagcucgacggcguggugugcaccgagaucgaccccaagcuggacaacuacuacaagaaggacaacagcuacuucaccgagcagccgaucgaccugguccccaaccagcccuaccccaacgccuccuucgacaacuucaaguucgugugcgacaacaucaaguucgccgacgaccucaaccagcugacgggguacaagaagccggccagccgcgagcugaaggugaccuucuuccccgaccucaacggcgacgucguggcgaucgacuacaagcacuacacccccuccuucaagaagggcgccaagcugcugcacaagcccaucguguggcacgucaacaacgccaccaacaaggccacguacaagccgaacaccuggugcauccggugccucuggagcaccaagcccguggagaccuccaacagcuucgacgugcugaaguccgaggacgcgcaggggauggacaaccuggccugcgaggaccucaagcccgucagcgaggaggugguggagaaccccacgauccagaaggacguccuggagugcaacgugaagaccaccgagguggucggcgacaucauccugaagccggccaacaacucccucaagaucaccgaggagguggggcacacggaccugauggccgccuacguggacaacagcucccugaccaucaagaagcccaacgagcucagccgcguccugggccugaagacccucgcgacccacgggcuggccgccgugaacuccgugcccugggacacgaucgccaacuacgccaagccguuccugaacaaggucgugagcaccaccaccaacaucgugacgcgcugccucaaccgggucugcaccaacuacaugcccuacuucuucacccugcugcuccagcugugcaccuucacccgcuccacgaacagccggaucaaggcguccaugcccaccaccaucgccaagaacaccgugaagagcgugggcaaguucugccuggaggccagcuucaacuaccucaagucccccaacuucagcaagcugaucaacaucaucaucugguuccugcuccuguccgucugccugggcagccucaucuacuccacggccgcccugggggugcugaugagcaaccucggcaugccguccuacugcaccggguaccgcgagggcuaccugaacagcaccaacgugaccaucgcgacguacugcaccggcuccauccccugcagcgucugccuguccgggcucgacagccuggacaccuaccccucccuggagaccauccagaucacgaucagcuccuucaagugggaccucaccgccuucggccugguggccgagugguuccuggccuacauccucuucacccgguucuucuacgugcuggggcuggccgcgaucaugcagcucuucuucagcuacuucgccguccacuucaucuccaacagcuggcugauguggcugaucaucaaccuggugcagauggcccccaucuccgccauggugcgcauguacaucuucuucgcgagcuucuacuacgucuggaagagcuacgugcacguggucgacggcugcaacuccagcaccugcaugaugugcuacaagcggaaccgcgccacgcggguggagugcaccaccaucgucaacggggugcgccgguccuucuacguguacgccaacggcggcaagggguucugcaagcuccacaacuggaacugcgucaacugcgacaccuucugcgccggcagcacguucaucuccgacgagguggcccgcgaccugagccugcaguucaagcggccgaucaaccccaccgaccaguccagcuacaucguggacuccgucaccgugaagaacgggagcauccaccucuacuucgacaaggcgggccagaagaccuacgagcgccacucccugagccacuucgugaaccuggacaaccuccgggccaacaacacgaaggggucccugcccaucaacgucaucguguucgacggcaagagcaagugcgaggaguccagcgccaaguccgccagcguguacuacucccagcugaugugccagcccauccuccugcuggaccaggcccucgucagcgacgugggcgacagcgcggagguggccgucaagauguucgacgccuacgugaacaccuucuccagcaccuucaacgugccgauggagaagcugaagacccuggucgccacggccgaggcggagcucgccaagaacgugucccuggacaacgugcugagcaccuucaucuccgccgcccgccagggguucgucgacagcgacguggagaccaaggacguggucgagugccucaagcugucccaccagagcgacaucgaggugaccggcgacuccugcaacaacuacaugcugacguacaacaagguggagaacaugaccccccgggaccucggggcgugcaucgacugcagcgcccgccacaucaacgcccaggucgccaagucccacaacaucgcccugaucuggaacgugaaggacuucaugagccuguccgagcagcuccggaagcagauccgcagcgcggccaagaagaacaaccugcccuucaagcugaccugcgccaccacgcgccagguggucaacguggugaccaccaagaucgcccucaagggcggguga

SEQ ID NO: 17648 - RNA, 5841 nt, Artificial Sequence
  SARS-CoV-2__MT911818.1__non-structural protein 3 (NSP3) CDS gc
auggcccccaccaaggugaccuucggcgacgacacggucaucgaggugcagggguacaagagcgugaacaucaccuucgagcuggacgagcgcaucgacaagguccucaacgagaagugcuccgccuacaccguggagcugggcaccgaggugaacgaguucgcgugcgucguggccgacgccgugaucaagacgcugcagccggucagcgagcuccugaccccccuggggaucgaccucgacgagugguccauggccaccuacuaccuguucgacgagagcggcgaguucaagcuggccucccacauguacugcagcuucuacccccccgacgaggacgaggaggagggggacugcgaggaggaggaguucgagccguccacccaguacgaguacggcacggaggacgacuaccagggcaagccccucgaguucggggcgaccagcgccgcccugcagcccgaggaggagcaggaggaggacuggcuggacgacgacucccagcagaccgugggccagcaggacgggagcgaggacaaccagaccacgaccauccagaccaucguggagguccagccccagcucgagauggagcugaccccgguggugcagacgaucgaggucaacuccuucagcggcuaccugaagcucaccgacaacguguacaucaagaacgccgacaucguggaggaggcgaagaaggucaagcccaccgugguggucaacgccgccaacguguaccugaagcacgggggcggcguggccggggcccugaacaaggcgaccaacaacgccaugcaggucgaguccgacgacuacaucgccacgaacggcccccucaagguggggggcagcugcguccuguccggccacaaccuggccaagcacugccuccacgugguggggcccaacgucaacaagggcgaggacauccagcugcugaagagcgccuacgagaacuucaaccagcacgaggugcuccuggcgccgcugcucuccgccgggaucuucggcgccgaccccauccacagccugcgggugugcgucgacaccgugcgcaccaacguguaccuggccgucuucgacaagaaccucuacgacaagcugguguccagcuuccuggagaugaagagcgagaagcagguggagcagaagaucgccgagauccccaaggaggaggucaagcccuucaucaccgaguccaagccgagcguggagcagcggaagcaggacgacaagaagaucaaggcgugcguggaggaggucacgaccacccucgaggagaccaaguuccugacggagaaccugcuccuguacaucgacaucaacgggaaccugcaccccgacuccgccacccucgugagcgacaucgacaucaccuuccugaagaaggacgcccccuacaucgugggcgacgucgugcaggagggcgugcugaccgccgucgugauccccacgaagaaggccgggggcaccaccgagaugcucgcgaaggcccugcgcaaggugccgaccgacaacuacaucacgaccuaccccgggcagggccugaacggguacaccgucgaggaggccaagaccgugcucaagaagugcaaguccgccuucuacauccugcccagcaucaucuccaacgagaagcaggagauccugggcaccgugagcuggaaccuccgggagaugcuggcgcacgccgaggagacgcgcaagcugaugcccgucugcguggagaccaaggccaucguguccaccauccagcggaaguacaagggcaucaagauccaggagggggucguggacuacggcgcccgcuucuacuucuacaccagcaagacgaccguggccucccugaucaacacccucaacgaccugaacgagacccuggucacgaugccgcucggguacgugacccacggccugaaccuggaggaggcggcccgguacaugcgcagccucaaggugcccgccaccgucuccgugagcucccccgacgccgugaccgccuacaacggguaccugacgagcuccagcaagacccccgaggagcacuucaucgagaccaucucccuggcgggcagcuacaaggacuggagcuacuccggccagagcacccagcucgggaucgaguuccugaagcggggcgacaaguccgucuacuacacgagcaacccgaccaccuuccaccuggacggggaggugaucaccuucgacaaccucaagacgcugcugucccuccgcgaggugcggaccaucaaggucuucaccaccguggacaacaucaaccugcacacgcagguggucgacaugagcaugaccuacggccagcaguucggccccaccuaccuggacggggccgacgugaccaagaucaagccccacaacucccacgagggcaagacguucuacgugcucccgaacgacgacacccugcgcgucgaggccuucgaguacuaccacaccaccgaccccagcuuccuggggcgguacauguccgcccucaaccacacgaagaaguggaaguacccccaggugaacggccugaccagcaucaagugggccgacaacaacugcuaccuggcgaccgcccuccugacccugcagcagaucgagcucaaguucaaccccccggcccugcaggacgccuacuaccgcgcgcgggccggggaggccgccaacuucugcgcccugauccucgcguacugcaacaagacggugggcgagcugggcgacguccgcgagaccauguccuaccuguuccagcacgccaaccucgacagcugcaagcgggugcugaacgucgugugcaagaccugcgggcagcagcagaccacccugaaguccguggaggccgucauguacaugggcacgcucagcuacgagcaguucaagaagggggugcagauccccugcaccugcggcaagcaggccaccaaguaccuggugcagcaggagucccccuucgucaugaugagcgcccccccggcgcaguacgagcugaagcacgggaccuucacgugcgccuccgaguacaccggcaacuaccagugcggccacuacaagcacaucaccagcaaggagacccucuacugcaucgacggggcccugcugacgaagagcuccgaguacaagggccccaucaccgacguguucuacaaggagaacagcuacaccaccacgaucaagcccgugaccuacaagcucgacggggucgugugcaccgagaucgaccccaagcuggacaacuacuacaagaaggacaacuccuacuucaccgagcagccgaucgaccuggugcccaaccagcccuaccccaacgccagcuucgacaacuucaaguucgucugcgacaacaucaaguucgccgacgaccucaaccagcugacgggcuacaagaagccggcgucccgcgagcugaaggugaccuucuuccccgaccucaacggggacguggucgccaucgacuacaagcacuacacccccagcuucaagaagggcgccaagcugcugcacaagcccaucguguggcacgugaacaacgccaccaacaaggcgacguacaagccgaacaccuggugcauccggugccucugguccaccaagcccgucgagaccagcaacuccuucgacgugcugaagagcgaggacgcccagggcauggacaaccuggccugcgaggaccucaagcccguguccgaggaggucguggagaaccccacgauccagaaggacgugcuggagugcaacgucaagaccaccgagguggugggggacaucauccugaagccggccaacaacagccucaagaucaccgaggaggucggccacacggaccugauggccgcguacguggacaacuccagccugaccaucaagaagcccaacgagcucucccgcgugcuggggcugaagacccucgccacccacggccuggccgccgucaacagcgugcccugggacacgaucgccaacuacgcgaagccguuccugaacaagguggucuccaccaccaccaacaucgugacgcgcugccucaaccgggugugcaccaacuacaugcccuacuucuucacccugcugcuccagcugugcaccuucacccgcagcacgaacucccggaucaaggccagcaugcccaccaccaucgccaagaacaccgucaagagcguggggaaguucugccuggaggccuccuucaacuaccucaagagccccaacuucuccaagcugaucaacaucaucaucugguuccugcuccugagcgugugccugggcucccucaucuacagcacggccgcgcugggcguccugauguccaaccucgggaugccgagcuacugcaccggcuaccgcgagggguaccugaacuccaccaacgugaccaucgccacguacugcaccggcagcauccccugcuccgugugccugagcggccucgacucccuggacaccuaccccagccuggagaccauccagaucacgaucuccagcuucaagugggaccucaccgccuucgggcuggucgccgagugguuccuggccuacauccucuucacccgguucuucuacgugcugggccuggcggccaucaugcagcucuucuucuccuacuucgccgugcacuucaucagcaacuccuggcugauguggcugaucaucaaccugguccagauggcccccaucagcgcgauggugcgcauguacaucuucuucgccagcuucuacuacguguggaaguccuacguccacgugguggacgggugcaacagcuccaccugcaugaugugcuacaagcggaaccgcgccacgcgggucgagugcaccaccaucgugaacggcguccgccggagcuucuacguguacgccaacgggggcaagggcuucugcaagcuccacaacuggaacugcgugaacugcgacaccuucugcgccggguccacguucaucagcgacgaggucgcgcgcgaccugucccugcaguucaagcggccgaucaaccccaccgaccagagcuccuacaucguggacagcgugaccgucaagaacggcuccauccaccucuacuucgacaaggccgggcagaagaccuacgagcgccacagccugucccacuucgugaaccuggacaaccuccgggccaacaacacgaagggcagccugcccaucaacgugaucgucuucgacgggaaguccaagugcgaggagagcuccgccaagagcgccuccguguacuacagccagcugaugugccagcccauccuccugcuggaccaggcgcucgugagcgacgucggcgacuccgccgagguggccgugaagauguucgacgccuacgucaacaccuucagcuccaccuucaacgugccgauggagaagcugaagacccugguggccacggcggaggccgagcucgccaagaacgucagccuggacaacgugcuguccaccuucaucagcgccgcgcgccagggcuucguggacuccgacgucgagaccaaggacgugguggagugccucaagcugagccaccaguccgacaucgaggucaccggggacagcugcaacaacuacaugcugacguacaacaagguggagaacaugaccccccgggaccucggcgccugcaucgacugcuccgcccgccacaucaacgcccagguggccaagagccacaacaucgcgcugaucuggaacgucaaggacuucaugucccugagcgagcagcuccggaagcagauccgcuccgccgccaagaagaacaaccugcccuucaagcugaccugcgccaccacgcgccagguggugaacgucgugaccaccaagaucgcccucaaggggggcuga

SEQ ID NO: 17649 - RNA, 5841 nt, Artificial Sequence
  SARS-CoV-2__MT911819.1__non-structural protein 3 (NSP3) CDS gc
auggcccccaccaaggugaccuucggcgacgacacggucaucgaggugcagggguacaagagcgugaacaucaccuucgagcuggacgagcgcaucgacaagguccucaacgagaagugcuccgccuacaccguggagcugggcaccgaggugaacgaguucgcgugcgucguggccgacgccgugaucaagacgcugcagccggucagcgagcuccugaccccccuggggaucgaccucgacgagugguccauggccaccuacuaccuguucgacgagagcggcgaguucaagcuggccucccacauguacugcagcuucuacccccccgacgaggacgaggaggagggggacugcgaggaggaggaguucgagccguccacccaguacgaguacggcacggaggacgacuaccagggcaagccccucgaguucggggcgaccagcgccgcccugcagcccgaggaggagcaggaggaggacuggcuggacgacgacucccagcagaccgugggccagcaggacgggagcgaggacaaccagaccacgaccauccagaccaucguggagguccagccccagcucgagauggagcugaccccgguggugcagacgaucgaggucaacuccuucagcggcuaccugaagcucaccgacaacguguacaucaagaacgccgacaucguggaggaggcgaagaaggucaagcccaccgugguggucaacgccgccaacguguaccugaagcacgggggcggcguggccggggcccugaacaaggcgaccaacaacgccaugcaggucgaguccgacgacuacaucgccacgaacggcccccucaagguggggggcagcugcguccuguccggccacaaccuggccaagcacugccuccacgugguggggcccaacgucaacaagggcgaggacauccagcugcugaagagcgccuacgagaacuucaaccagcacgaggugcuccuggcgccgcugcucuccgccgggaucuucggcgccgaccccauccacagccugcgggugugcgucgacaccgugcgcaccaacguguaccuggccgucuucgacaagaaccucuacgacaagcugguguccagcuuccuggagaugaagagcgagaagcagguggagcagaagaucgccgagauccccaaggaggaggucaagcccuucaucaccgaguccaagccgagcguggagcagcggaagcaggacgacaagaagaucaaggcgugcguggaggaggucacgaccacccucgaggagaccaaguuccugacggagaaccugcuccuguacaucgacaucaacgggaaccugcaccccgacuccgccacccucgugagcgacaucgacaucaccuuccugaagaaggacgcccccuacaucgugggcgacgucgugcaggagggcgugcugaccgccgucgugauccccacgaagaaggccgggggcaccaccgagaugcucgcgaaggcccugcgcaaggugccgaccgacaacuacaucacgaccuaccccgggcagggccugaacggguacaccgucgaggaggccaagaccgugcucaagaagugcaaguccgccuucuacauccugcccagcaucaucuccaacgagaagcaggagauccugggcaccgugagcuggaaccuccgggagaugcuggcgcacgccgaggagacgcgcaagcugaugcccgucugcguggagaccaaggccaucguguccaccauccagcggaaguacaagggcaucaagauccaggagggggucguggacuacggcgcccgcuucuacuucuacaccagcaagacgaccguggccucccugaucaacacccucaacgaccugaacgagacccuggucacgaugccgcucggguacgugacccacggccugaaccuggaggaggcggcccgguacaugcgcagccucaaggugcccgccaccgucuccgugagcucccccgacgccgugaccgccuacaacggguaccugacgagcuccagcaagacccccgaggagcacuucaucgagaccaucucccuggcgggcagcuacaaggacuggagcuacuccggccagagcacccagcucgggaucgaguuccugaagcggggcgacaaguccgucuacuacacgagcaacccgaccaccuuccaccuggacggggaggugaucaccuucgacaaccucaagacgcugcugucccuccgcgaggugcggaccaucaaggucuucaccaccguggacaacaucaaccugcacacgcagguggucgacaugagcaugaccuacggccagcaguucggccccaccuaccuggacggggccgacgugaccaagaucaagccccacaacucccacgagggcaagacguucuacgugcucccgaacgacgacacccugcgcgucgaggccuucgaguacuaccacaccaccgaccccagcuuccuggggcgguacauguccgcccucaaccacacgaagaaguggaaguacccccaggugaacggccugaccagcaucaagugggccgacaacaacugcuaccuggcgaccgcccuccugacccugcagcagaucgagcucaaguucaaccccccggcccugcaggacgccuacuaccgcgcgcgggccggggaggccgccaacuucugcgcccugauccucgcguacugcaacaagacggugggcgagcugggcgacguccgcgagaccauguccuaccuguuccagcacgccaaccucgacagcugcaagcgggugcugaacgucgugugcaagaccugcgggcagcagcagaccacccugaagggcguggaggccgucauguacauggggacgcucuccuacgagcaguucaagaagggcgugcagauccccugcaccugcgggaagcaggccaccaaguaccuggugcagcaggagagccccuucgucaugauguccgcccccccggcgcaguacgagcugaagcacggcaccuucacgugcgccagcgaguacaccggcaacuaccagugcgggcacuacaagcacaucaccuccaaggagacccucuacugcaucgacggcgcccugcugacgaagagcagcgaguacaaggggcccaucaccgacguguucuacaaggagaacuccuacaccaccacgaucaagcccgugaccuacaagcucgacggcgucgugugcaccgagaucgaccccaagcuggacaacuacuacaagaaggacaacagcuacuucaccgagcagccgaucgaccuggugcccaaccagcccuaccccaacgccuccuucgacaacuucaaguucgucugcgacaacaucaaguucgccgacgaccucaaccagcugacgggguacaagaagccggcgagccgcgagcugaaggugaccuucuuccccgaccucaacggcgacguggucgccaucgacuacaagcacuacacccccuccuucaagaagggcgccaagcugcugcacaagcccaucguguggcacgugaacaacgccaccaacaaggcgacguacaagccgaacaccuggugcauccggugccucuggagcaccaagcccgucgagaccuccaacagcuucgacgugcugaaguccgaggacgcccaggggauggacaaccuggccugcgaggaccucaagcccgugagcgaggaggucguggagaaccccacgauccagaaggacgugcuggagugcaacgucaagaccaccgagguggugggcgacaucauccugaagccggccaacaacucccucaagaucaccgaggaggucgggcacacggaccugauggccgcguacguggacaacagcucccugaccaucaagaagcccaacgagcucagccgcgugcugggccugaagacccucgccacccacgggcuggccgccgucaacuccgugcccugggacacgaucgccaacuacgcgaagccguuccugaacaagguggucagcaccaccaccaacaucgugacgcgcugccucaaccgggugugcaccaacuacaugcccuacuucuucacccugcugcuccagcugugcaccuucacccgcuccacgaacagccggaucaaggccuccaugcccaccaccaucgccaagaacaccgucaagagcgugggcaaguucugccuggaggccagcuucaacuaccucaagucccccaacuucagcaagcugaucaacaucaucaucugguuccugcuccuguccgugugccugggcagccucaucuacuccacggccgcgcuggggguccugaugagcaaccucggcaugccguccuacugcaccggguaccgcgagggcuaccugaacagcaccaacgugaccaucgccacguacugcaccggcuccauccccugcagcgugugccuguccgggcucgacagccuggacaccuaccccucccuggagaccauccagaucacgaucagcuccuucaagugggaccucaccgccuucggccuggucgccgagugguuccuggccuacauccucuucacccgguucuucuacgugcuggggcuggcggccaucaugcagcucuucuucagcuacuucgccgugcacuucaucuccaacagcuggcugauguggcugaucaucaaccugguccagauggcccccaucuccgcgauggugcgcauguacaucuucuucgccagcuucuacuacguguggaagagcuacguccacgugguggacggcugcaaccucuccaccugcaugaugugcuacaagcggaaccgcgccacgcgggucgagugcaccaccaucgugaacgggguccgccggagcuucuacguguacgccaacggcggcaagggguucugcaagcugcacaacuggaacugcgugaacugcgacaccuucugcgccggcuccacguucaucagcgacgaggucgcgcgcgaccugucccuccaguucaagcggccgaucaaccccaccgaccagagcuccuacaucguggacagcgugaccgucaagaacggguccauccaccuguacuucgacaaggccggccagaagaccuacgagcgccacagccugucccacuucgugaaccucgacaaccugcgggccaacaacacgaaggggagccugcccaucaacgugaucgucuucgacggcaaguccaagugcgaggagagcuccgccaagagcgccuccguguacuacagccagcucaugugccagcccauccugcugcucgaccaggcgcugguguccgacgucggcgacagcgccgagguggccgugaagauguucgacgccuacgucaacaccuucagcuccaccuucaacgugccgauggagaagcugaagacccucguggccacggcggaggccgagcuggccaagaacgucagccuggacaacgugcucuccaccuucaucagcgccgcgcgccagggguucguggacuccgacgucgagaccaaggacgugguggagugccugaagcugagccaccaguccgacaucgaggucaccggcgacagcugcaacaacuacaugcucacguacaacaagguggagaacaugaccccccgggaccugggggccugcaucgacugcuccgcccgccacaucaacgcccagguggccaagagccacaacaucgcgcugaucuggaacgucaaggacuucaugucccucagcgagcagcugcggaagcagauccgcuccgccgccaagaagaacaaccugcccuucaagcucaccugcgccaccacgcgccagguggugaacgucgugaccaccaagaucgcccugaagggcggguga

SEQ ID NO: 17650 - RNA, 5841 nt, Artificial Sequence
  SARS-CoV-2__MT911823.1__non-structural protein 3 (NSP3) CDS gc
auggcccccaccaaggugaccuucggcgacgacacggucaucgaggugcagggguacaagagcgugaacaucaccuucgagcuggacgagcgcaucgacaagguccucaacgagaagugcuccgccuacaccguggagcugggcaccgaggugaacgaguucgcgugcgucguggccgacgccgugaucaagacgcugcagccggucagcgagcuccugaccccccuggggaucgaccucgacgagugguccauggccaccuacuaccuguucgacgaguucggcgaguucaagcuggccagccacauguacugcuccuucuacccccccgacgaggacgaggaggagggggacugcgaggaggaggaguucgagccgagcacccaguacgaguacggcacggaggacgacuaccagggcaagccccucgaguucggggcgaccuccgccgcccugcagcccgaggaggagcaggaggaggacuggcuggacgacgacagccagcagaccgugggccagcaggacggguccgaggacaaccagaccacgaccauccagaccaucguggagguccagccccagcucgagauggagcugaccccgguggugcagacgaucgaggucaacagcuucuccggcuaccugaagcucaccgacaacguguacaucaagaacgccgacaucguggaggaggcgaagaaggucaagcccaccgugguggucaacgccgccaacguguaccugaagcacgggggcggcguggccggggcccugaacaaggcgaccaacaacgccaugcaggucgagagcgacgacuacaucgccacgaacggcccccucaagguggggggcuccugcguccugagcggccacaaccuggccaagcacugccuccacgugguggggcccaacgucaacaagggcgaggacauccagcugcugaaguccgccuacgagaacuucaaccagcacgaggugcuccuggcgccgcugcucagcgccgggaucuucggcgccgaccccauccacucccugcgggugugcgucgacaccgugcgcaccaacguguaccuggccgucuucgacaagaaccucuacgacaagcuggugagcuccuuccuggagaugaagagcgagaagcagguggagcagaagaucgccgagauccccaaggaggaggucaagcccuucaucaccgagagcaagccguccguggagcagcggaagcaggacgacaagaagaucaaggcgugcguggaggaggucacgaccacccucgaggagaccaaguuccugacggagaaccugcuccuguacaucgacaucaacgggaaccugcaccccgacagcgccacccucguguccgacaucgacaucaccuuccugaagaaggacgcccccuacaucgugggcgacgucgugcaggagggcgugcugaccgccgucgugauccccacgaagaaggccgggggcaccaccgagaugcucgcgaaggcccugcgcaaggugccgaccgacaacuacaucacgaccuaccccgggcagggccugaacggguacaccgucgaggaggccaagaccgugcucaagaagugcaagagcgccuucuacauccugcccuccaucaucagcaacgagaagcaggagauccugggcaccguguccuggaaccuccgggagaugcuggcgcacgccgaggagacgcgcaagcugaugcccgucugcguggagaccaaggccaucgugagcaccauccagcggaaguacaagggcaucaagauccaggagggggucguggacuacggcgcccgcuucuacuucuacaccuccaagacgaccguggccagccugaucaacacccucaacgaccugaacgagacccuggucacgaugccgcucggguacgugacccacggccugaaccuggaggaggcggcccgguacaugcgcucccucaaggugcccgccaccgucagcguguccagccccgacgccgugaccgccuacaacggguaccugacguccagcuccaagacccccgaggagcacuucaucgagaccaucagccuggcgggcuccuacaaggacuggagcuacagcggccaguccacccagcucgggaucgaguuccugaagcggggcgacaagagcgucuacuacacguccaacccgaccaccuuccaccuggacggggaggugaucaccuucgacaaccucaagacgcugcugagccuccgcgaggugcggaccaucaaggucuucaccaccguggacaacaucaaccugcacacgcagguggucgacauguccaugaccuacggccagcaguucggccccaccuaccuggacggggccgacgugaccaagaucaagccccacaacagccacgagggcaagacguucuacgugcucccgaacgacgacacccugcgcgucgaggccuucgaguacuaccacaccaccgaccccuccuuccuggggcgguacaugagcgcccucaaccacacgaagaaguggaaguacccccaggugaacggccugaccuccaucaagugggccgacaacaacugcuaccuggcgaccgcccuccugacccugcagcagaucgagcucaaguucaaccccccggcccugcaggacgccuacuaccgcgcgcgggccggggaggccgccaacuucugcgcccugauccucgcguacugcaacaagacggugggcgagcugggcgacguccgcgagaccaugagcuaccuguuccagcacgccaaccucgacuccugcaagcgggugcugaacgucgugugcaagaccugcgggcagcagcagaccacccugaagggcguggaggccgucauguacauggggacgcucagcuacgagcaguucaagaagggcgugcagauccccugcaccugcgggaagcaggccaccaaguaccuggugcagcaggagucccccuucgucaugaugagcgcccccccggcgcaguacgagcugaagcacggcaccuucacgugcgccuccgaguacaccggcaacuaccagugcgggcacuacaagcacaucaccagcaaggagacccucuacugcaucgacggcgcccugcugacgaaguccagcgaguacaaggggcccaucaccgacguguucuacaaggagaacagcuacaccaccacgaucaagcccgugaccuacaagcucgacggcgucgugugcaccgagaucgaccccaagcuggacaacuacuacaagaaggacaacuccuacuucaccgagcagccgaucgaccuggugcccaaccagcccuaccccaacgccagcuucgacaacuucaaguucgucugcgacaacaucaaguucgccgacgaccucaaccagcugacgggguacaagaagccggcgucccgcgagcugaaggugaccuucuuccccgaccucaacggcgacguggucgccaucgacuacaagcacuacacccccagcuucaagaagggcgccaagcugcugcacaagcccaucguguggcacgugaacaacgccaccaacaaggcgacguacaagccgaacaccuggugcauccggugccucugguccaccaagcccgucgagaccagcaacuccuucgacgugcugaagagcgaggacgcccaggggauggacaaccuggccugcgaggaccucaagcccguguccgaggaggucguggagaaccccacgauccagaaggacgugcuggagugcaacgucaagaccaccgagguggugggcgacaucauccugaagccggccaacaacagccucaagaucaccgaggaggucgggcacacggaccugauggccgcguacguggacaacuccagccugaccaucaagaagcccaacgagcucucccgcgugcugggccugaagacccucgccacccacgggcuggccgccgucaacagcgugcccugggacacgaucgccaacuacgcgaagccguuccugaacaagguggucuccaccaccaccaacaucgugacgcgcugccucaaccgggugugcaccaacuacaugcccuacuucuucacccugcugcuccagcugugcaccuucacccgcagcacgaacucccggaucaaggccagcaugcccaccaccaucgccaagaacaccgucaaguccgugggcaaguucugccuggaggccagcuucaacuaccucaagagccccaacuucuccaagcugaucaacaucaucaucugguuccugcuccugagcgugugccugggcucccucaucuacagcacggccgcgcuggggguccugauguccaaccucggcaugccgagcuacugcaccggguaccgcgagggcuaccugaacuccaccaacgugaccaucgccacguacugcaccggcagcauccccugcuccgugugccugagcgggcucgacucccuggacaccuaccccagccuggagaccauccagaucacgaucuccagcuucaagugggaccucaccgccuucggccuggucgccgagugguuccuggccuacauccucuucacccgguucuucuacgugcuggggcuggcggccaucaugcagcucuucuucuccuacuucgccgugcacuucaucagcaacuccuggcugauguggcugaucaucaaccugguccagauggcccccaucagcgcgauggugcgcauguacaucuucuucgccuccuucuacuacguguggaagagcuacguccacgugguggacggcugcaacagcuccaccugcaugaugugcuacaagcggaaccgcgccacgcgggucgagugcaccaccaucgugaacgggguccgccggagcuucuacguguacgccaacggcggcaagggguucugcaagcuccacaacuggaacugcgugaacugcgacaccuucugcgccggcuccacguucaucagcgacgaggucgcgcgcgaccugucccugcaguucaagcggccgaucaaccccaccgaccagagcuccuacaucguggacagcgugaccgucaagaacggguccauccaccucuacuucgacaaggccggccagaagaccuacgagcgccacagccugucccacuucgugaaccuggacaaccuccgggccaacaacacgaaggggagccugcccaucaacgugaucgucuucgacggcaaguccaagugcgaggagagcuccgccaagagcgccuccguguacuacagccagcugaugugccagcccauccuccugcuggaccaggcgcucguguccgacgucggcgacagcgccgagguggccgugaagauguucgacgccuacgucaacaccuucagcuccaccuucaacgugccgauggagaagcugaagacccugguggccacggcggaggccgagcucgccaagaacgucagccuggacaacgugcuguccaccuucaucagcgccgcgcgccagggguucguggacuccgacgucgagaccaaggacgugguggagugccucaagcugagccaccaguccgacaucgaggucaccggcgacagcugcaacaacuacaugcugacguacaacaagguggagaacaugaccccccgggaccucggggccugcaucgacugcuccgcccgccacaucaacgcccagguggccaagagccacaacaucgcgcugaucuggaacgucaaggacuucaugucccugagcgagcagcuccggaagcagauccgcuccgccgccaagaagaacaaccugcccuucaagcugaccugcgccaccacgcgccagguggugaacgucgugaccaccaagaucgcccucaagggcggguga

SEQ ID NO: 17651 - RNA, 5841 nt, Artificial Sequence
  SARS-CoV-2__MT911825.1__non-structural protein 3 (NSP3) CDS gc
auggcccccaccaaggugaccuucggcgacgacacggucaucgaggugcagggguacaagagcgugaacaucaccuucgagcuggacgagcgcaucgacaagguccucaacgagaagugcuccgccuacaccguggagcugggcaccgaggugaacgaguucgcgugcgucguggccgacgccgugaucaagacgcugcagccggucagcgagcuccugaccccccuggggaucgaccucgacgagugguccauggccaccuacuaccuguucgacgagagcggcgaguucaagcuggccucccacauguacugcagcuucuacccccccgacgaggacgaggaggagggggacugcgaggaggaggaguucgagccguccacccaguacgaguacggcacggaggacgacuaccagggcaagccccucgaguucggggcgaccagcgccgcccugcagcccgaggaggagcaggaggaggacuggcuggacgacgacucccagcagaccgugggccagcaggacgggagcgaggacaaccagaccacgaccauccagaccaucguggagguccagccccagcucgagauggagcugaccccgguggugcagacgaucgaggucaacuccuucagcggcuaccugaagcucaccgacaacguguacaucaagaacgccgacaucguggaggaggcgaagaaggucaagcccaccgugguggucaacgccgccaacguguaccugaagcacgggggcggcguggccggggcccugaacaaggcgaccaacaacgccaugcaggucgaguccgacgacuacaucgccacgaacggcccccucaagguggggggcagcugcguccuguccggccacaaccuggccaagcacugccuccacgugguggggcccaacgucaacaagggcgaggacauccagcugcugaagagcgccuacgagaacuucaaccagcacgaggugcuccuggcgccgcugcucuccgccgggaucuucggcgccgaccccauccacagccugcgggugugcgucgacaccgugcgcaccaacguguaccuggccgucuucgacaagaaccucuacgacaagcugguguccagcuuccuggagaugaagagcgagaagcagguggagcagaagaucgccgagauccccaaggaggaggucaagcccuucaucaccgaguccaagccgagcguggagcagcggaagcaggacgacaagaagaucaaggcgugcguggaggaggucacgaccacccucgaggagaccaaguuccugacggagaaccugcuccuguacaucgacaucaaggggaaccugcaccccgacuccgccacccucgugagcgacaucgacaucaccuuccugaagaaggacgcccccuacaucgugggcgacgucgugcaggagggcgugcugaccgccgucgugauccccacgaagaaggccgggggcaccaccgagaugcucgcgaaggcccugcgcaaggugccgaccgacaacuacaucacgaccuaccccgggcagggccugaacggguacaccgucgaggaggccaagaccgugcucaagaagugcaaguccgccuucuacauccugcccagcaucaucuccaacgagaagcaggagauccugggcaccgugagcuggaaccuccgggagaugcuggcgcacgccgaggagacgcgcaagcugaugcccgucugcguggagaccaaggccaucguguccaccauccagcggaaguacaagggcaucaagauccaggagggggucguggacuacggcgcccgcuucuacuucuacaccagcaagacgaccguggccucccugaucaacacccucaacgaccugaacgagacccuggucacgaugccgcucggguacgugacccacggccugaaccuggaggaggcggcccgguacaugcgcagccucaaggugcccgccaccgucuccgugagcucccccgacgccgugaccgccuacaacggguaccugacgagcuccagcaagacccccgaggagcacuucaucgagaccaucucccuggcgggcagcuacaaggacuggagcuacuccggccagagcacccagcucgggaucgaguuccugaagcggggcgacaaguccgucuacuacacgagcaacccgaccaccuuccaccuggacggggaggugaucaccuucgacaaccucaagacgcugcugucccuccgcgaggugcggaccaucaaggucuucaccaccguggacaacaucaaccugcacacgcagguggucgacaugagcaugaccuacggccagcaguucggccccaccuaccuggacggggccgacgugaccaagaucaagccccacaacucccacgagggcaagacguucuacgugcucccgaacgacgacacccugcgcgucgaggccuucgaguacuaccacaccaccgaccccagcuuccuggggcgguacauguccgcccucaaccacacgaagaaguggaaguacccccaggugaacggccugaccagcaucaagugggccgacaacaacugcuaccuggcgaccgcccuccugacccugcagcagaucgagcucaaguucaaccccccggcccugcaggacgccuacuaccgcgcgcgggccggggaggccgccaacuucugcgcccugauccucgcguacugcaacaagacggugggcgagcugggcgacguccgcgagaccauguccuaccuguuccagcacgccaaccucgacagcugcaagcgggugcugaacgucgugugcaagaccugcgggcagcagcagaccacccugaagggcguggaggccgucauguacauggggacgcucuccuacgagcaguucaagaagggcgugcagauccccugcaccugcgggaagcaggccaccaaguaccuggugcagcaggagagccccuucgucaugauguccgcccccccggcgcaguacgagcugaagcacggcaccuucacgugcgccagcgaguacaccggcaacuaccagugcgggcacuacaagcacaucaccuccaaggagacccucuacugcaucgacggcgcccugcugacgaagagcagcgaguacaaggggcccaucaccgacguguucuacaaggagaacuccuacaccaccacgaucaagcccgugaccuacaagcucgacggcgucgugugcaccgagaucgaccccaagcuggacaacuacuacaagaaggacaacagcuacuucaccgagcagccgaucgaccuggugcccaaccagcccuaccccaacgccuccuucgacaacuucaaguucgucugcgacaacaucaaguucgccgacgaccucaaccagcugacgggguacaagaagccggcgagccgcgagcugaaggugaccuucuuccccgaccucaacggcgacguggucgccaucgacuacaagcacuacacccccuccuucaagaagggcgccaagcugcugcacaagcccaucguguggcacgugaacaacgccaccaacaaggcgacguacaagccgaacaccuggugcauccggugccucuggagcaccaagcccgucgagaccuccaacagcuucgacgugcugaaguccgaggacgcccaggggauggacaaccuggccugcgaggaccucaagcccgugagcgaggaggucguggagaaccccacgauccagaaggacgugcuggagugcaacgucaagaccaccgagguggugggcgacaucauccugaagccggccaacaacucccucaagaucaccgaggaggucgggcacacggaccugauggccgcguacguggacaacagcucccugaccaucaagaagcccaacgagcucagccgcgugcugggccugaagacccucgccacccacgggcuggccgccgucaacuccgugcccugggacacgaucgccaacuacgcgaagccguuccugaacaagguggucagcaccaccaccaacaucgugacgcgcugccucaaccgggugugcaccaacuacaugcccuacuucuucacccugcugcuccagcugugcaccuucacccgcuccacgaacagccggaucaaggccuccaugcccaccaccaucgccaagaacaccgucaagagcgugggcaaguucugccuggaggccagcuucaacuaccucaagucccccaacuucagcaagcugaucaacaucaucaucugguuccugcuccuguccgugugccugggcagccucaucuacuccacggccgcgcuggggguccugaugagcaaccucggcaugccguccuacugcaccggguaccgcgagggcuaccugaacagcaccaacgugaccaucgccacguacugcaccggcuccauccccugcagcgugugccuguccgggcucgacagccuggacaccuaccccucccuggagaccauccagaucacgaucagcuccuucaagugggaccucaccgccuucggccuggucgccgagugguuccuggccuacauccucuucacccgguucuucuacgugcuggggcuggcggccaucaugcagcucuucuucagcuacuucgccgugcacuucaucuccaacagcuggcugauguggcugaucaucaaccugguccagauggcccccaucuccgcgauggugcgcauguacaucuucuucgccagcuucuacuacguguggaagagcuacguccacgugguggacggcugcaacuccagcaccugcaugaugugcuacaagcggaaccgcgccacgcgggucgagugcaccaccaucgugaacgggguccgccgguccuucuacguguacgccaacggcggcaagggguucugcaagcuccacaacuggaacugcgugaacugcgacaccuucugcgccggcagcacguucaucuccgacgaggucgcgcgcgaccugagccugcaguucaagcggccgaucaaccccaccgaccaguccagcuacaucguggacuccgugaccgucaagaacgggagcauccaccucuacuucgacaaggccggccagaagaccuacgagcgccacucccugagccacuucgugaaccuggacaaccuccgggccaacaacacgaaggggucccugcccaucaacgugaucgucuucgacggcaagagcaagugcgaggaguccagcgccaaguccgccagcguguacuacucccagcugaugugccagcccauccuccugcuggaccaggcgcucgugagcgacgucggcgacagcgccgagguggccgugaagauguucgacgccuacgucaacaccuucuccagcaccuucaacgugccgauggagaagcugaagacccugguggccacggcggaggccgagcucgccaagaacgucucccuggacaacgugcugagcaccuucaucuccgccgcgcgccagggguucguggacagcgacgucgagaccaaggacgugguggagugccucaagcugucccaccagagcgacaucgaggucaccggcgacuccugcaacaacuacaugcugacguacaacaagguggagaacaugaccccccgggaccucggggccugcaucgacugcagcgcccgccacaucaacgcccagguggccaagucccacaacaucgcgcugaucuggaacgucaaggacuucaugagccuguccgagcagcuccggaagcagauccgcagcgccgccaagaagaacaaccugcccuucaagcugaccugcgccaccacgcgccagguggugaacgucgugaccaccaagaucgcccucaagggcggguga

SEQ ID NO: 17652 - RNA, 5841 nt, Artificial Sequence
  SARS-CoV-2__MT483878.1__non-structural protein 3 (NSP3) CDS gc
auggcccccaccaaggugaccuucggcgacgacacggucaucgaggugcagggguacaagagcgugaacaucaccuucgagcuggacgagcgcaucgacaagguccucaacgagaagugcuccgccuacaccguggagcugggcaccgaggugaacgaguucgcgugcgucguggccgacgccgugaucaagacgcugcagccggucagcgagcuccugaccccccuggggaucgaccucgacgagugguccauggccaccuacuaccuguucgacgagagcggcgaguucaagcuggccucccacauguacugcagcuucuacccccccgacgaggacgaggaggagggggacugcgaggaggaggaguucgagccguccacccaguacgaguacggcacggaggacgacuaccagggcaagccccucgaguucggggcgaccagcgccgcccugcagcccgaggaggagcaggaggaggacuggcuggacgacgacucccggcagaccgugggccagcaggacgggagcgaggacaaccagaccacgaccauccagaccaucguggagguccagccccagcucgagauggagcugaccccgguggugcagacgaucgaggucaacuccuucagcggcuaccugaagcucaccgacaacguguacaucaagaacgccgacaucguggaggaggcgaagaaggucaagcccaccgugguggucaacgccgccaacguguaccugaagcacgggggcggcguggccggggcccugaacaaggcgaccaacaacgccaugcaggucgaguccgacgacuacaucgccacgaacggcccccucaagguggggggcagcugcguccuguccggccacaaccuggccaagcacugccuccacgugguggggcccaacgucaacaagggcgaggacauccagcugcugaagagcgccuacgagaacuucaaccagcacgaggugcuccuggcgccgcugcucuccgccgggaucuucggcgccgaccccauccacagccugcgcgugugcgucgacaccgugcggaccaacguguaccuggccgucuucgacaagaaccucuacgacaagcugguguccagcuuccuggagaugaagagcgagaagcagguggagcagaagaucgccgagauccccaaggaggaggucaagcccuucaucaccgaguccaagccgagcguggagcagcgcaagcaggacgacaagaagaucaaggcgugcguggaggaggucacgaccacccucgaggagaccaaguuccugacggagaaccugcuccuguacaucgacaucaacgggaaccugcaccccgacuccgccacccucgugagcgacaucgacaucaccuuccugaagaaggacgcccccuacaucgugggcgacgucgugcaggagggcgugcugaccgccgucgugauccccacgaagaaggccgggggcaccaccgagaugcucgcgaaggcccugcggaaggugccgaccgacaacuacaucacgaccuaccccgggcagggccugaacggguacaccgucgaggaggccaagaccgugcucaagaagugcaaguccgccuucuacauccugcccagcaucaucuccaacgagaagcaggagauccugggcaccgugagcuggaaccuccgcgagaugcuggcgcacgccgaggagacgcggaagcugaugcccgucugcguggagaccaaggccaucguguccaccauccagcgcaaguacaagggcaucaagauccaggagggggucguggacuacggcgcccgguucuacuucuacaccagcaagacgaccguggccucccugaucaacacccucaacgaccugaacgagacccuggucacgaugccgcucggguacgugacccacggccugaaccuggaggaggcggcccgcuacaugcggagccucaaggugcccgccaccgucuccgugagcucccccgacgccgugaccgccuacaacggguaccugacgagcuccagcaagacccccgaggagcacuucaucgagaccaucucccuggcgggcagcuacaaggacuggagcuacuccggccagagcacccagcucgggaucgaguuccugaagcgcggcgacaaguccgucuacuacacgagcaacccgaccaccuuccaccuggacggggaggugaucaccuucgacaaccucaagacgcugcugucccuccgggaggugcgcaccaucaaggucuucaccaccguggacaacaucaaccugcacacgcagguggucgacaugagcaugaccuacggccagcaguucggccccaccuaccuggacggggccgacgugaccaagaucaagccccacaacucccacgagggcaagacguucuacgugcucccgaacgacgacacccugcgggucgaggccuucgaguacuaccacaccaccgaccccagcuuccuggggcgcuacauguccgcccucaaccacacgaagaaguggaaguacccccaggugaacggccugaccagcaucaagugggccgacaacaacugcuaccuggcgaccgcccuccugacccugcagcagaucgagcucaaguucaaccccccggcccugcaggacgccuacuaccgggcgcgcgccggggaggccgccaacuucugcgcccugauccucgcguacugcaacaagacggugggcgagcugggcgacguccgggagaccauguccuaccuguuccagcacgccaaccucgacagcugcaagcgcgugcugaacgucgugugcaagaccugcgggcagcagcagaccacccugaagggcguggaggccgucauguacauggggacgcucuccuacgagcaguucaagaagggcgugcagauccccugcaccugcgggaagcaggccaccaaguaccuggugcagcaggagagccccuucgucaugauguccgcccccccggcgcaguacgagcugaagcacggcaccuucacgugcgccagcgaguacaccggcaacuaccagugcgggcacuacaagcacaucaccuccaaggagacccucuacugcaucgacggcgcccugcugacgaagagcagcgaguacaaggggcccaucaccgacguguucuacaaggagaacuccuacaccaccacgaucaagcccgugaccuacaagcucgacggcgucgugugcaccgagaucgaccccaagcuggacaacuacuacaagaaggacaacagcuacuucaccgagcagccgaucgaccuggugcccaaccagcccuaccccaacgccuccuucgacaacuucaaguucgucugcgacaacaucaaguucgccgacgaccucaaccagcugacgggguacaagaagccggcgagccgggagcugaaggugaccuucuuccccgaccucaacggcgacguggucgccaucgacuacaagcacuacacccccuccuucaagaagggcgccaagcugcugcacaagcccaucguguggcacgugaacaacgccaccaacaaggcgacguacaagccgaacaccuggugcauccgcugccucuggagcaccaagcccgucgagaccuccaacagcuucgacgugcugaaguccgaggacgcccaggggauggacaaccuggccugcgaggaccucaagcccgugagcgaggaggucguggagaaccccacgauccagaaggacgugcuggagugcaacgucaagaccaccgagguggugggcgacaucauccugaagccggccaacaacucccucaagaucaccgaggaggucgggcacacggaccugauggccgcguacguggacaacagcucccugaccaucaagaagcccaacgagcucagccgcgugcugggccugaagacccucgccacccacgggcuggccgccgucaacuccgugcccugggacacgaucgccaacuacgcgaagccguuccugaacaagguggucagcaccaccaccaacaucgugacgcggugccucaaccgcgugugcaccaacuacaugcccuacuucuucacccugcugcuccagcugugcaccuucacccgguccacgaacagccgcaucaaggccuccaugcccaccaccaucgccaagaacaccgucaagagcgugggcaaguucugccuggaggccagcuucaacuaccucaagucccccaacuucagcaagcugaucaacaucaucaucugguuccugcuccuguccgugugccugggcagccucaucuacuccacggccgcgcuggggguccugaugagcaaccucggcaugccguccuacugcaccggguaccgggagggcuaccugaacagcaccaacgugaccaucgccacguacugcaccggcuccauccccugcagcgugugccuguccgggcucgacagccuggacaccuaccccucccuggagaccauccagaucacgaucagcuccuucaagugggaccucaccgccuucggccuggucgccgagugguuccuggccuacauccucuucacccgcuucuucuacgugcuggggcuggcggccaucaugcagcucuucuucagcuacuucgccgugcacuucaucuccaacagcuggcugauguggcugaucaucaaccugguccagauggcccccaucuccgcgauggugcggauguacaucuucuucgccagcuucuacuacguguggaagagcuacguccacgugguggacggcugcaacuccagcaccugcaugaugugcuacaagcgcaaccgggccacgcgcgucgagugcaccaccaucgugaacgggguccggcgcuccuucuacguguacgccaacggcggcaagggguucugcaagcuccacaacuggaacugcgugaacugcgacaccuucugcgccggcagcacguucaucuccgacgaggucgcgcgggaccugagccugcaguucaagcgcccgaucaaccccaccgaccaguccagcuacaucguggacuccgugaccgucaagaacgggagcauccaccucuacuucgacaaggccggccagaagaccuacgagcggcacucccugagccacuucgugaaccuggacaaccuccgcgccaacaacacgaaggggucccugcccaucaacgugaucgucuucgacggcaagagcaagugcgaggaguccagcgccaaguccgccagcguguacuacucccagcugaugugccagcccauccuccugcuggaccaggcgcucgugagcgacgucggcgacagcgccgagguggccgugaagauguucgacgccuacgucaacaccuucuccagcaccuucaacgugccgauggagaagcugaagacccugguggccacggcggaggccgagcucgccaagaacgucucccuggacaacgugcugagcaccuucaucuccgccgcgcggcagggguucguggacagcgacgucgagaccaaggacgugguggagugccucaagcugucccaccagagcgacaucgaggucaccggcgacuccugcaacaacuacaugcugacguacaacaagguggagaacaugaccccccgcgaccucggggccugcaucgacugcagcgcccggcacaucaacgcccagguggccaagucccacaacaucgcgcugaucuggaacgucaaggacuucaugagccuguccgagcagcuccgcaagcagauccgcagcgccgccaagaagaacaaccugcccuucaagcugaccugcgccaccacgcggcagguggugaacgucgugaccaccaagaucgcccucaagggcggguga

SEQ ID NO: 17653 - RNA, 5841 nt, Artificial Sequence
  SARS-CoV-2__MT483879.1__non-structural protein 3 (NSP3) CDS gc
auggcccccaccaaggugaccuucggcgacgacacggucaucgaggugcagggguacaagagcgugaacaucaccuucgagcuggacgagcgcaucgacaagguccucaacgagaagugcuccgccuacaccguggagcugggcaccgaggugaacgaguucgcgugcgucguggccgacgccgugaucaagacgcugcagccggucagcgagcuccugaccccccuggggaucgaccucgacgagugguccauggccaccuacuaccuguucgacgagagcggcgaguucaagcuggccucccacauguacugcagcuucuacccccccgacgaggacgaggaggagggggacugcgaggaggaggaguucgagccguccacccaguacgaguacggcacggaggacgacuaccagggcaagccccucgaguucggggcgaccagcgccgcccugcagcccgaggaggagcaggaggaggacuggcuggacgacgacucccagcagaccgugggccagcaggacgggagcgaggacaaccagaccacgaccauccagaccaucguggagguccagccccagcucgagauggagcugaccccgguggugcagacgaucgaggucaacuccuucagcggcuaccugaagcucaccgacaacguguacaucaagaacgccgacaucguggaggaggcgaagaaggucaagcccaccgugguggucaacgccgccaacguguaccugaagcacgggggcggcguggccggggcccugaacaaggcgaccaacaacgccaugcaggucgaguccgacgacuacaucgccacgaacggcccccucaagguggggggcagcugcguccuguccggccacaaccuggccaagcacugccuccacgugguggggcccaacgucaacaagggcgaggacauccagcugcugaagagcgccuacgagaacuucaaccagcacgaggugcuccuggcgccgcugcucuccgccgggaucuucggcgccgaccccauccacagccugcgggugugcgucgacaccgugcgcaccaacguguaccuggccgucuucgacaagaaccucuacgacaagcugguguccagcuuccuggagaugaagagcgagaagcagguggagcagaagaucgccgagauccccaaggaggaggucaagcccuucaucaccgaguccaagccgagcguggagcagcggaagcaggacgacaagaagaucaaggcgugcguggaggaggucacgaccacccucgaggagaccaaguuccugacggagaaccugcuccuguacaucgacaucaacgggaaccugcaccccgacuccgccacccucgugagcgacaucgacaucaccuuccugaagaaggacgcccccuacaucgugggcgacgucgugcaggagggcgugcugaccgccgucgugauccccacgaagaaggccgggggcaccaccgagaugcucgcgaaggcccugcgcaaggugccgaccgacaacuacaucacgaccuaccccgggcagggccugaacggguacaccgucgaggaggccaagaccgugcucaagaagugcaaguccgccuucuacauccugcccagcaucaucuccaacgagaagcaggagauccugggcaccgugagcuggaaccuccgggagaugcuggcgcacgccgaggagacgcgcaagcugaugcccgucugcguggagaccaaggccaucguguccaccauccagcggaaguacaagggcaucaagauccaggagggggucguggacuacggcgcccgcuucuacuucuacaccagcaagacgaccguggccucccugaucaacacccucaacgaccugaacgagacccuggucacgaugccgcucggguacgugacccacggccugaaccuggaggaggcggcccgguacaugcgcagccucaaggugcccgccaccgucuccgugagcucccccgacgccgugaccgccuacaacggguaccugacgagcuccagcaagacccccgaggagcacuucaucgagaccaucucccuggcgggcagcuacaaggacuggagcuacuccggccagagcacccagcucgggaucgaguuccugaagcggggcgacaaguccgucuacuacacgagcaacccgaccaccuuccaccuggacggggaggugaucaccuucgacaaccucaagacgcugcugucccuccgcgaggugcggaccaucaaggucuucaccaccguggacaacaucaaccugcacacgcagguggucgacaugagcaugaccuacggccagcaguucggccccaccuaccuggacggggccgacgugaccaagaucaagccccacaacucccacgagggcaagacguucuacgugcucccgaacgacgacacccugcgcgucgaggccuucgaguacuaccacaccaccgaccccagcuuccuggggcgguacauguccgcccucaaccacacgaagaaguggaaguacccccaggugaacggccugaccagcaucaagugggccgacaacaacugcuaccuggcgaccgcccuccugacccugcagcagaucgagcucaaguucaaccccccggcccugcaggacgccuacuaccgcgcgcgggccggggaggccgccaacuucugcgcccugauccucgcguacugcaacaagacggugggcgagcugggcgacguccgcgagaccauguccuaccuguuccagcacgccaaccucgacagcugcaagcgggugcugaacgucgugugcaagaccugcgggcagcagcagaccacccugaagggcguggaggccgucauguacauggggacgcucuccuacgagcaguucaagaagggcgugcagauccccugcaccugcgggaagcaggccaccaaguaccuggugcagcaggagagccccuucgucaugauguccgcccccccggcgcaguacgagcugaagcacggcaccuucacgugcgccagcgaguacaccggcaacuaccagugcgggcacuacaagcacaucaccuccaaggagacccucuacugcaucgacggcgcccugcugacgaagagcagcgaguacaaggggcccaucaccgacguguucuacaaggagaacuccuacaccaccacgaucaagcccgugaccuacaagcucgacggcgucgugugcaccgagaucgaccccaagcuggacaacuacuacaagaaggacaacagcuacuucaccgagcagccgaucgaccuggugcccaaccagcccuaccccaacgccuccuucgacaacuucaaguucgucugcgacaacaucaaguucgccgacgaccucaaccagcugacgggguacaagaagccggcgagccgcgagcugaaggugaccuucuuccccgaccucaacggcgacguggucgccaucgacuacaagcacuacacccccuccuucaagaagggcgccaagcugcugcacaagcccaucguguggcacgugaacaacgccaccaacaaggcgacguacaagccgaacaccuggugcauccggugccucuggagcaccaagcccgucgagaccuccaacagcuucgacgugcugaaguccgaggacgcccaggggauggacaaccuggccugcgaggaccucaagcccgugagcgaggaggucguggagaaccccacgauccagaaggacgugcuggagugcaacgucaagaccaccgagguggugggcgacaucauccugaagccggccaacaacucccucaagaucaccgaggaggucgggcacacggaccugauggccgcguacguggacaacagcucccugaccaucaagaagcccaacgagcucagccgcgugcugggccugaagacccucgccacccacgggcuggccgccgucaacuccgugcccugggacacgaucgccagcuacgcgaagccguuccugaacaagguggucuccaccaccaccaacaucgugacgcgcugccucaaccgggugugcaccaacuacaugcccuacuucuucacccugcugcuccagcugugcaccuucacccgcagcacgaacucccggaucaaggccagcaugcccaccaccaucgccaagaacaccgucaagagcgugggcaaguucugccuggaggccuccuucaacuaccucaagagccccaacuucuccaagcugaucaacaucaucaucugguuccugcuccugagcgugugccugggcucccucaucuacagcacggccgcgcuggggguccugauguccaaccucggcaugccgagcuacugcaccggguaccgcgagggcuaccugaacuccaccaacgugaccaucgccacguacugcaccggcagcauccccugcuccgugugccugagcgggcucgacucccuggacaccuaccccagccuggagaccauccagaucacgaucuccagcuucaagugggaccucaccgccuucggccuggucgccgagugguuccuggccuacauccucuucacccgguucuucuacgugcuggggcuggcggccaucaugcagcucuucuucuccuacuucgccgugcacuucaucagcaacuccuggcugauguggcugaucaucaaccugguccagauggcccccaucagcgcgauggugcgcauguacaucuucuucgccagcuucuacuacguguggaaguccuacguccacgugguggacggcugcaacagcuccaccugcaugaugugcuacaagcggaaccgcgccacgcgggucgagugcaccaccaucgugaacgggguccgccggagcuucuacguguacgccaacggcggcaagggguucugcaagcuccacaacuggaacugcgugaacugcgacaccuucugcgccggcuccacguucaucagcgacgaggucgcgcgcgaccugucccugcaguucaagcggccgaucaaccccaccgaccagagcuccuacaucguggacagcgugaccgucaagaacggguccauccaccucuacuucgacaaggccggccagaagaccuacgagcgccacagccugucccacuucgugaaccuggacaaccuccgggccaacaacacgaaggggagccugcccaucaacgugaucgucuucgacggcaaguccaagugcgaggagagcuccgccaagagcgccuccguguacuacagccagcugaugugccagcccauccuccugcuggaccaggcgcucgugagcgacgucggcgacuccgccgagguggccgugaagauguucgacgccuacgucaacaccuucagcuccaccuucaacgugccgauggagaagcugaagacccugguggccacggcggaggccgagcucgccaagaacgucagccuggacaacgugcuguccaccuucaucagcgccgcgcgccagggguucguggacuccgacgucgagaccaaggacgugguggagugccucaagcugagccaccaguccgacaucgaggucaccggcgacagcugcaacaacuacaugcugacguacaacaagguggagaacaugaccccccgggaccucggggccugcaucgacugcuccgcccgccacaucaacgcccagguggccaagagccacaacaucgcgcugaucuggaacgucaaggacuucaugucccugagcgagcagcuccggaagcagauccgcuccgccgccaagaagaacaaccugcccuucaagcugaccugcgccaccacgcgccagguggugaacgucgugaccaccaagaucgcccucaagggcggguga

SEQ ID NO: 17654 - RNA, 5841 nt, Artificial Sequence
  SARS-CoV-2__MT893659.1__non-structural protein 3 (NSP3) CDS gc
auggcccccaccaaggugaccuucggcgacgacacggucaucgaggugcagggguacaagagcgugaacaucaccuucgagcuggacgagcgcaucgacaagguccucaacgagaagugcuccgccuacaccguggagcugggcaccgaggugaacgaguucgcgugcgucguggccgacgccgugaucaagacgcugcagccggucagcgagcuccugaccccccuggggaucgaccucgacgagugguccauggccaccuacuaccuguucgacgagagcggcgaguucaagcuggccucccacauguacugcagcuucuacccccccgacgaggacgaggaggagggggacugcgaggaggaggaguucgagccguccacccaguacgaguacggcacggaggacgacuaccagggcaagccccucgaguucggggcgaccagcgccgcccugcagcccgaggaggagcaggaggaggacuggcuggacgacgacucccagcagaccgugggccagcaggacagcuccgaggacaaccagaccacgaccauccagaccaucguggagguccagccccagcucgagauggagcugaccccgguggugcagacgaucgaggucaacagcuucuccggguaccugaagcucaccgacaacguguacaucaagaacgccgacaucguggaggaggcgaagaaggucaagcccaccgugguggucaacgccgccaacguguaccugaagcacggcgggggcguggccggcgcccugaacaaggcgaccaacaacgccaugcaggucgagagcgacgacuacaucgccacgaacgggccccucaaggugggcggguccugcguccugagcggccacaaccuggccaagcacugccuccacguggugggccccaacgucaacaagggggaggacauccagcugcugaaguccgccuacgagaacuucaaccagcacgaggugcuccuggcgccgcugcucagcgccggcaucuucggggccgaccccauccacucccugcgggugugcgucgacaccgugcgcaccaacguguaccuggccgucuucgacaagaaccucuacgacaagcuggugagcagcuuccuggagaugaaguccgagaagcagguggagcagaagaucgccgagauccccaaggaggaggucaagcccuucaucaccgagagcaagccguccguggagcagcggaagcaggacgacaagaagaucaaggcgugcguggaggaggucacgaccacccucgaggagaccaaguuccugacggagaaccugcuccuguacaucgacaucaacggcaaccugcaccccgacagcgccacccucguguccgacaucgacaucaccuuccugaagaaggacgcccccuacaucgugggggacgucgugcaggagggcgugcugaccgccgucgugauccccacgaagaaggccggcgggaccaccgagaugcucgcgaaggcccugcgcaaggugccgaccgacaacuacaucacgaccuaccccggccaggggcugaacggcuacaccgucgaggaggccaagaccgugcucaagaagugcaagagcgccuucuacauccugcccuccaucaucagcaacgagaagcaggagauccuggggaccguguccuggaaccuccgggagaugcuggcgcacgccgaggagacgcgcaagcugaugcccgucugcguggagaccaaggccaucgugagcaccauccagcggaaguacaagggcaucaagauccaggagggcgucguggacuacggggcccgcuucuacuucuacaccuccaagacgaccguggccagccugaucaacacccucaacgaccugaacgagacccuggucacgaugccgcucggcuacgugacccacgggcugaaccuggaggaggcggcccgguacaugcgcucccucaaggugcccgccaccgucagcguguccagccccgacgccgugaccgccuacaacggcuaccugacguccagcuccaagacccccgaggagcacuucaucgagaccaucagccuggcggggagcuacaaggacugguccuacagcggccaguccacccagcucggcaucgaguuccugaagcggggggacaagagcgucuacuacacguccaacccgaccaccuuccaccuggacggcgaggugaucaccuucgacaaccucaagacgcugcugagccuccgcgaggugcggaccaucaaggucuucaccaccguggacaacaucaaccugcacacgcagguggucgacauguccaugaccuacgggcagcaguucggccccaccuaccuggacggcgccgacgugaccaagaucaagccccacaacagccacgaggggaagacguucuacgugcucccgaacgacgacacccugcgcgucgaggccuucgaguacuaccacaccaccgaccccuccuuccugggccgguacaugagcgcccucaaccacacgaagaaguggaaguacccccaggugaacgggcugaccuccaucaagugggccgacaacaacugcuaccuggcgaccgcccuccugacccugcagcagaucgagcucaaguucaaccccccggcccugcaggacgccuacuaccgcgcgcgggccggcgaggccgccaacuucugcgcccugauccucgcguacugcaacaagacggugggggagcugggcgacguccgcgagaccaugagcuaccuguuccagcacgccaaccucgacuccugcaagcgggugcugaacgucgugugcaagaccugcggccagcagcagaccacccugaaggggguggaggccgucauguacaugggcacgcucagcuacgagcaguucaagaagggggugcagauccccugcaccugcggcaagcaggccaccaaguaccuggugcagcaggagucccccuucgucaugaugagcgcccccccggcgcaguacgagcugaagcacgggaccuucacgugcgccuccgaguacaccggcaacuaccagugcggccacuacaagcacaucaccagcaaggagacccucuacugcaucgacggggcccugcugacgaagagcuccgaguacaagggccccaucaccgacguguucuacaaggagaacagcuacaccaccacgaucaagcccgugaccuacaagcucgacggggucgugugcaccgagaucgaccccaagcuggacaacuacuacaagaaggacaacuccuacuucaccgagcagccgaucgaccuggugcccaaccagcccuaccccaacgccagcuucgacaacuucaaguucgucugcgacaacaucaaguucgccgacgaccucaaccagcugacgggcuacaagaagccggcgucccgcgagcugaaggugaccuucuuccccgaccucaacggggacguggucgccaucgacuacaagcacuacacccccagcuucaagaagggcgccaagcugcugcacaagcccaucguguggcacgugaacaacgccaccaacaaggcgacguacaagccgaacaccuggugcauccggugccucugguccaccaagcccgucgagaccagcaacuccuucgacgugcugaagagcgaggacgcccagggcauggacaaccuggccugcgaggaccucaagcccguguccgaggaggucguggagaaccccacgauccagaaggacgugcuggagugcaacgucaagaccaccgagguggugggggacaucauccugaagccggccaacaacagccucaagaucaccgaggaggucggccacacggaccugauggccgcguacguggacaacuccagccugaccaucaagaagcccaacgagcucucccgcgugcuggggcugaagacccucgccacccacggccuggccgccgucaacagcgugcccugggacacgaucgccaacuacgcgaagccguuccugaacaagguggucuccaccaccaccaacaucgugacgcgcugccucaaccgggugugcaccaacuacaugcccuacuucuucacccugcugcuccagcugugcaccuucacccgcagcacgaacucccggaucaaggccagcaugcccaccaccaucgccaagaacaccgucaagagcguggggaaguucugccuggaggccuccuucaacuaccucaagagccccaacuucuccaagcugaucaacaucaucaucugguuccugcuccugagcgugugccugggcucccucaucuacagcacggccgcgcugggcguccugauguccaaccucgggaugccgagcuacugcaccggcuaccgcgagggguaccugaacuccaccaacgugaccaucgccacguacugcaccggcagcauccccugcuccgugugccugagcggccucgacucccuggacaccuaccccagccuggagaccauccagaucacgaucuccagcuucaagugggaccucaccgccuucgggcuggucgccgagugguuccuggccuacauccucuucacccgguucuucuacgugcugggccuggcggccaucaugcagcucuucuucuccuacuucgccgugcacuucaucagcaacuccuggcugauguggcugaucaucaaccugguccagauggcccccaucagcgcgauggugcgcauguacaucuucuucgccagcuucuacuacguguggaaguccuacguccacgugguggacgggugcaacagcuccaccugcaugaugugcuacaagcggaaccgcgccacgcgggucgagugcaccaccaucgugaacggcguccgccggagcuucuacguguacgccaacgggggcaagggcuucugcaagcuccacaacuggaacugcgugaacugcgacaccuucugcgccggguccacguucaucagcgacgaggucgcgcgcgaccugucccugcaguucaagcggccgaucaaccccaccgaccagagcuccuacaucguggacagcgugaccgucaagaacggcuccauccaccucuacuucgacaaggccgggcagaagaccuacgagcgccacagccugucccacuucgugaaccuggacaaccuccgggccaacaacacgaagggcagccugcccaucaacgugaucgucuucgacgggaaguccaagugcgaggagagcuccgccaagagcgccuccguguacuacagccagcugaugugccagcccauccuccugcuggaccaggcgcucgugagcgacgucggcgacuccgccgagguggccgugaagauguucgacgccuacgucaacaccuucagcuccaccuucaacgugccgauggagaagcugaagacccugguggccacggcggaggccgagcucgccaagaacgucagccuggacaacgugcuguccaccuucaucagcgccgcgcgccagggcuucguggacuccgacgucgagaccaaggacgugguggagugccucaagcugagccaccaguccgacaucgaggucaccggggacagcugcaacaacuacaugcugacguacaacaagguggagaacaugaccccccgggaccucggcgccugcaucgacugcuccgcccgccacaucaacgcccagguggccaagagccacaacaucgcgcugaucuggaacgucaaggacuucaugucccugagcgagcagcuccggaagcagauccgcuccgccgccaagaagaacaaccugcccuucaagcugaccugcgccaccacgcgccagguggugaacgucgugaccaccaagaucgcccucaaggggggcuga

SEQ ID NO: 17655 - RNA, 5841 nt, Artificial Sequence
  SARS-CoV-2__MT893667.1__non-structural protein 3 (NSP3) CDS gc
auggcccccaccaaggugaccuucggcgacgacacggucaucgaggugcagggguacaagagcgugaacaucaccuucgagcuggacgagcgcaucgacaagguccucaacgagaagugcuccgccuacaccguggagcugggcaccgaggugaacgaguucgcgugcgucguggccgacgccgugaucaagacgcugcagccggucagcgagcuccugaccccccuggggaucgaccucgacgagugguccauggccaccuacuaccuguucgacgagagcggcgaguucaagcuggccucccacauguacugcagcuucuacccccccgacgaggacgaggaggagggggacugcgaggaggaggaguucgagccguccacccaguacgaguacggcacggaggacgacuaccagggcaagccccucgaguucggggcgaccagcgccgcccugcagcccgaggaggagcaggaggaggacuggcuggacgacgacucccagcagaccgugggccagcaggacgggagcgaggacaaccagaccacgaccauccagaccaucguggagguccagccccagcucgagauggagcugaccccgguggugcagacgaucgaggucaacuccuucagcggcuaccugaagcucaccgacaacguguacaucaagaacgccgacaucguggaggaggucaagaaggugaagcccaccguggucgugaacgcggccaacguguaccugaagcacgggggcggcgucgccggggcccugaacaaggccaccaacaacgcgaugcagguggaguccgacgacuacaucgccacgaacggcccccucaaggucgggggcagcugcgugcuguccggccacaaccuggccaagcacugccuccacguggucgggcccaacgugaacaagggcgaggacauccagcugcugaagagcgccuacgagaacuucaaccagcacgaggugcuccuggccccgcugcucuccgcggggaucuucggcgccgaccccauccacagccugcgggucugcguggacaccgugcgcaccaacgucuaccuggccguguucgacaagaaccucuacgacaagcugguguccagcuuccuggagaugaagagcgagaagcaggucgagcagaagaucgccgagauccccaaggaggaggugaagcccuucaucaccgaguccaagccgagcguggagcagcggaagcaggacgacaagaagaucaaggccugcgucgaggaggugacgaccacccucgaggagaccaaguuccugacggagaaccugcuccuguacaucgacaucaacgggaaccugcaccccgacuccgcgacccucgugagcgacaucgacaucaccuuccugaagaaggacgcccccuacaucgucggcgacguggugcaggagggcguccugaccgccguggugauccccacgaagaaggccgggggcaccaccgagaugcucgccaaggcgcugcgcaaggucccgaccgacaacuacaucacgaccuaccccgggcagggccugaacggguacaccguggaggaggccaagaccgugcucaagaagugcaaguccgccuucuacauccugcccagcaucaucuccaacgagaagcaggagauccugggcaccgucagcuggaaccuccgggagaugcuggcccacgcggaggagacgcgcaagcugaugcccgugugcguggagaccaaggccaucgucuccaccauccagcggaaguacaagggcaucaagauccaggagggggugguggacuacggcgcccgcuucuacuucuacaccagcaagacgaccgucgccucccugaucaacacccucaacgaccugaacgagacccuggugacgaugccgcucggguacgugacccacggccugaaccuggaggaggccgcgcgguacaugcgcagccucaagguccccgccaccguguccgugagcucccccgacgccgucaccgccuacaacggguaccugacgagcuccagcaagacccccgaggagcacuucaucgagaccaucucccuggccggcagcuacaaggacuggagcuacuccggccagagcacccagcucgggaucgaguuccugaagcggggcgacaaguccguguacuacacgagcaacccgaccaccuuccaccuggacggggaggugaucaccuucgacaaccucaagacgcugcugucccuccgcgagguccggaccaucaagguguucaccaccguggacaacaucaaccugcacacgcaggucguggacaugagcaugaccuacggccagcaguucggccccaccuaccuggacggggcggacgugaccaagaucaagccccacaacucccacgagggcaagacguucuacguccucccgaacgacgacacccugcgcguggaggccuucgaguacuaccacaccaccgaccccagcuuccuggggcgguacauguccgcccucaaccacacgaagaaguggaaguacccccaggugaacggccugaccagcaucaagugggccgacaacaacugcuaccuggccaccgcgcuccugacccugcagcagaucgagcucaaguucaaccccccggcccugcaggacgccuacuaccgcgcccgggcgggggaggccgccaacuucugcgcccugauccucgccuacugcaacaagacggucggcgagcugggcgacgugcgcgagaccauguccuaccuguuccagcacgcgaaccucgacagcugcaagcggguccugaacguggugugcaagaccugcgggcagcagcagaccacccugaagggcgucgaggccgugauguacauggggacgcucuccuacgagcaguucaagaagggcgugcagauccccugcaccugcgggaagcaggccaccaaguaccugguccagcaggagagccccuucgugaugauguccgcccccccggcccaguacgagcugaagcacggcaccuucacgugcgcgagcgaguacaccggcaacuaccagugcgggcacuacaagcacaucaccuccaaggagacccucuacugcaucgacggcgcccugcugacgaagagcagcgaguacaaggggcccaucaccgacguguucuacaaggagaacuccuacaccaccacgaucaagcccgucaccuacaagcucgacggcguggugugcaccgagaucgaccccaagcuggacaacuacuacaagaaggacaacagcuacuucaccgagcagccgaucgaccugguccccaaccagcccuaccccaacgccuccuucgacaacuucaaguucgugugcgacaacaucaaguucgccgacgaccucaaccagcugacgggguacaagaagccggccagccgcgagcugaaggugaccuucuuccccgaccucaacggcgacgucguggcgaucgacuacaagcacuacacccccuccuucaagaagggcgccaagcugcugcacaagcccaucguguggcacgucaacaacgccaccaacaaggccacguacaagccgaacaccuggugcauccggugccucuggagcaccaagcccguggagaccuccaacagcuucgacgugcugaaguccgaggacgcgcaggggauggacaaccuggccugcgaggaccucaagcccgucagcgaggaggugguggagaaccccacgauccagaaggacguccuggagugcaacgugaagaccaccgagguggucggcgacaucauccugaagccggccaacaacucccucaagaucaccgaggagguggggcacacggaccugauggccgccuacguggacaacagcucccugaccaucaagaagcccaacgagcucagccgcguccugggccugaagacccucgcgacccacgggcuggccgccgugaacuccgugcccugggacacgaucgccaacuacgccaagccguuccugaacaaggucgugagcaccaccaccaacaucgugacgcgcugccucaaccgggucugcaccaacuacaugcccuacuucuucacccugcugcuccagcugugcaccuucacccgcuccacgaacagccggaucaaggcguccaugcccaccaccaucgccaagaacaccgugaagagcgugggcaaguucugccuggaggccagcuucaacuaccucaagucccccaacuucagcaagcugaucaacaucaucaucugguuccugcuccuguccgucugccugggcagccucaucuacuccacggccgcccugggggugcugaugagcaaccucggcaugccguccuacugcaccggguaccgcgagggcuaccugaacagcaccaacgugaccaucgcgacguacugcaccggcuccauccccugcagcgucugccuguccgggcucgacagccuggacaccuaccccucccuggagaccauccagaucacgaucagcuccuucaagugggaccucaccgccuucggccugguggccgagugguuccuggccuacauccucuucacccgguucuucuacgugcuggggcuggccgcgaucaugcagcucuucuucagcuacuucgccguccacuucaucuccaacagcuggcugauguggcugaucaucaaccuggugcagauggcccccaucuccgccauggugcgcauguacaucuucuucgcgagcuucuacuacgucuggaagagcuacgugcacguggucgacggcugcaacuccagcaccugcaugaugugcuacaagcggaaccgcgccacgcggguggagugcaccaccaucgucaacggggugcgccgguccuucuacguguacgccaacggcggcaagggguucugcaagcuccacaacuggaacugcgucaacugcgacaccuucugcgccggcagcacguucaucuccgacgagguggcccgcgaccugagccugcaguucaagcggccgaucaaccccaccgaccaguccagcuacaucguggacuccgucaccgugaagaacgggagcauccaccucuacuucgacaaggcgggccagaagaccuacgagcgccacucccugagccacuucgugaaccuggacaaccuccgggccaacaacacgaaggggucccugcccaucaacgucaucguguucgacggcaagagcaagugcgaggaguccagcgccaaguccgccagcguguacuacucccagcugaugugccagcccauccuccugcuggaccaggcccucgucagcgacgugggcgacagcgcggagguggccgucaagauguucgacgccuacgugaacaccuucuccagcaccuucaacgugccgauggagaagcugaagacccuggucgccacggccgaggcggagcucgccaagaacgugucccuggacaacgugcugagcaccuucaucuccgccgcccgccagggguucgucgacagcgacguggagaccaaggacguggucgagugccucaagcugucccaccagagcgacaucgaggugaccggcgacuccugcaacaacuacaugcugacguacaacaagguggagaacaugaccccccgggaccucggggcgugcaucgacugcagcgcccgccacaucaacgcccaggucgccaagucccacaacaucgcccugaucuggaacgugaaggacuucaugagccuguccgagcagcuccggaagcagauccgcagcgcggccaagaagaacaaccugcccuucaagcugaccugcgccaccacgcgccagguggucaacguggugaccaccaagaucgcccucaagggcggguga

SEQ ID NO: 17656 - RNA, 5841 nt, Artificial Sequence
  SARS-CoV-2__MT893675.1__non-structural protein 3 (NSP3) CDS gc
auggcccccaccaaggugaccuucggcgacgacacggucaucgaggugcagggguacaagagcgugaacaucaccuucgagcuggacgagcgcaucgacaagguccucaacgagaagugcuccgccuacaccguggagcugggcaccgaggugaacgaguucgcgugcgucguggccgacgccgugaucaagacgcugcagccggucagcgagcuccugaccccccuggggaucgaccucgacgagugguccauggccaccuacuaccuguucgacgagagcggcgaguucaagcuggccucccacauguacugcagcuucuacccccccgacgaggacgaggaggagggggacugcgaggaggaggaguucgagccguccacccaguacgaguacggcacggaggacgacuaccagggcaagccccucgaguucggggcgaccagcgccgcccugcagcccgaggaggagcaggaggaggacuggcuggacgacgacucccagcagaccgugggccagcaggacgggagcgaggacaaccagaccacgaccauccagaccaucguggagguccagccccagcucgagauggagcugaccccgguggugcagacgaucgaggucaacuccuucagcggcuaccugaagcucaccgacaacguguacaucaagaacgccgacaucguggaggaggcgaagaaggucaagcccaccgugguggucaacgccgccaacguguaccugaagcacgggggcggcguggccggggcccugaacaaggcgaccaacaacgccaugcaggucgaguccgacgacuacaucgccacgaacggcccccucaagguggggggcagcugcguccuguccggccacaaccuggccaagcacugccuccacgugguggggcccaacgucaacaagggcgaggacauccagcugcugaagagcgccuacgagaacuucaaccagcacgaggugcuccuggcgccgcugcucuccgccgggaucuucggcgccgaccccauccacagccugcgggugugcgucgacaccgugcgcaccaacguguaccuggccgucuucgacaagaaccucuacgacaagcuggugcuguccuuccucgagaugaagagcgagaagcagguggagcagaagaucgccgagauccccaaggaggaggucaagcccuucaucaccgagagcaagccguccguggagcagcggaagcaggacgacaagaagaucaaggcgugcguggaggaggucacgaccacccuggaggagaccaaguuccugacggagaaccuccugcuguacaucgacaucaacgggaaccuccaccccgacagcgccacccugguguccgacaucgacaucaccuuccugaagaaggacgcccccuacaucgugggcgacgucgugcaggagggcgugcucaccgccgucgugauccccacgaagaaggccgggggcaccaccgagaugcuggcgaaggcccugcgcaaggugccgaccgacaacuacaucacgaccuaccccgggcagggccucaacggguacaccgucgaggaggccaagaccgugcugaagaagugcaagagcgccuucuacauccugcccuccaucaucagcaacgagaagcaggagauccucggcaccguguccuggaaccugcgggagaugcuggcgcacgccgaggagacgcgcaagcugaugcccgucugcguggagaccaaggccaucgugagcaccauccagcggaaguacaagggcaucaagauccaggagggggucguggacuacggcgcccgcuucuacuucuacaccuccaagacgaccguggccagccucaucaacacccugaacgaccugaacgagacccucgucacgaugccgcugggguacgugacccacggccugaaccucgaggaggcggcccgguacaugcgcucccugaaggugcccgccaccgucagcguguccagccccgacgccgugaccgccuacaacggguaccugacguccagcuccaagacccccgaggagcacuucaucgagaccaucagccucgcgggcuccuacaaggacuggagcuacagcggccaguccacccagcuggggaucgaguuccugaagcggggcgacaagagcgucuacuacacguccaacccgaccaccuuccaccucgacggggaggugaucaccuucgacaaccugaagacgcugcucagccugcgcgaggugcggaccaucaaggucuucaccaccguggacaacaucaaccugcacacgcagguggucgacauguccaugaccuacggccagcaguucggccccaccuaccucgacggggccgacgugaccaagaucaagccccacaacagccacgagggcaagacguucuacgugcugccgaacgacgacacccugcgcgucgaggccuucgaguacuaccacaccaccgaccccuccuuccucgggcgguacaugagcgcccugaaccacacgaagaaguggaaguacccccaggugaacggccugaccuccaucaagugggccgacaacaacugcuaccucgcgaccgcccugcugacccuccagcagaucgagcugaaguucaaccccccggcccugcaggacgccuacuaccgcgcgcgggccggggaggccgccaacuucugcgcccucauccuggcguacugcaacaagacggugggcgagcugggcgacguccgcgagaccaugagcuaccucuuccagcacgccaaccuggacuccugcaagcgggugcugaacgucgugugcaagaccugcgggcagcagcagaccacccucaagggcguggaggccgucauguacauggggacgcugagcuacgagcaguucaagaagggcgugcagauccccugcaccugcgggaagcaggccaccaaguaccuggugcagcaggagucccccuucgucaugaugagcgcccccccggcgcaguacgagcucaagcacggcaccuucacgugcgccuccgaguacaccggcaacuaccagugcgggcacuacaagcacaucaccagcaaggagacccuguacugcaucgacggcgcccugcucacgaaguccagcgaguacaaggggcccaucaccgacguguucuacaaggagaacagcuacaccaccacgaucaagcccgugaccuacaagcuggacggcgucgugugcaccgagaucgaccccaagcuggacaacuacuacaagaaggacaacuccuacuucaccgagcagccgaucgaccucgugcccaaccagcccuaccccaacgccagcuucgacaacuucaaguucgucugcgacaacaucaaguucgccgacgaccugaaccagcugacgggguacaagaagccggcgucccgcgagcucaaggugaccuucuuccccgaccugaacggcgacguggucgccaucgacuacaagcacuacacccccagcuucaagaagggcgccaagcugcuccacaagcccaucguguggcacgugaacaacgccaccaacaaggcgacguacaagccgaacaccuggugcauccggugccugugguccaccaagcccgucgagaccagcaacuccuucgacgugcugaagagcgaggacgcccaggggauggacaaccucgccugcgaggaccugaagcccguguccgaggaggucguggagaaccccacgauccagaaggacgugcuggagugcaacgucaagaccaccgagguggugggcgacaucauccucaagccggccaacaacagccugaagaucaccgaggaggucgggcacacggaccugauggccgcguacguggacaacuccagccucaccaucaagaagcccaacgagcugucccgcgugcugggccucaagacccuggccacccacgggcuggccgccgucaacagcgugcccugggacacgaucgccaacuacgcgaagccguuccucaacaagguggucuccaccaccaccaacaucgugacgcgcugccugaaccgggugugcaccaacuacaugcccuacuucuucacccugcuccugcagcugugcaccuucacccgcagcacgaacucccggaucaaggccagcaugcccaccaccaucgccaagaacaccgucaaguccgugggcaaguucugccucgaggccagcuucaacuaccugaagagccccaacuucuccaagcugaucaacaucaucaucugguuccuccugcugagcgugugccucggcucccugaucuacagcacggccgcgcuggggguccucauguccaaccugggcaugccgagcuacugcaccggguaccgcgagggcuaccugaacuccaccaacgugaccaucgccacguacugcaccggcagcauccccugcuccgugugccucagcgggcuggacucccuggacaccuaccccagccucgagaccauccagaucacgaucuccagcuucaagugggaccugaccgccuucggccuggucgccgagugguuccucgccuacauccuguucacccgguucuucuacgugcuggggcucgcggccaucaugcagcuguucuucuccuacuucgccgugcacuucaucagcaacuccuggcugauguggcugaucaucaaccucguccagauggcccccaucagcgcgauggugcgcauguacaucuucuucgccuccuucuacuacguguggaagagcuacguccacgugguggacggcugcaacagcuccaccugcaugaugugcuacaagcggaaccgcgccacgcgggucgagugcaccaccaucgugaacgggguccgccggagcuucuacguguacgccaacggcggcaagggguucugcaagcugcacaacuggaacugcgugaacugcgacaccuucugcgccggcuccacguucaucagcgacgaggucgcgcgcgaccugucccuccaguucaagcggccgaucaaccccaccgaccagagcuccuacaucguggacagcgugaccgucaagaacggguccauccaccuguacuucgacaaggccggccagaagaccuacgagcgccacagccugucccacuucgugaaccucgacaaccugcgggccaacaacacgaaggggagccugcccaucaacgugaucgucuucgacggcaaguccaagugcgaggagagcuccgccaagagcgccuccguguacuacagccagcucaugugccagcccauccugcugcucgaccaggcgcugguguccgacgucggcgacagcgccgagguggccgugaagauguucgacgccuacgucaacaccuucagcuccaccuucaacgugccgauggagaagcugaagacccucguggccacggcggaggccgagcuggccaacaacgucagccuggacaacgugcucuccaccuucaucagcgccgcgcgccagggguucguggacuccgacgucgagaccaaggacgugguggagugccugaagcugagccaccaguccgacaucgaggucaccggcgacagcugcaacaacuacaugcucacguacaacaagguggagaacaugaccccccgggaccugggggccugcaucgacugcuccgcccgccacaucaacgcccagguggccaagagccacaacaucgcgcugaucuggaacgucaaggacuucaugucccucagcgagcagcugcggaagcagauccgcuccgccgccaagaagaacaaccugcccuucaagcucaccugcgccaccacgcgccagguggugaacgucgugaccaccaagaucgcccugaagggcggguga

SEQ ID NO: 17657 - RNA, 5841 nt, Artificial Sequence
  SARS-CoV-2__MT893685.1__non-structural protein 3 (NSP3) CDS gc
auggcccccaccaaggugaccuucggcgacgacacggucaucgaggugcagggguacaagagcgugaacaucaccuucgagcuggacgagcgcaucgacaagguccucaacgagaagugcuccgccuacaccguggagcugggcaccgaggugaacgaguucgcgugcgucguggccgacgccgugaucaagacgcugcagccggucagcgagcuccugaccccccuggggaucgaccucgacgagugguccauggccaccuacuaccuguucgacgagagcggcgaguucaagcuggccucccacauguacugcagcuucuacccccccgacgaggacgaggaggagggggacugcgaggaggaggaguucgagccguccacccaguacgaguacggcacggaggacgacuaccagggcaagccccucgaguucggggcgaccagcgccgcccugcagcccgaggaggagcaggaggaggacuggcuggacgacgacucccagcagaccgugggccagcaggacgggagcgaggacaaccagaccacgaccauccagaccaucguggagguccagccccagcucgagauggagcugaccccgguggugcagacgaucgaggucaacuccuucagcggcuaccugaagcucaccgacaacguguacaucaagaacgccgacaucguggaggaggcgaagaaggucaagcccaccgugguggucaacgccgccaacguguaccugaagcacgggggcggcguggccggggcccugaacaaggcgaccaacaacgccaugcaggucgaguccgacgacuacaucgccacgaacggcccccucaagguggggggcagcugcguccuguccggccacaaccuggccaagcacugccuccacgugguggggcccaacgucaacaagggcgaggacauccagcugcugaagagcgccuacgagaacuucaaccagcacgaggugcuccuggcgccgcugcucuccgccgggaucuucggcgccgaccccauccacagccugcgggugugcgucgacaccgugcgcaccaacguguaccuggccgucuucgacaagaaccucuacgacaagcugguguccagcuuccuggagaugaagagcgagaagcagguggagcagaagaucgccgagauccccaaggaggaggucaagcccuucaucaccgaguccaagccgagcguggagcagcggaagcaggacgacaagaagaucaaggcgugcguggaggaggucacgaccacccucgaggagaccaaguuccugacggagaaccugcuccuguacaucgacaucaacgggaaccugcaccccgacuccgccacccucgugagcgacaucgacaucaccuuccugaagaaggacgcccccuacaucgugggcgacgucgugcaggagggcgugcugaccgccgucgugauccccacgaagaaggccgggggcaccaccgagaugcucgcgaaggcccugcgcaaggugccgaccgacaacuacaucacgaccuaccccgggcagggccugaacggguacaccgucgaggaggccaagaccgugcucaagaagugcaaguccgccuucuacauccugcccagcaucaucuccaacgagaagcaggagauccugggcaccgugagcuggaaccuccgggagaugcuggcgcacgccgaggagacgcgcaagcugaugcccgucugcguggagaccaaggccaucguguccaccauccagcggaaguacaagggcaucaagauccaggagggggucguggacuacggcgcccgcuucuacuucuacaccagcaagacgaccguggccucccugaucaacacccucaacgaccugaacgagacccuggucacgaugccgcucggguacgugacccacggccugaaccuggaggaggcggcccgguacaugcgcagccucaaggugcccgccaccgucuccgugagcucccccgacgccgugaccgccuacaacggguaccugacgagcuccagcaagacccccgaggagcacuucaucgagaccaucucccuggcgggcagcuacaaggacuggagcuacuccggccagagcacccagcucgggaucgaguuccugaagcggggcgacaaguccgucuacuacacgagcaacccgaccaccuuccaccuggacggggaggugaucaccuucgacaaccucaagacgcugcugucccuccgcgaggugcggaccaucaaggucuucaccaccguggacaacaucaaccugcacacgcagguggucgacaugagcaugaccuacggccagcaguucggccccaccuaccuggacggggccgacgugaccaagaucaagccccacaacucccacgagggcaagacguucuacgugcucccgaacgacgacacccugcgcgucgaggccuucgaguacuaccacaccaccgaccccagcuuccuggggcgguacauguccgcccucaaccacacgaagaaguggaaguacccccaggugaacggccugaccagcaucaagugggccgacaacaacugcuaccuggcgaccgcccuccugacccugcagcagaucgagcucaaguucaaccccccggcccugcaggacgccuacuaccgcgcgcgggccggggaggccgccaacuucugcgcccugauccucgcguacugcaacaagacggugggcgagcugggcgacguccgcgagaccauguccuaccuguuccagcacgccaaccucgacagcugcaagcgggugcugaacgucgugugcaagaccugcgggcagcagcagaccacccugaagggcguggaggccgucauguacauggggacgcucuccuacgagcaguucaagaagggcgugcagauccccugcaccugcgggaagcaggccaccaaguaccuggugcagcaggagagccccuucgucaugauguccgcccccccggcgcaguacgagcugaagcacggcaccuucacgugcgccagcgaguacaccggcaacuaccagugcgggcacuacaagcacaucaccuccaaggagacccucuacugcaucgacggcgcccugcugacgaagagcagcgaguacaaggggcccaucaccgacguguucuacaaggagaacuccuacaccaccacgaucaagcccgugaccuacaagcucgacggcgucgugugcaccgagaucgaccccaagcuggacaacuacuacaagaaggacaacagcuacuucaccgagcagccgaucgaccuggugcccaaccagcccuaccccaacgccuccuucgacaacuucaaguucgucugcgacaacaucaaguucgccgacgaccucaaccagcugacgggguacaagaagccggcgagccgcgagcugaaggugaccuucuuccccgaccucaacggcgacguggucgccaucgacuacaagcacuacacccccuccuucaagaagggcgccaagcugcugcacaagcccaucguguggcacgugaacaacgccaccaacaaggcgacguacaagccgaacaccuggugcauccggugccucuggagcaccaagcccgucgagaccuccaacagcuucgacgugcugaaguccgaggacgcccaggggauggacaaccuggccugcgaggaccucaagcccgugagcgaggaggucguggagaaccccacgauccagaaggacgugcuggagugcaacgucaagaccaccgagguggugggcgacaucauccugaagccggccaacaacucccucaagaucaccgaggaggucgggcacacggaccugauggccgcguacguggacaacagcucccugaucaucaagaagcccaacgagcucagccgcgugcugggccugaagacccucgccacccacgggcuggccgccgucaacuccgugcccugggacaccaucgccaacuacgcgaagccguuccugaacaagguggucagcacgaccaccaacaucgugacccgcugccucaaccgggugugcacgaacuacaugcccuacuucuucacccugcugcuccagcugugcaccuucacccgcuccaccaacagccggaucaaggccuccaugcccacgaccaucgccaagaacaccgucaagagcgugggcaaguucugccuggaggccagcuucaacuaccucaagucccccaacuucagcaagcugaucaacaucaucaucugguuccugcuccuguccgugugccugggcagccucaucuacuccaccgccgcgcuggggguccugaugagcaaccucggcaugccguccuacugcacgggguaccgcgagggcuaccugaacagcaccaacgugaccaucgccaccuacugcacgggcuccauccccugcagcgugugccuguccgggcucgacagccuggacaccuaccccucccuggagaccauccagaucaccaucagcuccuucaagugggaccucacggccuucggccuggucgccgagugguuccuggccuacauccucuucacccgguucuucuacgugcuggggcuggcggccaucaugcagcucuucuucagcuacuucgccgugcacuucaucuccaacagcuggcugauguggcugaucaucaaccugguccagauggcccccaucuccgcgauggugcgcauguacaucuucuucgccagcuucuacuacguguggaagagcuacguccacgugguggacggcugcaacuccagcaccugcaugaugugcuacaagcggaaccgcgccacccgggucgagugcacgaccaucgugaacgggguccgccgguccuucuacguguacgccaacggcggcaagggguucugcaagcuccacaacuggaacugcgugaacugcgacaccuucugcgccggcagcaccuucaucuccgacgaggucgcgcgcgaccugagccugcaguucaagcggccgaucaaccccacggaccaguccagcuacaucguggacuccgugaccgucaagaacgggagcauccaccucuacuucgacaaggccggccagaagaccuacgagcgccacucccugagccacuucgugaaccuggacaaccuccgggccaacaacaccaaggggucccugcccaucaacgugaucgucuucgacggcaagagcaagugcgaggaguccagcgccaaguccgccagcguguacuacucccagcugaugugccagcccauccuccugcuggaccaggcgcucgugagcgacgucggcgacagcgccgagguggccgugaagauguucgacgccuacgucaacacguucuccagcaccuucaacgugccgauggagaagcugaagacccugguggccaccgcggaggccgagcucgccaagaacgucucccuggacaacgugcugagcacguucaucuccgccgcgcgccagggguucguggacagcgacgucgagaccaaggacgugguggagugccucaagcugucccaccagagcgacaucgaggucaccggcgacuccugcaacaacuacaugcugaccuacaacaagguggagaacaugacgccccgggaccucggggccugcaucgacugcagcgcccgccacaucaacgcccagguggccaagucccacaacaucgcgcugaucuggaacgucaaggacuucaugagccuguccgagcagcuccggaagcagauccgcagcgccgccaagaagaacaaccugcccuucaagcugaccugcgccaccacccgccagguggugaacgucgugacgaccaagaucgcccucaagggcggguga

SEQ ID NO: 17658 - RNA, 5841 nt, Artificial Sequence
  SARS-CoV-2__MT897460.1__non-structural protein 3 (NSP3) CDS gc
auggcccccaccaaggugaccuucggcgacgacacggucaucgaggugcagggguacaagagcgugaacaucaccuucgagcuggacgagcgcaucgacaagguccucaacgagaagugcuccgccuacaccguggagcugggcaccgaggugaacgaguucgcgugcgucguggccgacgccgugaucaagacgcugcagccggucagcgagcuccugaccccccuggggaucgaccucgacgagugguccauggccaccuacuaccuguucgacgagagcggcgaguucaagcuggccucccacauguacugcagcuucuacccccccgacgaggacgaggaggagggggacugcgaggaggaggaguucgagccguccacccaguacgaguacggcacggaggacgacuaccagggcaagccccucgaguucggggcgaccagcgccgcccugcagcccgaggaggagcaggaggaggacuggcuggacgacgacucccagcagaccgugggccagcaggacgggagcgaggacaaccagaccacgaccauccagaccaucguggagguccagccccagcucgagauggagcugaccccgguggugcagacgaucgaggucaacuccuucagcggcuaccugaagcucaccgacaacguguacaucaagaacgccgacaucguggaggaggcgaagaaggucaagcccaccgugguggucaacgccgccaacguguaccugaagcacgggggcggcguggccggggcccugaacaaggcgaccaacaacgccaugcaggucgaguccgacgacuacaucgccacgaacggcccccucaagguggggggcagcugcguccuguccggccacaaccuggccaagcacugccuccacgugguggggcccaacgucaacaagggcgaggacauccagcugcugaagagcgccuacgagaacuucaaccagcacgaggugcuccuggcgccgcugcucuccgccgggaucuucggcgccgaccccauccacagccugcgggugugcgucgacaccgugcgcaccaacguguaccuggccgucuucgacaagaaccucuacgacaagcugguguccagcuuccuggagaugaagagcgagaagcagguggagcagaagaucgccgagauccccaaggaggaggucaagcccuucaucaccgaguccaagccgagcguggagcagcggaagcaggacgacaagaagaucaaggcgugcguggaggaggucacgaccacccucgaggagaccaaguuccugacggagaaccugcuccuguacaucgacaucaacgggaaccugcaccccgacuccgccacccucgugagcgacaucgacaucaccuuccugaagaaggacgcccccuacaucgugggcgacgucgugcaggagggcgugcugaccgccgucgugauccccacgaagaaggccgggggcaccaccgagaugcucgcgaaggcccugcgcaaggugccgaccgacaacuacaucacgaccuaccccgggcagggccugaacggguacaccgucgaggaggccaagaccgugcucaagaagugcaaguccgccuucuacauccugcccagcaucaucuccaacgagaagcaggagauccugggcaccgugagcuggaaccuccgggagaugcuggcgcacgccgaggagacgcgcaagcugaugcccgucugcguggagaccaaggccaucguguccaccauccagcggaaguacaagggcaucaagauccaggagggggucguggacuacggcgcccgcuucuacuucuacaccagcaagacgaccguggccucccugaucaacacccucaacgaccugaacgagacccuggucacgaugccgcucggguacgugacccacggccugaaccuggaggaggcggcccgguacaugcgcagccucaaggugcccgccaccgucuccgugagcucccccgacgccgugaccgccuacaacggguaccugacgagcuccagcaagacccccgaggagcacuucaucgagaccaucucccuggcgggcagcuacaaggacuggagcuacuccggccagagcacccagcucgggaucgaguuccugaagcggggcgacaaguccgucuacuacacgagcaacccgaccaccuuccaccuggacggggaggugaucaccuucgacaaccucaagacgcugcugucccuccgcgaggugcggaccaucaaggucuucaccaccguggacaacaucaaccugcacacgcagguggucgacaugagcaugaccuacggccagcaguucggccccaccuaccuggacggggccgacgugaccaagaucaagccccacaacucccacgagggcaagacguucuacgugcucccgaacgacgacacccugcgcgucgaggccuucgaguacuaccacaccaccgaccccagcuuccuggggcgguacauguccgcccucaaccacacgaagaaguggaaguacccccaggugaacggccugaccagcaucaagugggccgacaacaacugcuaccuggcgaccgcccuccugacccugcagcagaucgagcucaaguucaaccccccggcccugcaggacgccuacuaccgcgcgcgggccggggaggccgccaacuucugcgcccugauccucgcguacugcaacaagacggugggcgagcugggcgacguccgcgagaccauguccuaccuguuccagcacgccaaccucgacagcugcaagcgggugcugaacgucgugugcaagaccugcgggcagcagcagaccacccugaagggcguggaggccgucauguacauggggacgcucuccuacgagcaguucaagaagggcuuccagauccccugcaccugcgggaagcaggccaccaaguaccuggugcagcaggagagccccuucgugaugauguccgcccccccggcgcaguacgagcugaagcacggcaccuucacgugcgccagcgaguacaccggcaacuaccagugcgggcacuacaagcacaucaccuccaaggagacccucuacugcaucgacggcgcccugcugacgaagagcagcgaguacaaggggcccaucaccgacgucuucuacaaggagaacuccuacaccaccacgaucaagcccgugaccuacaagcucgacggcguggucugcaccgagaucgaccccaagcuggacaacuacuacaagaaggacaacagcuacuucaccgagcagccgaucgaccuggugcccaaccagcccuaccccaacgccuccuucgacaacuucaaguucgugugcgacaacaucaaguucgccgacgaccucaaccagcugacgggguacaagaagccggcgagccgcgagcugaaggucaccuucuuccccgaccucaacggcgacgugguggccaucgacuacaagcacuacacccccuccuucaagaagggcgccaagcugcugcacaagcccaucgucuggcacgugaacaacgccaccaacaaggcgacguacaagccgaacaccuggugcauccggugccucuggagcaccaagcccguggagaccuccaacagcuucgacguccugaaguccgaggacgcccaggggauggacaaccuggccugcgaggaccucaagcccgugagcgaggagguggucgagaaccccacgauccagaaggacgugcuggagugcaacgugaagaccaccgaggucgugggcgacaucauccugaagccggccaacaacucccucaagaucaccgaggagguggggcacacggaccugauggccgcguacgucgacaacagcucccugaccaucaagaagcccaacgagcucagccgcgugcugggccugaagacccucgccacccacgggcuggccgccgugaacuccguccccugggacacgaucgccaacuacgcgaagccguuccugaacaagguggugagcaccaccaccaacaucgucacgcgcugccucaaccgggugugcaccaacuacaugcccuacuucuucacccugcugcuccagcugugcaccuucacccgcuccacgaacagccggaucaaggccuccaugcccaccaccaucgccaagaacaccgugaagagcgucggcaaguucugccuggaggccagcuucaacuaccucaagucccccaacuucagcaagcugaucaacaucaucaucugguuccugcuccuguccgugugccugggcagccucaucuacuccacggccgcgcugggggugcugaugagcaaccucggcaugccguccuacugcaccggguaccgcgagggcuaccugaacagcaccaacgucaccaucgccacguacugcaccggcuccauccccugcagcgugugccuguccgggcucgacagccuggacaccuaccccucccuggagaccauccagaucacgaucagcuccuucaagugggaccucaccgccuucggccugguggccgagugguuccuggccuacauccucuucacccgguucuucuacguccuggggcuggcggccaucaugcagcucuucuucagcuacuucgccgugcacuucaucuccaacagcuggcugauguggcugaucaucaaccuggugcagauggcccccaucuccgcgaugguccgcauguacaucuucuucgccagcuucuacuacguguggaagagcuacgugcacgucguggacggcugcaacuccagcaccugcaugaugugcuacaagcggaaccgcgccacgcggguggagugcaccaccaucgucaacggggugcgccgguccuucuacgucuacgccaacggcggcaagggguucugcaagcuccacaacuggaacugcgugaacugcgacaccuucugcgccggcagcacguucaucuccgacgagguggcgcgcgaccugagccugcaguucaagcggccgaucaaccccaccgaccaguccagcuacaucgucgacuccgugaccgugaagaacgggagcauccaccucuacuucgacaaggccggccagaagaccuacgagcgccacucccugagccacuucgucaaccuggacaaccuccgggccaacaacacgaaggggucccugcccaucaacgugaucguguucgacggcaagagcaagugcgaggaguccagcgccaaguccgccagcgucuacuacucccagcugaugugccagcccauccuccugcuggaccaggcgcucgugagcgacgugggcgacagcgccgaggucgccgugaagauguucgacgccuacgugaacaccuucuccagcaccuucaacgucccgauggagaagcugaagacccugguggccacggcggaggccgagcucgccaagaacgugucccuggacaacguccugagcaccuucaucuccgccgcgcgccagggguucguggacagcgacguggagaucaaggacgucguggagugccucaagcugucccaccagagcgacaucgaggugaccggcgacuccugcaacaacuacaugcugaccuacaacaaggucgagaacaugacgccccgggaccucggggccugcaucgacugcagcgcccgccacaucaacgcccagguggccaagucccacaacaucgcgcugaucuggaacgugaaggacuucaugagccuguccgagcagcuccggaagcagauccgcagcgccgccaagaagaacaaccugcccuucaagcugaccugcgccaccacccgccaggucgugaacguggucacgaccaagaucgcccucaagggcggguga

SEQ ID NO: 17659 - RNA, 5841 nt, Artificial Sequence
  SARS-CoV-2__MT897461.1__non-structural protein 3 (NSP3) CDS gc
auggcccccaccaaggugaccuucggcgacgacacggucaucgaggugcagggguacaagagcgugaacaucaccuucgagcuggacgagcgcaucgacaagguccucaacgagaagugcuccgccuacaccguggagcugggcaccgaggugaacgaguucgcgugcgucguggccgacgccgugaucaagacgcugcagccggucagcgagcuccugaccccccuggggaucgaccucgacgagugguccauggccaccuacuaccuguucgacgagagcggcgaguucaagcuggccucccacauguacugcagcuucuacccccccgacgaggacgaggaggagggggacugcgaggaggaggaguucgagccguccacccaguacgaguacggcacggaggacgacuaccagggcaagccccucgaguucggggcgaccagcgccgcccugcagcccgaggaggagcaggaggaggacuggcuggacgacgacucccagcagaccgugggccagcaggacgggagcgaggacaaccagaccacgaccauccagaccaucguggagguccagccccagcucgagauggagcugaccccgguggugcagacgaucgaggucaacuccuucagcggcuaccugaagcucaccgacaacguguacaucaagaacgccgacaucguggaggaggcgaagaaggucaagcccaccgugguggucaacgccgccaacguguaccugaagcacgggggcggcguggccggggcccugaacaaggcgaccaacaacgccaugcaggucgaguccgacgacuacaucgccacgaacggcccccucaagguggggggcagcugcguccuguccggccacaaccuggccaagcacugccuccacgugguggggcccaacgucaacaagggcgaggacauccagcugcugaagagcgccuacgagaacuucaaccagcacgaggugcuccuggcgccgcugcucuccgccgggaucuucggcgccgaccccauccacagccugcgggugugcgucgacaccgugugcaccaacguguaccuggccgucuucgacaagaaccucuacgacaagcugguguccagcuuccuggagaugaagagcgagaagcagguggagcagaagaucgccgagauccccaaggaggaggucaagcccuucaucaccgaguccaagccgagcguggagcagcgcaagcaggacgacaagaagaucaaggcgugcguggaggaggucacgaccacccucgaggagaccaaguuccugacggagaaccugcuccuguacaucgacaucaacgggaaccugcaccccgacuccgccacccucgugagcgacaucgacaucaccuuccugaagaaggacgcccccuacaucgugggcgacgucgugcaggagggcgugcugaccgccgucgugauccccacgaagaaggccgggggcaccaccgagaugcucgcgaaggcccugcggaaggugccgaccgacaacuacaucacgaccuaccccgggcagggccugaacggguacaccgucgaggaggccaagaccgugcucaagaagugcaaguccgccuucuacauccugcccagcaucaucuccaacgagaagcaggagauccugggcaccgugagcuggaaccuccgcgagaugcuggcgcacgccgaggagacgcggaagcugaugcccgucugcguggagaccaaggccaucguguccaccauccagcgcaaguacaagggcaucaagauccaggagggggucguggacuacggcgcccgguucuacuucuacaccagcaagacgaccguggccucccugaucaacacccucaacgaccugaacgagacccuggucacgaugccgcucggguacgugacccacggccugaaccuggaggaggcggcccgcuacaugcggagccucaaggugcccgccaccgucuccgugagcucccccgacgccgugaccgccuacaacggguaccugacgagcuccagcaagacccccgaggagcacuucaucgagaccaucucccuggcgggcagcuacaaggacuggagcuacuccggccagagcacccagcucgggaucgaguuccugaagcgcggcgacaaguccgucuacuacacgagcaacccgaccaccuuccaccuggacggggaggugaucaccuucgacaaccucaagacgcugcugucccuccgggaggugcgcaccaucaaggucuucaccaccguggacaacaucaaccugcacacgcagguggucgacaugagcaugaccuacggccagcaguucggccccaccuaccuggacggggccgacgugaccaagaucaagccccacaacucccacgagggcaagacguucuacgugcucccgaacgacgacacccugcgggucgaggccuucgaguacuaccacaccaccgaccccagcuuccuggggcgcuacauguccgcccucaaccacacgaagaaguggaaguacccccaggugaacggccugaccagcaucaagugggccgacaacaacugcuaccuggcgaccgcccuccugacccugcagcagaucgagcucaaguucaaccccccggcccugcaggacgccuacuaccgggcgcgcgccggggaggccgccaacuucugcgcccugauccucgcguacugcaacaagacggugggcgagcugggcgacguccgggagaccauguccuaccuguuccagcacgccaaccucgacagcugcaagcgcgugcugaacgucgugugcaagaccugcgggcagcagcagaccacccugaagggcguggaggccgucauguacauggggacgcucuccuacgagcaguucaagaagggcgugcagauccccugcaccugcgggaagcaggccaccaaguaccuggugcagcaggagagccccuucgucaugauguccgcccccccggcgcaguacgagcugaagcacggcaccuucacgugcgccagcgaguacaccggcaacuaccagugcgggcacuacaagcacaucaccuccaaggagacccucuacugcaucgacggcgcccugcugacgaagagcagcgaguacaaggggcccaucaccgacguguucuacaaggagaacuccuacaccaccacgaucaagcccgugaccuacaagcucgacggcgucgugugcaccgagaucgaccccaagcuggacaacuacuacaagaaggacaacagcuacuucaccgagcagccgaucgaccuggugcccaaccagcccuaccccaacgccuccuucgacaacuucaaguucgucugcgacaacaucaaguucgccgacgaccucaaccagcugacgggguacaagaagccggcgagccgggagcugaaggugaccuucuuccccgaccucaacggcgacguggucgccaucgacuacaagcacuacacccccuccuucaagaagggcgccaagcugcugcacaagcccaucguguggcacgugaacaacgccaccaacaaggcgacguacaagccgaacaccuggugcauccgcugccucuggagcaccaagcccgucgagaccuccaacagcuucgacgugcugaaguccgaggacgcccaggggauggacaaccuggccugcgaggaccucaagcccgugagcgaggaggucguggagaaccccacgauccagaaggacgugcuggagugcaacgucaagaccaccgagguggugggcgacaucauccugaagccggccaacaacucccucaagaucaccgaggaggucgggcacacggaccugauggccgcguacguggacaacagcucccugaccaucaagaagcccaacgagcucagccgggugcugggccugaagacccucgccacccacgggcuggccgccgucaacuccgugcccugggacacgaucgccaacuacgcgaagccguuccugaacaagguggucagcaccaccaccaacaucgugacgcgcugccucaaccgcgugugcaccaacuacaugcccuacuucuucacccugcugcuccagcugugcaccuucacccgguccacgaacagccgcaucaaggccuccaugcccaccaccaucgccaagaacaccgucaagagcgugggcaaguucugccuggaggccagcuucaacuaccucaagucccccaacuucagcaagcugaucaacaucaucaucugguuccugcuccuguccgugugccugggcagccucaucuacuccacggccgcgcuggggguccugaugagcaaccucggcaugccguccuacugcaccggguaccgggagggcuaccugaacagcaucaacgugaccaucgccaccuacugcacgggcuccauccccugcagcgugugccuguccgggcucgacagccuggacaccuaccccucccuggagaccauccagaucaccaucagcuccuucaagugggaccucacggccuucggccuggucgccgagugguuccuggccuacauccucuucacccgcuucuucuacgugcuggggcuggcggccaucaugcagcucuucuucagcuacuucgccgugcacuucaucuccaacagcuggcugauguggcugaucaucaaccugguccagauggcccccaucuccgcgauggugcggauguacaucuucuucgccagcuucuacuacguguggaagagcuacguccacgugguggacggcugcaacuccagcaccugcaugaugugcuacaagcgcaaccgggccacccgcgucgagugcacgaccaucgugaacgggguccggcgcuccuucuacguguacgccaacggcggcaagggguucugcaagcuccacaacuggaacugcgugaacugcgacaccuucugcgccggcagcaccuucaucuccgacgaggucgcgcgggaccugagccugcaguucaagcgcccgaucaaccccacggaccaguccagcuacaucguggacuccgugaccgucaagaacgggagcauccaccucuacuucgacaaggccggccagaagaccuacgagcggcacucccugagccacuucgugaaccuggacaaccuccgcgccaacaacaccaaggggucccugcccaucaacgugaucgucuucgacggcaagagcaagugcgaggaguccagcgccaaguccgccagcguguacuacucccagcugaugugccagcccauccuccugcuggaccaggcgcucgugagcgacgucggcgacagcgccgagguggccgugaagauguucgacgccuacgucaacacguucuccagcaccuucaacgugccgauggagaagcugaagacccugguggccaccgcggaggccgagcucgccaagaacgucucccuggacaacgugcugagcacguucaucuccgccgcgcggcagggguucguggacagcgacgucgagaccaaggacgugguggagugccucaagcugucccaccagagcgacaucgaggucaccggcgacuccugcaacaacuacaugcugaccuacaacaagguggagaacaugacgccccgcgaccucggggccugcaucgacugcagcgcccggcacaucaacgcccagguggccaagucccacaacaucgcgcugaucuggaacgucaaggacuucaugagccuguccgagcagcuccgcaagcagauccggagcgccgccaagaagaacaaccugcccuucaagcugaccugcgccaccacccgccagguggugaacgucgugacgaccaagaucgcccucaagggcggguga

SEQ ID NO: 17660 - RNA, 5841 nt, Artificial Sequence
  SARS-CoV-2__MT890230.1__non-structural protein 3 (NSP3) CDS gc
auggcccccaccaaggugaccuucggcgacgacacggucaucgaggugcagggguacaagagcgugaacaucaccuucgagcuggacgagcgcaucgacaagguccucaacgagaagugcuccgccuacaccguggagcugggcaccgaggugaacgaguucgcgugcgucguggccgacgccgugaucaagacgcugcagccggucagcgagcuccugaccccccuggggaucgaccucgacgagugguccauggccaccuacuaccuguucgacgagagcggcgaguucaagcuggccucccacauguacugcagcuucuacccccccgacgaggacgaggaggagggggacugcgaggaggaggaguucgagccguccacccaguacgaguacggcacggaggacgacuaccagggcaagccccucgaguucggggcgaccagcgccgcccugcagcccgaggaggagcaggaggaggacuggcuggacgacgacucccagcagaccgugggccagcaggacgggagcgaggacaaccagaccacgaccauccagaccaucguggagguccagccccagcucgagauggagcugaccccgguggugcagacgaucgaggucaacuccuucagcggcuaccugaagcucaccgacaacguguacaucaagaacgccgacaucguggaggaggcgaagaaggucaagcccaccgugguggucaacgccgccaacguguaccugaagcacgggggcggcguggccggggcccugaacaaggcgaccaacaacgccaugcaggucgaguccgacgacuacaucgccacgaacggcccccucaagguggggggcagcugcguccuguccggccacaaccuggccaagcacugccuccacgugguggggcccaacgucaacaagggcgaggacauccagcugcugaagagcgccuacgagaacuucaaccagcacgaggugcuccuggcgccgcugcucuccgccgggaucuucggcgccgaccccauccacagccugcgggugugcgucgacaccgugcgcaccaacguguaccuggccgucuucgacaagaaccucuacgacaagcugguguccagcuuccuggagaugaagagcgagaagcagguggagcagaagaucgccgagauccccaaggaggaggucaagcccuucaucaccgaguccaagccgagcguggagcagcggaagcaggacgacaagaagaucaaggcgugcguggaggaggucacgaccacccucgaggagaccaaguuccugacggagaaccugcuccuguacaucgacaucaacgggaaccugcaccccgacuccgccacccucgugagcgacaucgacaucaccuuccugaagaaggacgcccccuacaucgugggcgacgucgugcaggagggcgugcugaccgccgucgugauccccacgaagaaggccgggggcaccaccgagaugcucgcgaaggcccugcgcaaggugccgaccgacaacuacaucacgaccuaccccgggcagggccugaacggguacaccgucgaggaggccaagaccgugcucaagaagugcaaguccgccuucuacauccugcccagcaucaucuccaacgagaagcaggagauccugggcaccgugagcuggaaccuccgggagaugcuggcgcacgccgaggagacgcgcaagcugaugcccgucugcguggagaccaaggccaucguguccaccauccagcggaaguacaagggcaucaagauccaggagggggucguggacuacggcgcccgcuucuacuucuacaccagcaagacgaccguggccucccugaucaacacccucaacgaccugaacgagacccuggucacgaugccgcucggguacgugacccacggccugaaccuggaggaggcggcccgguacaugcgcagccucaaggugcccgccaccgucuccgugagcucccccgacgccgugaccgccuacaacggguaccugacgagcuccagcaagacccccgaggagcacuucaucgagaccaucucccuggcgggcagcuacaaggacuggagcuacuccggccagagcacccagcucgggaucgaguuccugaagcggggcgacaaguccgucuacuacacgagcaacccgaccaccuuccaccuggacggggaggugaucaccuucgacaaccucaagacgcugcugucccuccgcgaggugcggaccaucaaggucuucaccaccguggacaacaucaaccugcacacgcagguggucgacaugagcaugaccuacggccagcaguucggccccaccuaccuggacggggccgacgugaccaagaucaagccccacaacucccacgagggcaagacguucuacgugcucccgaacgacgacacccugcgcgucgaggccuucgaguacuaccacaccaccgaccccagcuuccuggggcgguacauguccgcccucaaccacacgaagaaguggaaguacccccaggugaacggccugaccagcaucaagugggccgacaacaacugcuaccuggcgaccgcccuccugacccugcagcagaucgagcucaaguucaaccccccggcccugcaggacgccuacuaccgcgcgcgggccggggaggccgccaacuucugcgcccugauccucgcguacugcaacaagacggugggcgagcugggcgacguccgcgagaccauguccuaccuguuccagcacgccaaccucgacagcugcaagcgggugcugaacgucgugugcaagaccugcgggcagcagcagaccacccugaagggcguggaggccgucauguacauggggacgcucuccuacgagcaguucaagaagggcgugcagauccccugcaccugcgggaagcaggccaccaaguaccuggugcagcaggagagcuccuucgucaugaugagcgccccccccgcgcaguacgagcugaagcacggcaccuucacgugcgccuccgaguacaccggcaacuaccagugcgggcacuacaagcacaucaccagcaaggagacccucuacugcaucgacggcgcccugcugacgaagagcuccgaguacaaggggccgaucaccgacguguucuacaaggagaacagcuacaccaccacgaucaagcccgugaccuacaagcucgacggcgucgugugcaccgagaucgaccccaagcuggacaacuacuacaagaaggacaacuccuacuucaccgagcagcccaucgaccuggugccgaaccagcccuaccccaacgccagcuucgacaacuucaaguucgucugcgacaacaucaaguucgccgacgaccucaaccagcugacgggguacaagaagcccgcgucccgcgagcugaaggugaccuucuucccggaccucaacggcgacguggucgccaucgacuacaagcacuacacccccagcuucaagaagggcgccaagcugcugcacaagcccaucguguggcacgugaacaacgccaccaacaaggcgacguacaagcccaacaccuggugcauccggugccucugguccaccaagccggucgagaccagcaacuccuucgacgugcugaagagcgaggacgcccaggggauggacaaccuggccugcgaggaccucaagcccguguccgaggaggucguggagaaccccacgauccagaaggacgugcuggagugcaacgucaagaccaccgagguggugggcgacaucauccugaagcccgccaacaacagccucaagaucaccgaggaggucgggcacacggaccugauggccgcguacguggacaacuccagccugaccaucaagaagccgaacgagcucucccgcgugcugggccugaagacccucgccacccacgggcuggccgccgucaacagcgugcccugggacacgaucgccaacuacgcgaagcccuuccugaacaagguggucuccaccaccaccaacaucgugacgcgcugccucaaccgggugugcaccaacuacaugccguacuucuucacccugcugcuccagcugugcaccuucacccgcagcacgaacucccggaucaaggccagcaugcccaccaccaucgccaagaacaccgucaagagcgugggcaaguucugccuggaggccuccuucaacuaccucaagagccccaacuucuccaagcugaucaacaucaucaucugguuccugcuccugagcgugugccugggcucccucaucuacagcacggccgcgcuggggguccugauguccaaccucggcaugcccagcuacugcaccggguaccgcgagggcuaccugaacuccaccaacgugaccaucgccacguacugcaccggcagcaucccgugcuccgugugccugagcgggcucgacucccuggacaccuaccccagccuggagaccauccagaucacgaucuccagcuucaagugggaccucaccgccuucggccuggucgccgagugguuccuggccuacauccucuucacccgguucuucuacgugcuggggcuggcggccaucaugcagcucuucuucuccuacuucgccgugcacuucaucagcaacuccuggcugauguggcugaucaucaaccugguccagauggcccccaucagcgcgauggugcgcauguacaucuucuucgccagcuucuacuacguguggaaguccuacguccacgugguggacggcugcaacagcuccaccugcaugaugugcuacaagcggaaccgcgccacgcgggucgagugcaccaccaucgugaacgggguccgccggagcuucuacguguacgccaacggcggcaagggguucugcaagcuccacaacuggaacugcgugaacugcgacaccuucugcgccggcuccacguucaucagcgacgaggucgcgcgcgaccugucccugcaguucaagcggcccaucaacccgaccgaccagagcuccuacaucguggacagcgugaccgucaagaacggguccauccaccucuacuucgacaaggccggccagaagaccuacgagcgccacagccugucccacuucgugaaccuggacaaccuccgggccaacaacacgaaggggagccugcccaucaacgugaucgucuucgacggcaaguccaagugcgaggagagcuccgccaagagcgccuccguguacuacagccagcugaugugccagcccauccuccugcuggaccaggcgcucgugagcgacgucggcgacuccgccgagguggccgugaagauguucgacgccuacgucaacaccuucagcuccaccuucaacgugcccauggagaagcugaagacccugguggccacggcggaggccgagcucgccaagaacgucagccuggacaacgugcuguccaccuucaucagcgccgcgcgccagggguucguggacuccgacgucgagaccaaggacgugguggagugccucaagcugagccaccaguccgacaucgaggucaccggcgacagcugcaacaacuacaugcugacguacaacaagguggagaacaugaccccgcgggaccucggggccugcaucgacugcuccgcccgccacaucaacgcccagguggccaagagccacaacaucgcgcugaucuggaacgucaaggacuucaugucccugagcgagcagcuccggaagcagauccgcuccgccgccaagaagaacaaccugcccuucaagcugaccugcgccaccacgcgccagguggugaacgucgugaccaccaagaucgcccucaagggcggguga

SEQ ID NO: 17661 - RNA, 5841 nt, Artificial Sequence
  SARS-CoV-2__MT890285.1__non-structural protein 3 (NSP3) CDS gc
auggcccccaccaaggugaccuucggcgacgacacggucaucgaggugcagggguacaagagcgugaacaucaccuucgagcuggacgagcgcaucgacaagguccucaacgagaagugcuccgccuacaccguggagcugggcaccgaggugaacgaguucgcgugcgucguggccgacgccgugaucaagacgcugcagccggucagcgagcuccugaccccccuggggaucgaccucgacgagugguccauggccaccuacuaccuguucgacgagagcggcgaguucaagcuggccucccacauguacugcagcuucuacccccccgacgaggacgaggaggagggggacugcgaggaggaggaguucgagccguccacccaguacgaguacggcacggaggacgacuaccagggcaagccccucgaguucggggcgaccagcgccgcccugcagcccgaggaggagcaggaggaggacuggcuggacgacgacucccagcagaccgugggccagcaggacgggagcgaggacaaccagaccacgaccauccagaccaucguggagguccagccccagcucgagauggagcugaccccgguggugcagacgaucgaggucaacuccuucagcggcuaccugaagcucaccgacaacguguacaucaagaacgccgacaucguggaggaggcgaagaaggucaagcccaccgugguggucaacgccgccaacguguaccugaagcacgggggcggcguggccggggcccugaacaaggcgaccaacaacgccaugcaggucgaguccgacgacuacaucgccacgaacggcccccucaagguggggggcagcugcguccuguccggccacaaccuggccaagcacugccuccacgugguggggcccaacgucaacaagggcgaggacauccagcugcugaagagcgccuacgagaacuucaaccagcacgaggugcuccuggcgccgcugcucuccgccgggaucuucggcgccgaccccauccacagccugcgggugugcgucgacaccgugcgcaccaacguguaccuggccgucuucgacaagaaccucuacgacaagcugguguccagcuuccuggagaugaagagcgagaagcagguggagcagaagaucgccgagauccccaaggaggaggucaagcccuucaucaccgaguccaagccgagcguggagcagcggaagcaggacgacaagaagaucaaggcgugcguggaggaggucacgaccacccucgaggagaccaaguuccugacggagaaccugcuccuguacaucgacaucaacgggaaccugcaccccgacuccgccacccucgugagcgacaucgacaucaccuuccugaagaaggacgcccccuacaucgugggcgacgucgugcaggagggcgugcugaccgccgucgugauccccacgaagaaggccgggggcaccaccgagaugcucgcgaaggcccugcgcaaggugccgaccgacaacuacaucacgaccuaccccgggcagggccugaacggguacaccgucgaggaggccaagaccgugcucaagaagugcaaguccgccuucuacauccugcccagcaucaucuccaacgagaagcaggagauccugggcaccgugagcuggaaccuccgggagaugcuggcgcacgccgaggagacgcgcaagcugaugcccgucugcguggagaccaaggccaucguguccaccauccagcggaaguacaagggcaucaagauccaggagggggucguggacuacggcgcccgcuucuacuucuacaccagcaagacgaccguggccucccugaucaacacccucaacgaccugaacgagacccuggucacgaugccgcucggguacgugacccacggccugaaccuggaggaggcggcccgguacaugcgcagccucaaggugcccgccaccgucuccgugagcucccccgacgccgugaccgccuacaacggguaccugacgagcuccagcaagacccccgaggagcacuucaucgagaccaucucccuggcgggcagcuacaaggacuggagcuacuccggccagagcacccagcucgggaucgaguuccugaagcggggcgacaaguccgucuacuacacgagcaacccgaccaccuuccaccuggacggggaggugaucaccuucgacaaccucaagacgcugcugucccuccgcgaggugcggaccaucaaggucuucaccaccguggacaacaucaaccugcacacgcagguggucgacaugagcaugaccuacggccagcaguucggccccaccuaccuggacggggccgacgugaccaagaucaagccccacaacucccacgagggcaagacguucuacgugcucccgaacgacgacacccugcgcgucgaggccuucgaguacuaccacaccaccgaccccagcuuccuggggcgguacauguccgcccucaaccacacgaagaaguggaaguacccccaggugaacggccugaccagcaucaagugggccgacaacaacugcuaccuggcgaccgcccuccugacccugcagcagaucgagcucaaguucaaccccccggcccugcaggacgccuacuaccgcgcgcgggccggggaggccgccaacuucugcgcccugauccucgcguacugcaacaagacggugggcgagcugggcgacguccgcgagaccauguccuaccuguuccagcacgccaaccucgacagcugcaagcgggugcugaacgucgugugcaagaccugcgggcagcagcagaccacccugaagggcguggaggccgucauguacauggggacgcucuccuacgagcaguucaagaagggcgugcagauccccugcaccugcgggaagcaggccaccaaguaccuggugcagcaggagagccccuucgucaugauguccgcccccccggcgcaguacgagcugaagcacggcaccuucacgugcgccagcgaguacaccggcaacuaccagugcgggcacuacaagcacaucaccuccaaggagacccucuacugcaucgacggcgcccugcugacgaagagcagcgaguacaaggggcccaucaccgacguguucuacaaggagaacuccuacaccaccacgaucaagcccgugaccuacaagcucgacggcgucgugugcaccgagaucgaccccaagcuggacaacuacuacaagaaggacaacagcuacuucaccgagcagccgaucgaccuggugcccaaccagcccuaccccaacgccuccuucgacaacuucaaguucgucugcgacaacaucaaguucgccgacgaccucaaccagcugacgggguacaagaagccggcgagccgcgagcugaaggugaccuucuuccccgaccucaacggcgacguggucgccaucgacuacaagcacuacacccccuccuucaagaagggcgccaagcugcugcacaagcccaucguguggcacgugaacaacgccaccaacaaggcgacguacaagccgaacaccuggugcauccggugccucuggagcaccaagcccgucgagaccuccaacagcuucgacgugcugaaguccgaggacgcccaggggauggacaaccuggccugcgaggaccucaagcccgugagcgaggaggucguggagaaccccacgauccagaaggacgugcuggagugcaacgucaagaccaccgagguggugggcgacaucauccugaagccggccaacaacucccucaagaucaccgaggaggucgggcacacggaccugauggccgcguacguggacaacagcucccugaccaucaagaagcccaacgagcucagccgcgugcugggccugaagacccucgccacccacgggcuggccgccgucacguccgugcccugggacaccaucgccaacuacgcgaagccguuccugaacaagguggucagcaccaccacgaacaucgugacccgcugccucaaccgggugugcaccaacuacaugcccuacuucuucacccugcugcuccagcugugcaccuucacgcgcuccaccaacagccggaucaaggccuccaugcccaccaccaucgccaagaacacggucaagagcgugggcaaguucugccuggaggccagcuucaacuaccucaagucccccaacuucagcaagcugaucaacaucaucaucugguuccugcuccuguccgugugccugggcagccucaucuacuccaccgccgcgcuggggguccugaugagcaaccucggcaugccguccuacugcaccggguaccgcgagggcuaccugaacagcaccaacgugacgaucgccaccuacugcaccggcuccauccccugcagcgugugccuguccgggcucgacagccuggacaccuaccccucccuggagacgauccagaucaccaucagcuccuucaagugggaccucaccgccuucggccuggucgccgagugguuccuggccuacauccucuucacccgguucuucuacgugcuggggcuggcggccaucaugcagcucuucuucagcuacuucgccgugcacuucaucuccaacagcuggcugauguggcugaucaucaaccugguccagauggcccccaucuccgcgauggugcgcauguacaucuucuucgccagcuucuacuacguguggaagagcuacguccacgugguggacggcugcaacuccagcacgugcaugaugugcuacaagcggaaccgcgccacccgggucgagugcaccaccaucgugaacgggguccgccgguccuucuacguguacgccaacggcggcaagggguucugcaagcuccacaacuggaacugcgugaacugcgacacguucugcgccggcagcaccuucaucuccgacgaggucgcgcgcgaccugagccugcaguucaagcggccgaucaaccccaccgaccaguccagcuacaucguggacuccgugaccgucaagaacgggagcauccaccucuacuucgacaaggccggccagaagacguacgagcgccacucccugagccacuucgugaaccuggacaaccuccgggccaacaacaccaaggggucccugcccaucaacgugaucgucuucgacggcaagagcaagugcgaggaguccagcgccaaguccgccagcguguacuacucccagcugaugugccagcccauccuccugcuggaccaggcgcucgugagcgacgucggcgacagcgccgagguggccgugaagauguucgacgccuacgucaacaccuucuccagcaccuucaacgugccgauggagaagcugaagacgcugguggccaccgcggaggccgagcucgccaagaacgucucccuggacaacgugcugagcaccuucaucuccgccgcgcgccagggguucguggacagcgacgucgagaccaaggacgugguggagugccucaagcugucccaccagagcgacaucgaggucacgggcgacuccugcaacaacuacaugcugaccuacaacaagguggagaacaugaccccccgggaccucggggccugcaucgacugcagcgcccgccacaucaacgcccagguggccaagucccacaacaucgcgcugaucuggaacgucaaggacuucaugagccuguccgagcagcuccggaagcagauccgcagcgccgccaagaagaacaaccugcccuucaagcugaccugcgccacgacccgccagguggugaacgucgugaccaccaagaucgcccucaagggcggguga

SEQ ID NO: 17662 - RNA, 5841 nt, Artificial Sequence
  SARS-CoV-2__MT890295.1__non-structural protein 3 (NSP3) CDS gc
auggcccccaccaaggugaccuucggcgacgacacggucaucgaggugcagggguacaagagcgugaacaucaccuucgagcuggacgagcgcaucgacaagguccucaacgagaagugcuccgccuacaccguggagcugggcaccgaggugaacgaguucgcgugcgucguggccgacgccgugaucaagacgcugcagccggucagcgagcuccugaccccccuggggaucgaccucgacgagugguccauggccaccuacuaccuguucgacgagagcggcgaguucaagcuggccucccacauguacugcagcuucuacccccccgacgaggacgaggaggagggggacugcgaggaggaggaguucgagccguccacccaguacgaguacggcacggaggacgacuaccagggcaagccccucgaguucggggcgaccagcgccgcccugcagcccgaggaggagcaggaggaggacuggcuggacgacgacucccagcagaccgugggccagcaggacgggagcgaggacaaccacaccacgaccauccagaccaucguggagguccagccccagcucgagauggagcugaccccgguggugcagacgaucgaggucaacuccuucagcggcuaccugaagcucaccgacaacguguacaucaagaacgccgacaucguggaggaggcgaagaaggucaagcccaccgugguggucaacgccgccaacguguaccugaagcacgggggcggcguggccggggcccugaacaaggcgaccaacaacgccaugcaggucgaguccgacgacuacaucgccacgaacggcccccucaagguggggggcagcugcguccuguccggccacaaccuggccaagcacugccuccacgugguggggcccaacgucaacaagggcgaggacauccagcugcugaagagcgccuacgagaacuucaaccagcacgaggugcuccuggcgccgcugcucuccgccgggaucuucggcgccgaccccauccacagccugcgggugugcgucgacaccgugcgcaccaacguguaccuggccgucuucgacaagaaccucuacgacaagcugguguccagcuuccuggagaugaagagcgagaagcagguggagcagaagaucgccgagauccccaaggaggaggucaagcccuucaucaccgaguccaagccgagcguggagcagcggaagcaggacgacaagaagaucaaggcgugcguggaggaggucacgaccacccucgaggagaccaaguuccugacggagaaccugcuccuguacaucgacaucaacgggaaccugcaccccgacuccgccacccucgugagcgacaucgacaucaccuuccugaagaaggacgcccccuacaucgugggcgacgucgugcaggagggcgugcugaccgccgucgugauccccacgaagaaggccgggggcaccaccgagaugcucgcgaaggcccugcgcaaggugccgaccgacaacuacaucacgaccuaccccgggcagggccugaacggguacaccgucgaggaggccaagaccgugcucaagaagugcaaguccgccuucuacauccugcccagcaucaucuccaacgagaagcaggagauccugggcaccgugagcuggaaccuccgggagaugcuggcgcacgccgaggagacgcgcaagcugaugcccgucugcguggagaccaaggccaucguguccaccauccagcggaaguacaagggcaucaagauccaggagggggucguggacuacggcgcccgcuucuacuucuacaccagcaagacgaccguggccucccugaucaacacccucaacgaccugaacgagacccuggucacgaugccgcucggguacgugacccacggccugaaccuggaggaggcggcccgguacaugcgcagccucaaggugcccgccaccgucuccgugagcucccccgacgccgugaccgccuacaacggguaccugacgagcuccagcaagacccccgaggagcacuucaucgagaccaucucccuggcgggcagcuacaaggacuggagcuacuccggccagagcacccagcucgggaucgaguuccugaagcggggcgacaaguccgucuacuacacgagcaacccgaccaccuuccaccuggacggggaggugaucaccuucgacaaccucaagacgcugcugucccuccgcgaggugcggaccaucaaggucuucaccaccguggacaacaucaaccugcacacgcagguggucgacaugagcaugaccuacggccagcaguucggccccaccuaccuggacggggccgacgugaccaagaucaagccccacaacucccacgagggcaagacguucuacgugcucccgaacgacgacacccugcgcgucgaggccuucgaguacuaccacaccaccgaccccagcuuccuggggcgguacauguccgcccucaaccacacgaagaaguggaaguacccccaggugaacggccugaccagcaucaagugggccgacaacaacugcuaccuggcgaccgcccuccugacccugcagcagaucgagcucaaguucaaccccccggcccugcaggacgccuacuaccgcgcgcgggccggggaggccgccaacuucugcgcccugauccucgcguacugcaacaagacggugggcgagcugggcgacguccgcgagaccauguccuaccuguuccagcacgccaaccucgacagcugcaagcgggugcugaacgucgugugcaagaccugcgggcagcagcagaccacccugaagggcguggaggccgucauguacauggggacgcucuccuacgagcaguucaagaagggcgugcagauccccugcaccugcgggaagcaggccaccaaguaccuggugcagcaggagagccccuucgucaugauguccgcccccccggcgcaguacgagcugaagcacggcaccuucacgugcgccagcgaguacaccggcaacuaccagugcgggcacuacaagcacaucaccuccaaggagacccucuacugcaucgacggcgcccugcugacgaagagcagcgaguacaaggggcccaucaccgacguguucuacaaggagaacuccuacaccaccacgaucaagcccgugaccuacaagcucgacggcgucgugugcaccgagaucgaccccaagcuggacaacuacuacaagaaggacaacagcuacuucaccgagcagccgaucgaccuggugcccaaccagcccuaccccaacgccuccuucgacaacuucaaguucgucugcgacaacaucaaguucgccgacgaccucaaccagcugacgggguacaagaagccggcgagccgcgagcugaaggugaccuucuuccccgaccucaacggcgacguggucgccaucgacuacaagcacuacacccccuccuucaagaagggcgccaagcugcugcacaagcccaucguguggcacgugaacaacgccaccaacaaggcgacguacaagccgaacaccuggugcauccggugccucuggagcaccaagcccgucgagaccuccaacagcuucgacgugcugaaguccgaggacgcccaggggauggacaaccuggccugcgaggaccucaagcccgugagcgaggaggucguggagaaccccacgauccagaaggacgugcuggagugcaacgucaagaccaccgagguggugggcgacaucauccugaagccggccaacaacucccucaagaucaccgaggaggucgggcacacggaccugauggccgcguacguggacaacagcucccugaccaucaagaagcccaacgagcucagccgcgugcugggccugaagacccucgccacccacgggcuggccgccgucaacuccgugcccugggacacgaucgccaacuacgcgaagccguuccugaacaagguggucagcaccaccaccaacaucgugacgcgcugccucaaccgggugugcaccaacuacaugcccuacuucuucacccugcugcuccagcugugcaccuucacccgcuccacgaacagccggaucaaggccuccaugcccaccaccaucgccaagaacaccgucaagagcgugggcaaguucugccuggaggccagcuucaacuaccucaagucccccaacuucagcaagcugaucaacaucaucaucugguuccugcuccuguccgugugccugggcagccucaucuacuccacggccgcgcuggggguccugaugagcaaccucggcaugccguccuacugcaccggguaccgcgagggcuaccugaacagcaccaacgugaccaucgccacguacugcaccggcuccauccccugcagcgugugccuguccgggcucgacagccuggacaccuaccccucccuggagaccauccagaucacgaucagcuccuucaagugggaccucaccgccuucggccuggucgccgagugguuccuggccuacauccucuucacccgguucuucuacgugcuggggcuggcggccaucaugcagcucuucuucagcuacuucgccgugcacuucaucuccaacagcuggcugauguggcugaucaucaaccugguccagauggcccccaucuccgcgauggugcgcauguacaucuucuucgccagcuucuacuacguguggaagagcuacguccacgugguggacggcugcaacuccagcaccugcaugaugugcuacaagcggaaccgcgccacgcgggucgagugcaccaccaucgugaacgggguccgccgguccuucuacguguacgccaacggcggcaagggguucugcaagcuccacaacuggaacugcgugaacugcgacaccuucugcgccggcagcacguucaucuccgacgaggucgcgcgcgaccugagccugcaguucaagcggccgaucaaccccaccgaccaguccagcuacaucguggacuccgugaccgucaagaacgggagcauccaccucuacuucgacaaggccggccagaagaccuacgagcgccacucccugagccacuucgugaaccuggacaaccuccgggccaacaacacgaaggggucccugcccaucaacgugaucgucuucgacggcaagagcaagugcgaggaguccagcgccaaguccgccagcguguacuacucccagcugaugugccagcccauccuccugcuggaccaggcgcucgugagcgacgucggcgacagcgccgagguggccgugaagauguucgacgccuacgucaacaccuucuccagcaccuucaacgugccgauggagaagcugaagacccugguggccacggcggaggccgagcucgccaagaacgucucccuggacaacgugcugagcaccuucaucuccgccgcgcgccagggguucguggacagcgacgucgagaccaaggacgugguggagugccucaagcugucccaccagagcgacaucgaggucaccggcgacuccugcaacaacuacaugcugacguacaacaagguggagaacaugaccccccgggaccucggggccugcaucgacugcagcgcccgccacaucaacgcccagguggccaagucccacaacaucgcgcugaucuggaacgucaaggacuucaugagccuguccgagcagcuccggaagcagauccgcagcgccgccaagaagaacaaccugcccuucaagcugaccugcgccaccacgcgccagguggugaacgucgugaccaccaagaucgcccucaagggcggguga

SEQ ID NO: 17663 - RNA, 5841 nt, Artificial Sequence
  SARS-CoV-2__MT890338.1__non-structural protein 3 (NSP3) CDS gc
auggcccccaccaaggugaccuucggcgacgacacggucaucgaggugcagggguacaagagcgugaacaucaccuucgagcuggacgagcgcaucgacaagguccucaacgagaagugcuccgccuacaccguggagcugggcaccgaggugaacgaguucgcgugcgucguggccgacgccgugaucaagacgcugcagccggucagcgagcuccugaccccccuggggaucgaccucgacgagugguccauggccaccuacuaccuguucgacgagagcggcgaguucaagcuggccucccacauguacugcagcuucuacccccccgacgaggacgaggaggagggggacugcgaggaggaggaguucgagccguccacccaguacgaguacggcacggaggacgacuaccagggcaagccccucgaguucggggcgaccagcgccgcccugcagcccgaggaggagcaggaggaggacuggcuggacgacgacucccagcagaccgugggccagcaggacgggagcgaggacaaccagaccacgaccauccagaccaucguggagguccagccccagcucgagauggagcugaccccgguggugcagacgaucgaggucaacuccuucagcggcuaccugaagcucaccgacaacguguacaucaagaacgccgacaucguggaggaggcgaagaaggucaagcccaccgugguggucaacgccgccaacguguaccugaagcacgggggcggcguggccggggcccugaacaaggcgaccaacaacgccaugcaggucgaguccgacgacuacaucgccacgaacggcccccucaagguggggggcagcugcguccuguccggccacaaccuggccaagcacugccuccacgugguggggcccaacgucaacaagggcgaggacauccagcugcugaagagcgccuacgagaacuucaaccagcacgaggugcuccuggcgccgcugcucuccgccgggaucuucggcgccgaccccauccacagccugcgggugugcgucgacaccgugcgcaccaacguguaccuggccgucuucgacaagaaccucuacgacaagcugguguccagcuuccuggagaugaagagcgagaagcagguggagcagaagaucgccgagauccccaaggaggaggucaagcccuucaucaccgaguccaagccgagcguggagcagcggaagcaggacgacaagaagaucaaggcgugcguggaggaggucacgaccacccucgaggagaccaaguuccugacggagaaccugcuccuguacaucgacaucaacgggaaccugcaccccgacuccgccacccucgugagcgacaucgacaucaccuuccugaagaaggacgcccccuacaucgugggcgacgucgugcaggagggcgugcugaccgccgucgugauccccacgaagaaggccgggggcaccaccgagaugcucgcgaaggcccugcgcaaggugccgaccgacaacuacaucacgaccuaccccgggcagggccugaacggguacaccgucgaggaggccaagaccgugcucaagaagugcaaguccgccuucuacauccugcccagcaucaucuccaacgagaagcaggagauccugggcaccgugagcuggaaccuccgggagaugcuggcgcacgccgaggagacgcgcaagcugaugcccgucugcguggagaccaaggccaucguguccaccauccagcggaaguacaagggcaucaagauccaggagggggucguggacuacggcgcccgcuucuacuucuacaccagcaagacgaccguggccucccugaucaacacccucaacgaccugaacgagacccuggucacgaugccgcucggguacgugacccacggccugaaccuggaggaggcggcccgguacaugcgcagccucaaggugcccgccaccgucuccgugagcucccccgacgccgugaccgccuacaacggguaccugacgagcuccagcaagacccccgaggagcacuucaucgagaccaucucccuggcgggcagcuacaaggacuggagcuacuccggccagagcacccagcucgggaucgaguuccugaagcggggcgacaaguccgucuacuacacgagcaacccgaccaccuuccaccuggacggggaggugaucaccuucgacaaccucaagacgcugcugucccuccgcgaggugcggaccaucaaggucuucaccaccguggacaacaucaaccugcacacgcagguggucgacaugagcaugaccuacggccagcaguucggccccaccuaccuggacggggccgacgugaccaagaucaagccccacaacucccacgagggcaagacguucuacgugcucccgaacgacgacacccugcgcgucgaggccuucgaguacuaccacaccaccgaccccagcuuccuggggcgguacauguccgcccucaaccacacgaagaaguggaaguacccccaggugaacggccugaccagcaucaagugggccgacaacaacugcuaccuggcgaccgcccuccugacccugcagcagaucgagcucaaguucaaccccccggcccugcaggacgccuacuaccgcgcgcgggccggggaggccgccaacuucugcgcccugauccucgcguacugcaacaagacggugggcgagcugggcgacguccgcgagaccauguccuaccuguuccagcacgccaaccucgacagcugcaagcgggugcugaacgucgugugcaagaccugcgggcagcagcagaccacccugaagggcguggaggccgucauguacauggggacgcucuccuacgagcaguucaagaagggcgugcagauccccugcaccugcgggaagcaggccaccaaguaccuggugcagcaggagagccccuucgucaugauguccgcccccccggcgcaguacgagcugaagcacggcaccuucacgugcgccagcgaguacaccggcaacuaccagugcgggcacuacaagcacaucaccuccaaggagacccucuacugcaucgacggcgcccugcugacgaagagcagcgaguacaaggggcccaucaccgacguguucuacaaggagaacuccuacaccaccacgaucaagcccgugaccuacaagcucgacggcgucgugugcaccgagaucgaccccaagcuggacaacuacuacaagaaggacaacagcuacuucaccgagcagccgaucgaccuggugcccaaccagcccuaccccaacgccggguucgacaacuucaaguucgucugcgacaacaucaaguucgccgacgaccucaaccagcugacgggcuacaagaagccggcgucccgcgagcugaaggugaccuucuuccccgaccucaacggcgacguggucgccaucgacuacaagcacuacacccccagcuucaagaagggggccaagcugcugcacaagcccaucguguggcacgugaacaacgccaccaacaaggcgacguacaagccgaacaccuggugcauccggugccucugguccaccaagcccgucgagaccagcaacuccuucgacgugcugaagagcgaggacgcccagggcauggacaaccuggccugcgaggaccucaagcccguguccgaggaggucguggagaaccccacgacccagaaggacgugcuggagugcaacgucaagaccaccgagguggugggggacaucauccugaagccggccaacaacagccucaagaucacggaggaggucggccacaccgaccugauggccgcguacguggacaacuccagccugaccaucaagaagcccaacgagcucucccgcgugcuggggcugaagacccucgccacgcacggccuggccgccgucaacagcgugcccugggacaccaucgccaacuacgcgaagccguuccugaacaagguggucuccaccaccacgaacaucgugacccgcugccucaaccgggugugcaccaacuacaugcccuacuucuucacccugcugcuccagcugugcaccuucacgcgcagcaccaacucccggaucaaggccagcaugcccaccaccaucgccaagaacacggucaaguccgugggcaaguucugccuggaggccagcuucaacuaccucaagagccccaacuucuccaagcugaucaacaucaucaucugguuccugcuccugagcgugugccuggggucccucaucuacagcaccgccgcgcugggcguccugauguccaaccucgggaugccgagcuacugcaccggcuaccgcgagggcuaccugaacuccaccaacgugacgaucgccaccuacugcaccgggagcauccccugcuccgugugccugagcggccucgacucccuggacaccuaccccagccuggagacgauccagaucaccaucuccagcuucaagugggaccucaccgccuucgggcuggucgccgagugguuccuggccuacauccucuucacccgguucuucuacgugcugggccuggcggccaucaugcagcucuucuucuccuacuucgccgugcacuucaucagcaacuccuggcugauguggcugaucaucaaccugguccagauggcccccaucagcgcgauggugcgcauguacaucuucuucgccuccuucuacuacguguggaagagcuacguccacgugguggacgggugcaacagcuccacgugcaugaugugcuacaagcggaaccgcgccacccgggucgagugcaccaccaucgugaacggcguccgccggagcuucuacguguacgccaacggcgggaagggcuucugcaagcuccacaacuggaacugcgugaacugcgacacguucugcgccggguccaccuucaucagcgacgaggucgcgcgcgaccugucccugcaguucaagcggccgaucaaccccaccgaccagagcuccuacaucguggacagcgugaccgucaagaacggcuccauccaccucuacuucgacaaggccgggcagaagacguacgagcgccacagccugucccacuucgugaaccuggacaaccuccgggccaacaacaccaagggcagccugcccaucaacgugaucgucuucgacggcaaguccaagugcgaggagagcuccgccaagagcgccuccguguacuacagccagcugaugugccagcccauccuccugcuggaccaggcgcucguguccgacgucggggacagcgccgagguggccgugaagauguucgacgccuacgucaacaccuucagcuccaccuucaacgugccgauggagaagcugaagacgcugguggccaccgcggaggccgagcucgccaagaacgucagccuggacaacgugcuguccaccuucaucagcgccgcgcgccagggcuucguggacuccgacgucgagaccaaggacgugguggagugccucaagcugagccaccaguccgacaucgaggucacgggggacagcugcaacaacuacaugcugaccuacaacaagguggagaacaugaccccccgggaccucggcgccugcaucgacugcuccgcccgccacaucaacgcccagguggccaagagccacaacaucgcgcugaucuggaacgucaaggacuucaugucccugagcgagcagcuccggaagcagauccgcuccgccgccaagaagaacaaccugcccuucaagcugaccugcgccacgacccgccagguggugaacgucgugaccaccaagaucgcccucaaggggggcuga

SEQ ID NO: 17664 - RNA, 5841 nt, Artificial Sequence
  SARS-CoV-2__MT890340.1__non-structural protein 3 (NSP3) CDS gc
auggcccccaccaaggugaccuucggcgacgacacggucaucgaggugcagggguacaagagcgugaacaucaccuucgagcuggacgagcgcaucgacaagguccucaacgagaagugcuccgccuacaccguggagcugggcaccgaggugaacgaguucgcgugcgucguggccgacgccgugaucaagacgcugcagccggucagcgagcuccugaccccccuggggaucgaccucgacgagugguccauggccaccuacuaccuguucgacgagagcggcgaguucaagcuggccucccacauguacugcagcuucuacccccccgacgaggacgaggaggagggggacugcgaggaggaggaguucgagccguccacccaguacgaguacggcacggaggacgacuaccagggcaagccccucgaguucggggcgaccagcgccgcccugcagcccgaggaggagcaggaggaggacuggcuggacgacgacucccagcagaccgugggccagcaggacgggagcgaggacaaccagaccacgaccauccagaccaucguggagguccagccccagcucgagauggagcugaccccgguggugcagacgaucgaggucaacuccuucagcggcuaccugaagcucaccgacaacguguacaucaagaacgccgacaucguggaggaggcgaagaaggucaagcccaccgugguggucaacgccgccaacguguaccugaagcacgggggcggcguggccggggcccugaacaaggcgaccaacaacgccaugcaggucgaguccgacgacuacaucgccacgaacggcccccucaagguggggggcagcugcguccuguccggccacaaccuggccaagcacugccuccacgugguggggcccaacgucaacaagggcgaggacauccagcugcugaagagcgccuacgagaacuucaaccagcacgaguuccuccuggcgccgcugcucuccgccgggaucuucggcgccgaccccauccacagccugcgggugugcguggacaccguccgcaccaacguguaccuggccguguucgacaagaaccucuacgacaagcuggucuccagcuuccuggagaugaagagcgagaagcagguggagcagaagaucgccgagauccccaaggaggaggugaagcccuucaucaccgaguccaagccgagcgucgagcagcggaagcaggacgacaagaagaucaaggcgugcguggaggaggugacgaccacccucgaggagaccaaguuccugacggagaaccugcuccuguacaucgacaucaacgggaaccugcaccccgacuccgccacccucgucagcgacaucgacaucaccuuccugaagaaggacgcccccuacaucgugggcgacgugguccaggagggcgugcugaccgccguggucauccccacgaagaaggccgggggcaccaccgagaugcucgcgaaggcccugcgcaaggugccgaccgacaacuacaucacgaccuaccccgggcagggccugaacggguacaccguggaggaggccaagaccguccucaagaagugcaaguccgccuucuacauccugcccagcaucaucuccaacgagaagcaggagauccugggcaccgugagcuggaaccuccgggagaugcuggcgcacgccgaggagacgcgcaagcugaugcccgugugcgucgagaccaaggccaucguguccaccauccagcggaaguacaagggcaucaagauccaggaggggguggucgacuacggcgcccgcuucuacuucuacaccagcaagacgaccguggccucccugaucaacacccucaacgaccugaacgagacccuggugacgaugccgcucggguacgucacccacggccugaaccuggaggaggcggcccgguacaugcgcagccucaaggugcccgccaccguguccgucagcucccccgacgccgugaccgccuacaacggguaccugacgagcuccagcaagacccccgaggagcacuucaucgagaccaucucccuggcgggcagcuacaaggacuggagcuacuccggccagagcacccagcucgggaucgaguuccugaagcggggcgacaaguccguguacuacacgagcaacccgaccaccuuccaccuggacggggaggucaucaccuucgacaaccucaagacgcugcugucccuccgcgaggugcggaccaucaagguguucaccaccgucgacaacaucaaccugcacacgcaggugguggacaugagcaugaccuacggccagcaguucggccccaccuaccuggacggggccgacgucaccaagaucaagccccacaacucccacgagggcaagacguucuacgugcucccgaacgacgacacccugcgcguggaggccuucgaguacuaccacaccaccgaccccagcuuccuggggcgguacauguccgcccucaaccacacgaagaaguggaaguacccccaggucaacggccugaccagcaucaagugggccgacaacaacugcuaccuggcgaccgcccuccugacccugcagcagaucgagcucaaguucaaccccccggcccugcaggacgccuacuaccgcgcgcgggccggggaggccgccaacuucugcgcccugauccucgcguacugcaacaagacggugggcgagcugggcgacgugcgcgagaccauguccuaccuguuccagcacgccaaccucgacagcugcaagcggguccugaacguggucugcaagaccugcgggcagcagcagaccacccugaagggcguggaggccgugauguacauggggacgcucuccuacgagcaguucaagaagggcguccagauccccugcaccugcgggaagcaggccaccaaguaccuggugcagcaggagagccccuucgugaugauguccgcccccccggcgcaguacgagcugaagcacggcaccuucacgugcgccagcgaguacaccggcaacuaccagugcgggcacuacaagcacaucaccuccaaggagacccucuacugcaucgacggcgcccugcugacgaagagcagcgaguacaaggggcccaucaccgacgucuucuacaaggagaacuccuacaccaccacgaucaagcccgugaccuacaagcucgacggcguggucugcaccgagaucgaccccaagcuggacaacuacuacaagaaggacaacagcuacuucaccgagcagccgaucgaccuggugcccaaccagcccuaccccaacgccuccuucgacaacuucaaguucgugugcgacaacaucaaguucgccgacgaccucaaccagcugacgggguacaagaagccggcgagccgcgagcugaaggucaccuucuuccccgaccucaacggcgacgugguggccaucgacuacaagcacuacacccccuccuucaagaagggcgccaagcugcugcacaagcccaucgucuggcacgugaacaacgccaccaacaaggcgacguacaagccgaacaccuggugcauccggugccucuggagcaccaagcccguggagaccuccaacagcuucgacguccugaaguccgaggacgcccaggggauggacaaccuggccugcgaggaccucaagcccgugagcgaggagguggucgagaaccccacgauccagaaggacgugcuggagugcaacgugaagaccaccgaggucgugggcgacaucauccugaagccggccaacaacucccucaagaucaccgaggagguggggcacacggaccugauggccgcguacgucgacaacagcucccugaccaucaagaagcccaacgagcucagccgcgugcugggccugaagacccucgccacccacgggcuggccgccgugaacuccguccccugggacacgaucgccaacuacgcgaagccguuccugaacaagguggugagcaccaccaccaacaucgucacgcgcugccucaaccgggugugcaccaacuacaugcccuacuucuucacccugcugcuccagcugugcaccuucacccgcuccacgaacagccggaucaaggccuccaugcccaccaccaucgccaagaacaccgugaagagcgucggcaaguucugccuggaggccagcuucaacuaccucaagucccccaacuucagcaagcugaucaacaucaucaucugguuccugcuccuguccgugugccugggcagccucaucuacuccacggccgcgcugggggugcugaugagcaaccucggcaugccguccuacugcaccggguaccgcgagggcuaccugaacagcaccaacgucaccaucgccacguacugcaccggcuccauccccugcagcgugugccuguccgggcucgacagccuggacaccuaccccucccuggagaccauccagaucacgaucagcuccuucaagugggaccucaccgccuucggccugguggccgagugguuccuggccuacauccucuucacccgguucuucuacguccuggggcuggcggccaucaugcagcucuucuucagcuacuucgccgugcacuucaucuccaacagcuggcugauguggcugaucaucaaccuggugcagauggcccccaucuccgcgaugguccgcauguacaucuucuucgccagcuucuacuacguguggaagagcuacgugcacgucguggacggcugcaacuccagcaccugcaugaugugcuacaagcggaaccgcgccacgcggguggagugcaccaccaucgucaacggggugcgccgguccuucuacgucuacgccaacggcggcaagggguucugcaagcuccacaacuggaacugcgugaacugcgacaccuucugcgccggcagcacguucaucuccgacgagguggcgcgcgaccugagccugcaguucaagcggccgaucaaccccaccgaccaguccagcuacaucgucgacuccgugaccgugaagaacgggagcauccaccucuacuucgacaaggccggccagaagaccuacgagcgccacucccugagccacuucgucaaccuggacaaccuccgggccaacaacacgaaggggucccugcccaucaacgugaucguguucgacggcaagagcaagugcgaggaguccagcgccaaguccgccagcgucuacuacucccagcugaugugccagcccauccuccugcuggaccaggcgcucgugagcgacgugggcgacagcgccgaggucgccgugaagauguucgacgccuacgugaacaccuucuccagcaccuucaacgucccgauggagaagcugaagacccugguggccacggcggaggccgagcucgccaagaacgugucccuggacaacguccugagcaccuucaucuccgccgcgcgccagggguucguggacagcgacguggagaccaaggacgucguggagugccucaagcugucccaccagagcgacaucgaggugaccggcgacuccugcaacaacuacaugcugacguacaacaaggucgagaacaugaccccccgggaccucggggccugcaucgacugcagcgcccgccacaucaacgcccagguggccaagucccacaacaucgcgcugaucuggaacgugaaggacuucaugagccuguccgagcagcuccggaagcagauccgcagcgccgccaagaagaacaaccugcccuucaagcugaccugcgccaccacgcgccaggucgugaacguggucaccaccaagaucgcccucaagggcggguga

SEQ ID NO: 17665 - RNA, 5841 nt, Artificial Sequence
  SARS-CoV-2__MT890346.1__non-structural protein 3 (NSP3) CDS gc
auggcccccaccaaggugaccuucggcgacgacacggucaucgaggugcagggguacaagagcgugaacaucaccuucgagcuggacgagcgcaucgacaagguccucaacgagaagugcuccgccuacaccguggagcugggcaccgaggugaacgaguucgcgugcgucguggccgacgccgugaucaagacgcugcagccggucagcgagcuccugaccccccuggggaucgaccucgacgagugguccauggccaccuacuaccuguucgacgagagcggcgaguucaagcuggccucccacauguacugcagcuucuacccccccgacgaggacgaggaggagggggacugcgaggaggaggaguucgagccguccacccaguacgaguacggcacggaggacgacuaccagggcaagccccucgaguucggggcgaccagcgccgcccugcagcccgaggaggagcaggaggaggacuggcuggacgacgacucccagcagaccgugggccagcaggacgggagcgaggacaaccagaccacgaccauccagaccaucguggagguccagccccagcucgagauggagcugaccccgguggugcagacgaucgaggucaacuccuucagcggcuaccugaagcucaccgacaacguguacaucaagaacgccgacaucguggaggaggcgaagaaggucaagcccaccgugguggucaacgccgccaacguguaccugaagcacgggggcggcguggccggggcccugaacaaggcgaccaacaacgccaugcaggucgaguccgacgacuacaucgccacgaacggcccccucaagguggggggcagcugcguccuguccggccacaaccuggccaagcacugccuccacgugguggggcccaacgucaacaagggcgaggacauccagcugcugaagagcgccuacgagaacuucaaccagcacgaggugcuccuggcgccgcugcucuccguggggaucuucggcgccgaccccauccacagccugcgggucugcguggacaccgugcgcaccaacgucuaccuggccguguucgacaagaaccucuacgacaagcugguguccagcuuccuggagaugaagagcgagaagcaggucgagcagaagaucgccgagauccccaaggaggaggugaagcccuucaucaccgaguccaagccgagcguggagcagcggaagcaggacgacaagaagaucaaggccugcgucgaggaggugacgaccacccucgaggagaccaaguuccugacggagaaccugcuccuguacaucgacaucaacgggaaccugcaccccgacuccgcgacccucgugagcgacaucgacaucaccuuccugaagaaggacgcccccuacaucgucggcgacguggugcaggagggcguccugaccgccguggugauccccacgaagaaggccgggggcaccaccgagaugcucgccaaggcgcugcgcaaggucccgaccgacaacuacaucacgaccuaccccgggcagggccugaacggguacaccguggaggaggccaagaccgugcucaagaagugcaaguccgccuucuacauccugcccagcaucaucuccaacgagaagcaggagauccugggcaccgucagcuggaaccuccgggagaugcuggcccacgcggaggagacgcgcaagcugaugcccgugugcguggagaccaaggccaucgucuccaccauccagcggaaguacaagggcaucaagauccaggagggggugguggacuacggcgcccgcuucuacuucuacaccagcaagacgaccgucgccucccugaucaacacccucaacgaccugaacgagacccuggugacgaugccgcucggguacgugacccacggccugaaccuggaggaggccgcgcgguacaugcgcagccucaagguccccgccaccguguccgugagcucccccgacgccgucaccgccuacaacggguaccugacgagcuccagcaagacccccgaggagcacuucaucgagaccaucucccuggccggcagcuacaaggacuggagcuacuccggccagagcacccagcucgggaucgaguuccugaagcggggcgacaaguccguguacuacacgagcaacccgaccaccuuccaccuggacggggaggugaucaccuucgacaaccucaagacgcugcugucccuccgcgagguccggaccaucaagguguucaccaccguggacaacaucaaccugcacacgcaggucguggacaugagcaugaccuacggccagcaguucggccccaccuaccuggacggggcggacgugaccaagaucaagccccacaacucccacgagggcaagacguucuacguccucccgaacgacgacacccugcgcguggaggccuucgaguacuaccacaccaccgaccccagcuuccuggggcgguacauguccgcccucaaccacacgaagaaguggaaguacccccaggugaacggccugaccagcaucaagugggccgacaacaacugcuaccuggccaccgcgcuccugacccugcagcagaucgagcucaaguucaaccccccggcccugcaggacgccuacuaccgcgcccgggcgggggaggccgccaacuucugcgcccugauccucgccuacugcaacaagacggucggcgagcugggcgacgugcgcgagaccauguccuaccuguuccagcacgcgaaccucgacagcugcaagcggguccugaacguggugugcaagaccugcgggcagcagcagaccacccugaagggcgucgaggccgugauguacauggggacgcucuccuacgagcaguucaagaagggcgugcagauccccugcaccugcgggaagcaggccaccaaguaccugguccagcaggagagccccuucgugaugauguccgcccccccggcccaguacgagcugaagcacggcaccuucacgugcgcgagcgaguacaccggcaacuaccagugcgggcacuacaagcacaucaccuccaaggagacccucuacugcaucgacggcgcccugcugacgaagagcagcgaguacaaggggcccaucaccgacguguucuacaaggagaacuccuacaccaccacgaucaagcccgucaccuacaagcucgacggcguggugugcaccgagaucgaccccaagcuggacaacuacuacaagaaggacaacagcuacuucaccgagcagccgaucgaccugguccccaaccagcccuaccccaacgccuccuucgacaacuucaaguucgugugcgacaacaucaaguucgccgacgaccucaaccagcugacgggguacaagaagccggccagccgcgagcugaaggugaccuucuuccccgaccucaacggcgacgucguggcgaucgacuacaagcacuacacccccuccuucaagaagggcgccaagcugcugcacaagcccaucguguggcacgucaacaacgccaccaacaaggccacguacaagccgaacaccuggugcauccggugccucuggagcaccaagcccguggagaccuccaacagcuucgacgugcugaaguccgaggacgcgcaggggauggacaaccuggccugcgaggaccucaagcccgucagcgaggaggugguggagaaccccacgauccagaaggacguccuggagugcaacgugaagaccaccgagguggucggcgacaucauccugaagccggccaacaacucccucaagaucaccgaggagguggggcacacggaccugauggccgccuacguggacaacagcucccugaccaucaagaagcccaacgagcucagccgcguccugggccugaagacccucgcgacccacgggcuggccgccgugaacuccgugcccugggacacgaucgccaacuacgccaagccguuccugaacaaggucgugagcaccaccaccaacaucgugacgcgcugccucaaccgggucugcaccaacuacaugcccuacuucuucacccugcugcuccagcugugcaccuucacccgcuccacgaacagccggaucaaggcguccaugcccaccaccaucgccaagaacaccgugaagagcgugggcaaguucugccuggaggccagcuucaacuaccucaagucccccaacuucagcaagcugaucaacaucaucaucugguuccugcuccuguccgucugccugggcagccucaucuacuccacggccgcccugggggugcugaugagcaaccucggcaugccguccuacugcaccggguaccgcgagggcuaccugaacagcaccaacgugaccaucgcgacguacugcaccggcuccauccccugcagcgucugccuguccgggcucgacagccuggacaccuaccccucccuggagaccauccagaucacgaucagcuccuucaagugggaccucaccgccuucggccugguggccgagugguuccuggccuacauccucuucacccgguucuucuacgugcuggggcuggccgcgaucaugcagcucuucuucagcuacuucgccguccacuucaucuccaacagcuggcugauguggcugaucaucaaccuggugcagauggcccccaucuccgccauggugcgcauguacaucuucuucgcgagcuucuacuacgucuggaagagcuacgugcacguggucgacggcugcaacuccagcaccugcaugaugugcuacaagcggaaccgcgccacgcggguggagugcaccaccaucgucaacggggugcgccgguccuucuacguguacgccaacggcggcaagggguucugcaagcuccacaacuggaacugcgucaacugcgacaccuucugcgccggcagcacguucaucuccgacgagguggcccgcgaccugagccugcaguucaagcggccgaucaaccccaccgaccaguccagcuacaucguggacuccgucaccgugaagaacgggagcauccaccucuacuucgacaaggcgggccagaagaccuacgagcgccacucccugagccacuucgugaaccuggacaaccuccgggccaacaacacgaaggggucccugcccaucaacgucaucguguucgacggcaagagcaagugcgaggaguccagcgccaaguccgccagcguguacuacucccagcugaugugccagcccauccuccugcuggaccaggcccucgucagcgacgugggcgacagcgcggagguggccgucaagauguucgacgccuacgugaacaccuucuccagcaccuucaacgugccgauggagaagcugaagacccuggucgccacggccgaggcggagcucgccaagaacgugucccuggacaacgugcugagcaccuucaucuccgccgcccgccagggguucgucgacagcgacguggagaccaaggacguggucgagugccucaagcugucccaccagagcgacaucgaggugaccggcgacuccugcaacaacuacaugcugacguacaacaagguggagaacaugaccccccgggaccucggggcgugcaucgacugcagcgcccgccacaucaacgcccaggucgccaagucccacaacaucgcccugaucuggaacgugaaggacuucaugagccuguccgagcagcuccggaagcagauccgcagcgcggccaagaagaacaaccugcccuucaagcugaccugcgccaccacgcgccagguggucaacguggugaccaccaagaucgcccucaagggcggguga

SEQ ID NO: 17666 - RNA, 5841 nt, Artificial Sequence
  SARS-CoV-2__MT890353.1__non-structural protein 3 (NSP3) CDS gc
auggcccccaccaaggugaccuucggcgacgacacggucaucgaggugcagggguacaagagcgugaacaucaccuucgagcuggacgagcgcaucgacaagguccucaacgagaagugcuccgccuacaccguggagcugggcaccgaggugaacgaguucgcgugcgucguggccgacgccgugaucaagacgcugcagccggucagcgagcuccugaccccccuggggaucgaccucgacgagugguccauggccaccuacuaccuguucgacgagagcggcgaguucaagcuggccucccacauguacugcagcuucuacccccccgacgaggacgaggaggagggggacugcgaggaggaggaguucgagccguccacccaguacgaguacggcacggaggacgacuaccagggcaagccccucgaguucggggcgaccagcgccgcccugcagcccgaggaggagcaggaggaggacuggcuggacgacgacucccagcagaccgugggccagcaggacgggagcgaggacaaccagaccacgaccauccagaccaucguggagguccagccccagcucgagauggagcugaccccgguggugcagacgaucgaggucaacuccuucagcggcuaccugaagcucaccgacaacguguacaucaagaacgccgacaucguggaggaggucaagaaggugaagcccaccguggucgugaacgcggccaacguguaccugaagcacgggggcggcgucgccggggcccugaacaaggccaccaacaacgcgaugcagguggaguccgacgacuacaucgccacgaacggcccccucaaggucgggggcagcugcgugcuguccggccacaaccuggccaagcacugccuccacguggucgggcccaacgugaacaagggcgaggacauccagcugcugaagagcgccuacgagaacuucaaccagcacgaggugcuccuggccccgcugcucuccgcggggaucuucggcgccgaccccauccacagccugcgggucugcguggacaccgugcgcaccaacgucuaccuggccguguucgacaagaaccucuacgacaagcugguguccagcuuccuggagaugaagagcgagaagcaggucgagcagaagaucgccgagauccccaaggaggaggugaagcccuucaucaccgaguccaagccgagcguggagcagcggaagcaggacgacaagaagaucaaggccugcgucgaggaggugacgaccacccucgaggagaccaaguuccugacggagaaccugcuccuguacaucgacaucaacgggaaccugcaccccgacuccgcgacccucgugagcgacaucgacaucaccuuccugaagaaggacgcccccuacaucgucggcgacguggugcaggagggcguccugaccgccguggugauccccacgaagaaggccgggggcaccaccgagaugcucgccaaggcgcugcgcaaggucccgaccgacaacuacaucacgaccuaccccgggcagggccugaacggguacaccguggaggaggccaagaccgugcucaagaagugcaaguccgccuucuacauccugcccagcaucaucuccaacgagaagcaggagauccugggcaccgucagcuggaaccuccgggagaugcuggcccacgcggaggagacgcgcaagcugaugcccgugugcguggagaccaaggccaucgucuccaccauccagcggaaguacaagggcaucaagauccaggagggggugguggacuacggcgcccgcuucuacuucuacaccagcaagacgaccgucgccucccugaucaacacccucaacgaccugaacgagacccuggugacgaugccgcucggguacgugacccacggccugaaccuggaggaggccgcgcgguacaugcgcagccucaagguccccgccaccguguccgugagcucccccgacgccgucaccgccuacaacggguaccugacgagcuccagcaagacccccgaggagcacuucaucgagaccaucucccuggccggcagcuacaaggacuggagcuacuccggccagagcacccagcucgggaucgaguuccugaagcggggcgacaaguccguguacuacacgagcaacccgaccaccuuccaccuggacggggaggugaucaccuucgacaaccucaagacgcugcugucccuccgcgagguccggaccaucaagguguucaccaccguggacaacaucaaccugcacacgcaggucguggacaugagcaugaccuacggccagcaguucggccccaccuaccuggacggggcggacgugaccaagaucaagccccacaacucccacgagggcaagacguucuacguccucccgaacgacgacacccugcgcguggaggccuucgaguacuaccacaccaccgaccccagcuuccuggggcgguacauguccgcccucaaccacacgaagaaguggaaguacccccaggugaacggccugaccagcaucaagugggccgacaacaacugcuaccuggccaccgcgcuccugacccugcagcagaucgagcucaaguucaaccccccggcccugcaggacgccuacuaccgcgcccgggcgggggaggccgccaacuucugcgcccugauccucgccuacugcaacaagacggucggcgagcugggcgacgugcgcgagaccauguccuaccuguuccagcacgcgaaccucgacagcugcaagcggguccugaacguggugugcaagaccugcgggcagcagcagaccacccugaagggcgucgaggccgugauguacauggggacgcucuccuacgagcaguucaagaagggcgugcagauccccugcaccugcgggaagcaggccaccaaguaccugguccagcaggagagccccuucgugaugauguccgcccccccggcccaguacgagcugaagcacggcaccuucacgugcgcgagcgaguacaccggcaacuaccagugcgggcacuacaagcacaucaccuccaaggagacccucuacugcaucgacggcgcccugcugacgaagagcagcgaguacaaggggcccaucaccgacguguucuacaaggagaacuccuacaccaccacgaucaagcccgucaccuacaagcucgacggcguggugugcaccgagaucgaccccaagcuggacaacuacuacaagaaggacaacagcuacuucaccgagcagccgaucgaccugguccccaaccagcccuaccccaacgccuccuucgacaacuucaaguucgugugcgacaacaucaaguucgccgacgaccucaaccagcugacgggguacaagaagccggccagccgcgagcugaaggugaccuucuuccccgaccucaacggcgacgucguggcgaucgacuacaagcacuacacccccuccuucaagaagggcgccaagcugcugcacaagcccaucguguggcacgucaacaacgccaccaacaaggccacguacaagccgaacaccuggugcauccggugccucuggagcaccaagcccguggagaccuccaacagcuucgacgugcugaaguccgaggacgcgcaggggauggacaaccuggccugcgaggaccucaagcccgucagcgaggaggugguggagaaccccacgauccagaaggacguccuggagugcaacgugaagaccaccgagguggucggcgacaucauccugaagccggccaacaacucccucaagaucaccgaggagguggggcacacggaccugauggccgccuacguggacaacagcucccugaccaucaagaagcccaacgagcucagccgcguccugggccugaagacccucgcgacccacgggcuggccgccgugaacuccgugcccugggacacgaucgccaacuacgccaagccguuccugaacaaggucgugagcaccaccaccaacaucgugacgcgcugccucaaccgggucugcaccaacuacaugcccuacuucuucacccugcugcuccagcugugcaccuucacccgcuccacgaacagccggaucaaggcguccaugcccaccaccaucgccaagaacaccgugaagagcgugggcaaguucugccuggaggccagcuucaacuaccucaagucccccaacuucagcaagcugaucaacaucaucaucugguuccugcuccuguccgucugccugggcagccucaucuacuccacggccgcccugggggugcugaugagcaaccucggcaugccguccuacugcaccggguaccgcgagggcuaccugaacagcaucaacgugaccaucgcgaccuacugcacgggcuccauccccugcagcgucugccuguccgggcucgacagccuggacaccuaccccucccuggagaccauccagaucaccaucagcuccuucaagugggaccucacggccuucggccugguggccgagugguuccuggccuacauccucuucacccgguucuucuacgugcuggggcuggccgcgaucaugcagcucuucuucagcuacuucgccguccacuucaucuccaacagcuggcugauguggcugaucaucaaccuggugcagauggcccccaucuccgccauggugcgcauguacaucuucuucgcgagcuucuacuacgucuggaagagcuacgugcacguggucgacggcugcaacuccagcaccugcaugaugugcuacaagcggaaccgcgccacccggguggagugcacgaccaucgucaacggggugcgccgguccuucuacguguacgccaacggcggcaagggguucugcaagcuccacaacuggaacugcgucaacugcgacaccuucugcgccggcagcaccuucaucuccgacgagguggcccgcgaccugagccugcaguucaagcggccgaucaaccccacggaccaguccagcuacaucguggacuccgucaccgugaagaacgggagcauccaccucuacuucgacaaggcgggccagaagaccuacgagcgccacucccugagccacuucgugaaccuggacaaccuccgggccaacaacaccaaggggucccugcccaucaacgucaucguguucgacggcaagagcaagugcgaggaguccagcgccaaguccgccagcguguacuacucccagcugaugugccagcccauccuccugcuggaccaggcccucgucagcgacgugggcgacagcgcggagguggccgucaagauguucgacgccuacgugaacacguucuccagcaccuucaacgugccgauggagaagcugaagacccuggucgccaccgccgaggcggagcucgccaagaacgugucccuggacaacgugcugagcacguucaucuccgccgcccgccagggguucgucgacagcgacguggagaccaaggacguggucgagugccucaagcugucccaccagagcgacaucgaggugaccggcgacuccugcaacaacuacaugcugaccuacaacaagguggagaacaugacgccccgggaccucggggcgugcaucgacugcagcgcccgccacaucaacgcccaggucgccaagucccacaacaucgcccugaucuggaacgugaaggacuucaugagccuguccgagcagcuccggaagcagauccgcagcgcggccaagaagaacaaccugcccuucaagcugaccugcgccaccacccgccagguggucaacguggugacgaccaagaucgcccucaagggcggguga

SEQ ID NO: 17667 - RNA, 5841 nt, Artificial Sequence
  SARS-CoV-2__MT890355.1__non-structural protein 3 (NSP3) CDS gc
auggcccccaccaaggugaccuucggcgacgacacggucaucgaggugcagggguacaagagcgugaacaucaccuucgagcuggacgagcgcaucgacaagguccucaacgagaagugcuccgccuacaccguggagcugggcaccgaggugaacgaguucgcgugcgucguggccgacgccgugaucaagacgcugcagccggucagcgagcuccugaccccccuggggaucgaccucgacgagugguccauggccaccuacuaccuguucgacgagagcggcgaguucaagcuggccucccacauguacugcagcuucuacccccccgacgaggacgaggaggagggggacugcgaggaggaggaguucgagccguccacccaguacgaguacggcacggaggacgacuaccagggcaagccccucgaguucggggcgaccagcgccgcccugcagcccgaggaggagcaggaggaggacuggcuggacgacgacucccagcagaccgugggccagcaggacgggagcgaggacaaccagaccacgaccauccagaccaucguggagguccagccccagcucgagauggagcugaccccgguggugcagacgaucgaggucaacuccuucagcggcuaccugaagcucaccgacaacguguacaucaagaacgccgacaucguggaggaggcgaagaaggucaagcccaccgugguggucaacgccgccaacguguaccugaagcacgggggcggcguggccggggcccugaacaaggcgaccaacaacgccaugcaggucgaguccgacgacuacaucgccacgaacggcccccucaagguggggggcagcugcguccuguccggccacaaccuggccaagcacugccuccacgugguggggcccaacgucaacaagggcgaggacauccagcugcugaagagcgccuacgagaacuucaaccagcacgaggugcuccuggcgccgcugcucuccgccgggaucuucggcgccgaccccauccacagccugcgggugugcgucgacaccgugcgcaccaacguguaccuggccgucuucgacaagaaccucuacgacaagcugguguccagcuuccuggagaugaagagcgagaagcagguggagcagaagaucgccgagauccccaaggaggaggucaagcccuucaucaccgaguccaagccgagcguggagcagcggaagcaggacgacaagaagaucaaggcgugcguggaggaggucacgaccacccucgaggagaccaaguuccugacggagaaccugcuccuguacaucgacaucaacgggaaccugcaccccgacuccgccacccucgugagcgacaucgacaucaccuuccugaagaaggacgcccccuacaucgugggcgacgucgugcaggagggcgugcugaccgccgucgugauccccacgaagaaggccgggggcaccaccgagaugcucgcgaaggcccugcgcaaggugccgaccgacaacuacaucacgaccuaccccgggcagggccugaacggguacaccgucgaggaggccaagaccgugcucaagaagugcaaguccgccuucuacauccugcccagcaucaucuccaacgagaagcaggagauccugggcaccgugagcuggaaccuccgggagaugcuggcgcacgccgaggagacgcgcaagcugaugcccgucugcguggagaccaaggccaucguguccaccauccagcggaaguacaagggcaucaagauccaggagggggucguggacuacggcgcccgcuucuacuucuacaccagcaagacgaccguggccucccugaucaacacccucaacgaccugaacgagacccuggucacgaugccgcucggguacgugacccacggccugaaccuggaggaggcggcccgguacaugcgcagccucaaggugcccgccaccgucuccgugagcucccccgacgccgugaccgccuacaacggguaccugacgagcuccagcaagacccccgaggagcacuucaucgagaccaucucccuggcgggcagcuacaaggacuggagcuacuccggccagagcacccagcucgggaucgaguuccugaagcggggcgacaaguccgucuacuacacgagcaacccgaccaccuuccaccuggacggggaggugaucaccuucgacaaccucaagacgcugcugucccuccgcgaggugcggaccaucaaggucuucaccaccguggacaacaucaaccugcacacgcagguggucgacaugagcaugaccuacggccagcaguucggccccaccuaccuggacggggccgacgugaccaagaucaagccccacaacucccacgagggcaagacguucuacgugcucccgaacgacgacacccugcgcgucgaggccuucgaguacuaccacaccaccgaccccagcuuccuggggcgguacauguccgcccucaaccacacgaagaaguggaaguacccccaggugaacggccugaccagcaucaagugggccgacaacaacugcuaccuggcgaccgcccuccugacccugcagcagaucgagcucaaguucaaccccccggcccugcaggacgccuacuaccgcgcgcgggccggggaggccgccaacuucugcgcccugauccucgcguacugcaacaagacggugggcgagcugggcgacguccgcgagaccauguccuaccuguuccagcacgccaaccucgacagcugcaagcgggugcugaacgucgugugcaagaccugcgggcagcagcagaccacccugaagggcguggaggccgucauguacauggggacgcucuccuacgagcaguucaagaagggcgugcagauccccugcaccugcgggaagcaggccaccaaguaccuggugcagcaggagagccccuucgucaugauguccgcccccccggcgcaguacgagcugaagcacggcaccuucacgugcgccagcgaguacaccggcaacuaccagugcgggcacuacaagcacaucaccuccaaggagacccucuacugcaucgacggcgcccugcugacgaagagcagcgaguacaaggggcccaucaccgacguguucuacaaggagaacuccuacaccaccacgaucaagcccgugaccuacaagcucgacggcgucgugugcaccgagaucgaccccaagcuggacaacuacuacaagaaggacaacagcuacuucaccgagcagccgaucgaccuggugcccaaccagcccuaccccaacgccuccuucgacaacuucaaguucgucugcgacaacaucaaguucgccgacgaccucaaccagcugacgggguacaagaagccggcgagccgcgagcugaaggugaccuucuuccccgaccucaacggcgacguggucgccaucgacuacaagcacuacacccccuccuucaagaagggcgccaagcugcugcacaagcccaucguguggcacgugaacaacgccaccaacaaggcgacguacaagccgaacaccuggugcauccggugccucuggagcaccaagcccgucgagaccuccaacagcuucgacgugcugaaguccgaggacgcccaggggauggacaaccuggccugcgaggaccucaagcccgugagcgaggaggucguggagaaccccacgauccagaaggacgugcuggagugcaacgucaagaccaccgagguggugggcgacaucauccugaagccggccaacaacucccucaagaucaccgaggaggucgggcacacggaccugauggccgcguacguggacaacagcucccugaccaucaagaagcccaacgagcucagccgcgugcugggccugaagacccucgccacccacgggcuggccgccgucaacuccgugcccugggacacgaucgccaacuacgcgaagccguuccugaacaagguggucagcaccaccaccaacaucgugacgcgcugccucaaccgggugugcaccaacuacaugcccuacuucuucacccugcugcuccagcugugcaccuucacccgcuccacgaacagccggaucaaggccuccaugcccaccaccaucgccaagaacaccgucaagagcgugggcaaguucugccuggaggccagcuucaacuaccucaagucccccaacuucagcaagcugaucaacaucaucaucugguuccugcuccuguccgugugccugggcagccucaucuacuccacggccgcgcuggggguccugaugagcaaccucggcaugccguccuacugcaccggguaccgcgagggcuaccugaacagcaccaacgugaccaucgccacguacugcaccggcuccauccccugcagcgugugccuguccgggcucgacagccuggacaccuaccccuuccuggagaccauccagaucacgaucuccagcuucaagugggaccucaccgccuucggccuggucgccgagugguuccuggccuacauccucuucacccgguucuucuacgugcuggggcuggcggccaucaugcagcucuucuucuccuacuucgccgugcacuucaucagcaacuccuggcugauguggcugaucaucaaccugguccagauggcccccaucagcgcgauggugcgcauguacaucuucuucgccuccuucuacuacguguggaagagcuacguccacgugguggacggcugcaacagcuccaccugcaugaugugcuacaagcggaaccgcgccacgcgggucgagugcaccaccaucgugaacgggguccgccggagcuucuacguguacgccaacggcggcaagggguucugcaagcuccacaacuggaacugcgugaacugcgacaccuucugcgccggcuccacguucaucagcgacgaggucgcgcgcgaccugucccugcaguucaagcggccgaucaaccccaccgaccagagcuccuacaucguggacagcgugaccgucaagaacggguccauccaccucuacuucgacaaggccggccagaagaccuacgagcgccacagccugucccacuucgugaaccuggacaaccuccgggccaacaacacgaaggggagccugcccaucaacgugaucgucuucgacggcaaguccaagugcgaggagagcuccgccaagagcgccuccguguacuacagccagcugaugugccagcccauccuccugcuggaccaggcgcucguguccgacgucggcgacagcgccgagguggccgugaagauguucgacgccuacgucaacaccuucagcuccaccuucaacgugccgauggagaagcugaagacccugguggccacggcggaggccgagcucgccaagaacgucagccuggacaacgugcuguccaccuucaucagcgccgcgcgccagggguucguggacuccgacgucgagaccaaggacgugguggagugccucaagcugagccaccaguccgacaucgaggucaccggcgacagcugcaacaacuacaugcugacguacaacaagguggagaacaugaccccccgggaccucggggccugcaucgacugcuccgcccgccacaucaacgcccagguggccaagagccacaacaucgcgcugaucuggaacgucaaggacuucaugucccugagcgagcagcuccggaagcagauccgcuccgccgccaagaagaacaaccugcccuucaagcugaccugcgccaccacgcgccagguggugaacgucgugaccaccaagaucgcccucaagggcggguga

SEQ ID NO: 17668 - RNA, 5841 nt, Artificial Sequence
  SARS-CoV-2__MT890669.1__non-structural protein 3 (NSP3) CDS gc
auggcccccaccaaggugaccuucggcgacgacacggucaucgaggugcagggguacaagagcgugaacaucaccuucgagcuggacgagcgcaucgacaagguccucaacgagaagugcuccgccuacaccguggagcugggcaccgaggugaacgaguucgcgugcgucguggccgacgccgugaucaagacgcugcagccggucagcgagcuccugaccccccuggggaucgaccucgacgagugguccauggccaccuacuaccuguucgacgagagcggcgaguucaagcuggccucccacauguacugcagcuucuacccccccgacgaggacgaggaggagggggacugcgaggaggaggaguucgagccguccacccaguacgaguacggcacggaggacgacuaccagggcaagccccucgaguucggggcgaccagcgccgcccugcagcccgaggaggagcaggaggaggacuggcuggacgacgacucccagcagaccgugggccagcaggacgggagcgaggacaaccagaccacgaccauccagaccaucguggagguccagccccagcucgagauggagcugaccccgguggugcagacgaucgaggucaacuccuucagcggcuaccugaagcucaccgacaacguguacaucaagaacgccgacaucguggaggaggcgaagaaggucaagcccaccgugguggucaacgccgccaacguguaccugaagcacgggggcggcguggccggggcccugaacaaggcgaccaacaacgccaugcaggucgaguccgacgacuacaucgccacgaacggcccccucaagguggggggcagcugcguccuguccggccacaaccuggccaagcacugccuccacgugguggggcccaacgucaacaagggcgaggacauccagcugcugaagagcgccuacgagaacuucaaccagcacgaggugcuccuggcgccgcugcucuccgccgggaucuucggcgccgaccccauccacagccugcgggugugcgucgacaccgugcgcaccaacguguaccuggccgucuucgacaagaaccucuacgacaagcugguguccagcuuccuggagaugaagagcgagaagcagguggagcagaagaucgccgagauccccaaggaggaggucaagcccuucaucaccgaguccaagccgcucguggagcagcggaagcaggacgacaagaagaucaaggcgugcguggaggaggucacgaccacccuggaggagaccaaguuccugacggagaaccuccugcuguacaucgacaucaacgggaaccuccaccccgacagcgccacccugguguccgacaucgacaucaccuuccugaagaaggacgcccccuacaucgugggcgacgucgugcaggagggcgugcucaccgccgucgugauccccacgaagaaggccgggggcaccaccgagaugcuggcgaaggcccugcgcaaggugccgaccgacaacuacaucacgaccuaccccgggcagggccucaacggguacaccgucgaggaggccaagaccgugcugaagaagugcaagagcgccuucuacauccugcccuccaucaucagcaacgagaagcaggagauccucggcaccguguccuggaaccugcgggagaugcuggcgcacgccgaggagacgcgcaagcugaugcccgucugcguggagaccaaggccaucgugagcaccauccagcggaaguacaagggcaucaagauccaggagggggucguggacuacggcgcccgcuucuacuucuacaccuccaagacgaccguggccagccucaucaacacccugaacgaccugaacgagacccucgucacgaugccgcugggguacgugacccacggccugaaccucgaggaggcggcccgguacaugcgcucccugaaggugcccgccaccgucagcguguccagccccgacgccgugaccgccuacaacggguaccugacguccagcuccaagacccccgaggagcacuucaucgagaccaucagccucgcgggcuccuacaaggacuggagcuacagcggccaguccacccagcuggggaucgaguuccugaagcggggcgacaagagcgucuacuacacguccaacccgaccaccuuccaccucgacggggaggugaucaccuucgacaaccugaagacgcugcucagccugcgcgaggugcggaccaucaaggucuucaccaccguggacaacaucaaccugcacacgcagguggucgacauguccaugaccuacggccagcaguucggccccaccuaccucgacggggccgacgugaccaagaucaagccccacaacagccacgagggcaagacguucuacgugcugccgaacgacgacacccugcgcgucgaggccuucgaguacuaccacaccaccgaccccuccuuccucgggcgguacaugagcgcccugaaccacacgaagaaguggaaguacccccaggugaacggccugaccuccaucaagugggccgacaacaacugcuaccucgcgaccgcccugcugacccuccagcagaucgagcugaaguucaaccccccggcccugcaggacgccuacuaccgcgcgcgggccggggaggccgccaacuucugcgcccucauccuggcguacugcaacaagacggugggcgagcugggcgacguccgcgagaccaugagcuaccucuuccagcacgccaaccuggacuccugcaagcgggugcugaacgucgugugcaagaccugcgggcagcagcagaccacccucaagggcguggaggccgucauguacauggggacgcugagcuacgagcaguucaagaagggcgugcagauccccugcaccugcgggaagcaggccaccaaguaccuggugcagcaggagucccccuucgucaugaugagcgcccccccggcgcaguacgagcucaagcacggcaccuucacgugcgccuccgaguacaccggcaacuaccagugcgggcacuacaagcacaucaccagcaaggagacccuguacugcaucgacggcgcccugcucacgaaguccagcgaguacaaggggcccaucaccgacguguucuacaaggagaacagcuacaccaccacgaucaagcccgugaccuacaagcuggacggcgucgugugcaccgagaucgaccccaagcuggacaacuacuacaagaaggacaacuccuacuucaccgagcagccgaucgaccucgugcccaaccagcccuaccccaacgccagcuucgacaacuucaaguucgucugcgacaacaucaaguucgccgacgaccugaaccagcugacgggguacaagaagccggcgucccgcgagcucaaggugaccuucuuccccgaccugaacggcgacguggucgccaucgacuacaagcacuacacccccagcuucaagaagggcgccaagcugcuccacaagcccaucguguggcacgugaacaacgccaccaacaaggcgacguacaagccgaacaccuggugcauccggugccugugguccaccaagcccgucgagaccagcaacuccuucgacgugcugaagagcgaggacgcccaggggauggacaaccucgccugcgaggaccugaagcccguguccgaggaggucguggagaaccccacgauccagaaggacgugcuggagugcaacgucaagaccaccgagguggugggcgacaucauccucaagccggccaacaacagccugaagaucaccgaggaggucgggcacacggaccugauggccgcguacguggacaacuccagccucaccaucaagaagcccaacgagcugucccgcgugcugggccucaagacccuggccacccacgggcuggccgccgucaacagcgugcccugggacacgaucgccaacuacgcgaagccguuccucaacaagguggucuccaccaccaccaacaucgugacgcgcugccugaaccgggugugcaccaacuacaugcccuacuucuucacccugcuccugcagcugugcaccuucacccgcagcacgaacucccggaucaaggccagcaugcccaccaccaucgccaagaacaccgucaaguccgugggcaaguucugccucgaggccagcuucaacuaccugaagagccccaacuucuccaagcugaucaacaucaucaucugguuccuccugcugagcgugugccucggcucccugaucuacagcacggccgcgcuggggguccucauguccaaccugggcaugccgagcuacugcaccggguaccgcgagggcuaccugaacuccaccaacgugaccaucgccacguacugcaccggcagcauccccugcuccgugugccucagcgggcuggacucccuggacaccuaccccagccucgagaccauccagaucacgaucuccagcuucaagugggaccugaccgccuucggccuggucgccgagugguuccucgccuacauccuguucacccgguucuucuacgugcuggggcucgcggccaucaugcagcuguucuucuccuacuucgccgugcacuucaucagcaacuccuggcugauguggcugaucaucaaccucguccagauggcccccaucagcgcgauggugcgcauguacaucuucuucgccuccuucuacuacguguggaagagcuacguccacgugguggacggcugcaacagcuccaccugcaugaugugcuacaagcggaaccgcgccacgcgggucgagugcaccaccaucgugaacgggguccgccggagcuucuacguguacgccaacggcggcaagggguucugcaagcugcacaacuggaacugcgugaacugcgacaccuucugcgccggcuccacguucaucagcgacgaggucgcgcgcgaccugucccuccaguucaagcggccgaucaaccccaccgaccagagcuccuacaucguggacagcgugaccgucaagaacggguccauccaccuguacuucgacaaggccggccagaagaccuacgagcgccacagccugucccacuucgugaaccucgacaaccugcgggccaacaacacgaaggggagccugcccaucaacgugaucgucuucgacggcaaguccaagugcgaggagagcuccgccaagagcgccuccguguacuacagccagcucaugugccagcccauccugcugcucgaccaggcgcugguguccgacgucggcgacagcgccgagguggccgugaagauguucgacgccuacgucaacaccuucagcuccaccuucaacgugccgauggagaagcugaagacccucguggccacggcggaggccgagcuggccaagaacgucagccuggacaacgugcucuccaccuucaucagcgccgcgcgccagggguucguggacuccgacgucgagaccaaggacgugguggagugccugaagcugagccaccaguccgacaucgaggucaccggcgacagcugcaacaacuacaugcucacguacaacaagguggagaacaugaccccccgggaccugggggccugcaucgacugcuccgcccgccacaucaacgcccagguggccaagagccacaacaucgcgcugaucuggaacgucaaggacuucaugucccucagcgagcagcugcggaagcagauccgcuccgccgccaagaagaacaaccugcccuucaagcucaccugcgccaccacgcgccagguggugaacgucgugaccaccaagaucgcccugaagggcggguga

SEQ ID NO: 17669 - RNA, 5841 nt, Artificial Sequence
  SARS-CoV-2__MT892964.1__non-structural protein 3 (NSP3) CDS gc
auggcccccaccaaggugaccuucggcgacgacacggucaucgaggugcagggguacaagagcgugaacaucaccuucgagcuggacgagcgcaucgacaagguccucaacgagaagugcuccgccuacaccguggagcugggcaccgaggugaacgaguucgcgugcgucguggccgacgccgugaucaagacgcugcagccggucagcgagcuccugaccccccuggggaucgaccucgacgagugguccauggccaccuacuaccuguucgacgagagcggcgaguucaagcuggccucccacauguacugcagcuucuacccccccgacgaggacgaggaggagggggacugcgaggaggaggaguucgagccguccacccaguacgaguacggcacggaggacgacuaccagggcaagccccucgaguucggggcgaccagcgccgcccugcagcccgaggaggagcaggaggaggacuggcuggacgacgacucccagcagaccgugggccagcaggacgggagcgaggacaaccagaccacgaccauccagaccaucguggagguccagccccagcucgagauggagcugaccccgguggugcagacgaucgaggucaacuccuucagcggcuaccugaagcucaccgacaacguguacaucaagaacgccgacaucguggaggaggcgaagaaggucaagcccaccgugguggucaacgccgccaacguguaccugaagcacgggggcggcguggccggggcccugaacaaggcgaccaacaacgccaugcaggucgaguccgacgacuacaucgccacgaacggcccccucaagguggggggcagcugcguccuguccggccacaaccuggccaagcacugccuccacgugguggggcccaacgucaacaagggcgaggacauccagcugcugaagagcgccuacgagaacuucaaccagcacgaggugcuccuggcgccgcugcucuccgccgggaucuucggcgccgaccccauccacagccugcgggugugcgucgacaccgugcgcaccaacguguaccuggccgucuucgacaagaaccucuacgacaagcugguguccagcuuccuggagaugaagagcgagaagcagguggagcagaagaucgccgagauccccaaggaggaggucaagcccuucaucaccgaguccaagccgagcguggagcagcggaagcaggacgacaagaagaucaaggcgugcguggaggaggucacgaccacccucgaggagaccaaguuccugacggagaaccugcuccuguacaucgacaucaacgggaaccugcaccccgacuccgccacccucgugagcgacaucgacaucaccuuccugaagaaggacgcccccuacaucgugggcgacgucgugcaggagggcgugcugaccgccgucgugauccccacgaagaaggccgggggcaccaccgagaugcucgcgaaggcccugcgcaaggugccgaccgacaacuacaucacgaccuaccccgggcagggccugaacggguacaccgucgaggaggccaagaccgugcucaagaagugcaaguccgccuucuacauccugcccagcaucaucuccaacgagaagcaggagauccugggcaccgugagcuggaaccuccgggagaugcuggcgcacgccgaggagacgcgcaagcugaugcccgucugcguggagaccaaggccaucguguccaccauccagcggaaguacaagggcaucaagauccaggagggggucguggacuacggcgcccgcuucuacuucuacaccagcaagacgaccguggccucccugaucaacacccucaacgaccugaacgagacccuggucacgaugccgcucggguacgugacccacggccugaaccuggaggaggcggcccgguacaugcgcagccucaaggugcccgccaccgucuccgugagcucccccgacgccgugaccgccuacaacggguaccugacgagcuccagcaagacccccgaggagcacuucaucgagaccaucucccuggcgggcagcuacaaggacuggagcuacuccggccagagcacccagcucgggaucgaguuccugaagcggggcgacaaguccgucuacuacacgagcaacccgaccaccuuccaccuggacggggaggugaucaccuucgacaaccucaagacgcugcugucccuccgcgaggugcggaccaucaaggucuucaccaccguggacaacaucaaccugcacacgcagguggucgacaugagcaugaccuacggccagcaguucggccccaccuaccuggacggggccgacgugaccaagaucaagccccacaacucccacgagggcaagacguucuacgugcucccgaacgacgacacccugcgcgucgaggccuucgaguacuaccacaccaccgaccccagcuuccuggggcgguacauguccgcccucaaccacacgaagaaguggaaguacccccaggugaacggccugaccagcaucaagugggccgacaacaacugcuaccuggcgaccgcccuccugacccugcagcagaucgagcucaaguucaaccccccggcccugcaggacgccuacuaccgcgcgcgggccggggaggccgccaacuucugcgcccugauccucgcguacugcaacaagacggugggcgagcugggcgacguccgcgagaccauguccuaccuguuccagcacgccaaccucgacagcugcaagcgggugcugaacgucgugugcaagaccugcgggcagcagcagaccacccugaagggcguggaggccgucauguacauggggacgcucuccuacgagcaguucaagaagggcgugcagauccccugcaccugcgggaagcaggccaccaaguaccuggugcagcaggagagccccuucgucaugauguccgcccccccggcgcaguacgagcugaagcacggcaccuucacgugcgccagcgaguacaccggcaacuaccagugcgggcacuacaagcacaucaccuccaaggagacccucuacugcaucgacggcgcccugcugacgaagagcagcgaguacaaggggcccaucaccgacguguucuacaaggagaacuccuacaccaccacgaucaagcccgugaccuacaagcucgacggcgucgugugcaccgagaucgaccccaagcuggacaacuacuacaagaaggacaacagcuacuucaccgagcagccgaucgaccuggugcccaaccagcccuaccccaacgccuccuucgacaacuucaaguucgucugcgacaacaucaaguucgccgacgaccucaaccagcugacgggguacaagaagccggcgagccgcgagcugaaggugaccuucuuccccgaccucaacggcgacguggucgccaucgacuacaagcacuacacccccuccuucaagaagggcgccaagcugcugcacaagcccaucguguggcacgugaacaacgccaccaacaaggcgacguacaagccgaacaccuggugcauccggugccucuggagcaccaagcccgucgagaccuccaacagcuucgacgugcugaaguccgaggacgcccaggggauggacaaccuggccugcgaggaccucaagcccgugagcgaggaggucguggagaaccccacgauccagaaggacgugcuggagugcaacgucaagaccaccgagguggugggcgacaucauccugaagccggccaacaacucccucaagaucaccgaggaggucgggcacacggaccugauggccgcguacguggacaacagcucccugaccaucaagaagcccaacgagcucagccgcgugcugggccugaagacccucgccacccacgggcuggccgccgucaacuccgugcccugggacacgaucgccaacuacgcgaagccguuccugaacaagguggucagcaccaccaccaacaucgugacgcgcugccucaaccgggugugcaccaacuacaugcccuacuucuucacccugcugcuccagcugugcaccuucacccgcuccacgaacagccggaucaaggccuccaugcccaccaccaucgccaagaacaccgucaagagcgugggcaaguucugccuggaggccagcuucaacuaccucaagucccccaacuucagcaagcugaucaacaucaucaucugguuccugcuccuguccgugugccugggcagccucaucuacuccacggccgcgcuggggguccugaugagcaaccucggcaugccguccuacugcaccggguaccgcgagggcuaccugaacagcaccaacgugaccaucgccacguacugcaccggcuccauccccugcagcgugugccuguccgggcucgacagccuggacaccuaccccucccuggagaccauccagaucacgaucagcuccuucaagugggaccucaccgccuucggccuggucgccgagugguuccuggccuacauccucuucacccgguucuucuacgugcuggggcuggcggccaucaugcagcucuucuucagcuacuucgccgugcacuucaucuccaacagcuggcugauguggcugaucaucaaccugguccagauggcccccaucuccgcgauggugcgcauguacaucuucuucgccagcuucuacuacguguggaagagcuacguccacgugguggacggcugcaacuccagcaccugcaugaugugcuacaagcggaaccgcgccacgcgggucgagugcaccaccaucgugaacgggguccgccgguccuucuacguguacgccaacggcggcaagggguucugcaagcuccacaacuggaacugcgugaacugcgacaccuucugcgccggcagcacguucaucuccgacgaggucgcgcgcgaccugagccugcaguucaagcggccgaucaaccccaccgaccaguccagcuacaucguggacuccgugaccgucaagaacgggagcauccaccucuacuucgacaaggccggccagaagaccuacgagcgccacucccugagccacuucgugaaccuggacaaccuccgggccaacaacacgaaggggucccugcccaucaacgugaucgucuucgacggcaagagcaagugcgaggaguccagcgccaaguccgccagcguguacuacucccagcugaugugccagcccauccuccugcuggaccaggcgcucgugagcgacgucggcgacagcgccgagguggccgugaagauguucgacgccuacgucaacaccuucuccagcaccuucaacgugccgauggagaagcugaagacccugguggccacggcggaggccgagcucgccaagaacgucucccuggacaacgugcugagcacccucaucuccgccgcgcgccagggguucguggacagcgacgucgagaccaaggacgugguggagugccugaagcugucccaccagagcgacaucgaggucaccggcgacuccugcaacaacuacaugcucacguacaacaagguggagaacaugaccccccgggaccugggggccugcaucgacugcagcgcccgccacaucaacgcccagguggccaagucccacaacaucgcgcugaucuggaacgucaaggacuucaugagccucuccgagcagcugcggaagcagauccgcagcgccgccaagaagaacaaccugcccuucaagcucaccugcgccaccacgcgccagguggugaacgucgugaccaccaagaucgcccugaagggcggguga

SEQ ID NO: 17670 - RNA, 5841 nt, Artificial Sequence
  SARS-CoV-2__MT892973.1__non-structural protein 3 (NSP3) CDS gc
auggcccccaccaaggugaccuucggcgacgacacggucaucgaggugcagggguacaagagcgugaacaucaccuucgagcuggacgagcgcaucgacaagguccucaacgagaagugcuccgccuacaccguggagcugggcaccgaggugaacgaguucgcgugcgucguggccgacgccgugaucaagacgcugcagccggucagcgagcuccugaccccccuggggaucgaccucgacgagugguccauggccaccuacuaccuguucgacgagagcggcgaguucaagcuggccucccacauguacugcagcuucuacccccccgacgaggacgaggaggagggggacugcgaggaggaggaguucgagccguccacccaguacgaguacggcacggaggacgacuaccagggcaagccccucgaguucggggcgaccagcgccgcccugcagcccgaggaggagcaggaggaggacuggcuggacgacgacucccagcagaccgugggccagcaggacgggagcgaggacaaccagaccacgaccauccagaccaucguggagguccagccccagcucgagauggagcugaccccgguggugcagacgaucgaggucaacuccuucagcggcuaccugaagcucaccgacaacguguacaucaagaacgccgacaucguggaggaggcgaagaaggucaagcccaccgugguggucaacgccgccaacguguaccugaagcacgggggcggcguggccggggcccugaacaaggcgaccaacaacgccaugcaggucgaguccgacgacuacaucgccacgaacggcccccucaagguggggggcagcugcguccuguccggccacaaccuggccaagcacugccuccacgugguggggcccaacgucaacaagggcgaggacauccagcugcugaagagcgccuacgagaacuucaaccagcacgaggugcuccuggcgccgcugcucuccgccgggaucuucggcgccgaccccauccacagccugcgggugugcgucgacaccgugcgcaccaacguguaccuggccgucuucgacaagaaccucuacgacaagcugguguccagcuuccuggagaugaagagcgagaagcagguggagcagaacaucgccgagauccccaaggaggaggucaagcccuucaucaccgaguccaagccgagcguggagcagcggaagcaggacgacaagaagaucaaggcgugcguggaggaggucacgaccacccucgaggagaccaaguuccugacggagaaccugcuccuguacaucgacaucaacgggaaccugcaccccgacuccgccacccucgugagcgacaucgacaucaccuuccugaagaaggacgcccccuacaucgugggcgacgucgugcaggagggcgugcugaccgccgucgugauccccacgaagaaggccgggggcaccaccgagaugcucgcgaaggcccugcgcaaggugccgaccgacaacuacaucacgaccuaccccgggcagggccugaacggguacaccgucgaggaggccaagaccgugcucaagaagugcaaguccgccuucuacauccugcccagcaucaucuccaacgagaagcaggagauccugggcaccgugagcuggaaccuccgggagaugcuggcgcacgccgaggagacgcgcaagcugaugcccgucugcguggagaccaaggccaucguguccaccauccagcggaaguacaagggcaucaagauccaggagggggucguggacuacggcgcccgcuucuacuucuacaccagcaagacgaccguggccucccugaucaacacccucaacgaccugaacgagacccuggucacgaugccgcucggguacgugacccacggccugaaccuggaggaggcggcccgguacaugcgcagccucaaggugcccgccaccgucuccgugagcucccccgacgccgugaccgccuacaacggguaccugacgagcuccagcaagacccccgaggagcacuucaucgagaccaucucccuggcgggcagcuacaaggacuggagcuacuccggccagagcacccagcucgggaucgaguuccugaagcggggcgacaaguccgucuacuacacgagcaacccgaccaccuuccaccuggacggggaggugaucaccuucgacaaccucaagacgcugcugucccuccgcgaggugcggaccaucaaggucuucaccaccguggacaacaucaaccugcacacgcagguggucgacaugagcaugaccuacggccagcaguucggccccaccuaccuggacggggccgacgugaccaagaucaagccccacaacucccacgagggcaagacguucuacgugcucccgaacgacgacacccugcgcgucgaggccuucgaguacuaccacaccaccgaccccagcuuccuggggcgguacauguccgcccucaaccacacgaagaaguggaaguacccccaggugaacggccugaccagcaucaagugggccgacaacaacugcuaccuggcgaccgcccuccugacccugcagcagaucgagcucaaguucaaccccccggcccugcaggacgccuacuaccgcgcgcgggccggggaggccgccaacuucugcgcccugauccucgcguacugcaacaagacggugggcgagcugggcgacguccgcgagaccauguccuaccuguuccagcacgccaaccucgacagcugcaagcgggugcugaacgucgugugcaagaccugcgggcagcagcagaccacccugaagggcguggaggccgucauguacauggggacgcucuccuacgagcaguucaagaagggcgugcagauccccugcaccugcgggaagcaggccaccaaguaccuggugcagcaggagagccccuucgucaugauguccgcccccccggcgcaguacgagcugaagcacggcaccuucacgugcgccagcgaguacaccggcaacuaccagugcgggcacuacaagcacaucaccuccaaggagacccucuacugcaucgacggcgcccugcugacgaagagcagcgaguacaaggggcccaucaccgacguguucuacaaggagaacuccuacaccaccacgaucaagcccgugaccuacaagcucgacggcgucgugugcaccgagaucgaccccaagcuggacaacuacuacaagaaggacaacagcuacuucaccgagcagccgaucgaccuggugcccaaccagcccuaccccaacgccuccuucgacaacuucaaguucgucugcgacaacaucaaguucgccgacgaccucaaccagcugacgggguacaagaagccggcgagccgcgagcugaaggugaccuucuuccccgaccucaacggcgacguggucgccaucgacuacaagcacuacacccccuccuucaagaagggcgccaagcugcugcacaagcccaucguguggcacgugaacaacgccaccaacaaggcgacguacaagccgaacaucuggugcauccggugccucuggagcaccaagcccgucgagaccuccaacagcuucgacgugcugaaguccgaggacgcccaggggauggacaaccuggccugcgaggaccucaagcccgugagcgaggaggucguggagaaccccaccauccagaaggacgugcuggagugcaacgucaagacgaccgagguggugggcgacaucauccugaagccggccaacaacucccucaagaucaccgaggaggucgggcacaccgaccugauggccgcguacguggacaacagcucccugacgaucaagaagcccaacgagcucagccgcgugcugggccugaagacccucgccacccacgggcuggccgccgucaacuccgugcccugggacaccaucgccaacuacgcgaagccguuccugaacaagguggucagcacgaccaccaacaucgugacccgcugccucaaccgggugugcacgaacuacaugcccuacuucuucacccugcugcuccagcugugcaccuucacccgcuccaccaacagccggaucaaggccuccaugcccacgaccaucgccaagaacaccgucaagagcgugggcaaguucugccuggaggccagcuucaacuaccucaagucccccaacuucagcaagcugaucaacaucaucaucugguuccugcuccuguccgugugccugggcagccucaucuacuccaccgccgcgcuggggguccugaugagcaaccucggcaugccguccuacugcacgggguaccgcgagggcuaccugaacagcaccaacgugaccaucgccaccuacugcacgggcuccauccccugcagcgugugccuguccgggcucgacagccuggacaccuaccccucccuggagaccauccagaucaccaucagcuccuucaagugggaccucacggccuucggccuggucgccgagugguuccuggccuacauccucuucacccgguucuucuacgugcuggggcuggcggccaucaugcagcucuucuucagcuacuucgccgugcacuucaucuccaacagcuggcugauguggcugaucaucaaccugguccagauggcccccaucuccgcgauggugcgcauguacaucuucuucgccagcuucuacuacguguggaagagcuacguccacgugguggacggcugcaacuccagcaccugcaugaugugcuacaagcggaaccgcgccacccgggucgagugcacgaccaucgugaacgggguccgccgguccuucuacguguacgccaacggcggcaagggguucugcaagcuccacaacuggaacugcgugaacugcgacaccuucugcgccggcagcaccuucaucuccgacgaggucgcgcgcgaccugagccugcaguucaagcggccgaucaaccccacggaccaguccagcuacaucguggacuccgugaccgucaagaacgggagcauccaccucuacuucgacaaggccggccagaagaccuacgagcgccacucccugagccacuucgugaaccuggacaaccuccgggccaacaacaccaaggggucccugcccaucaacgugaucgucuucgacggcaagagcaagugcgaggaguccagcgccaaguccgccagcguguacuacucccagcugaugugccagcccauccuccugcuggaccaggcgcucgugagcgacgucggcgacagcgccgagguggccgugaagauguucgacgccuacgucaacacguucuccagcaccuucaacgugccgauggagaagcugaagacccugguggccaccgcggaggccgagcucgccaagaacgucucccuggacaacgugcugagcacguucaucuccgccgcgcgccagggguucguggacagcgacgucgagaccaaggacgugguggagugccucaagcugucccaccagagcgacaucgaggucaccggcgacuccugcaacaacuacaugcugaccuacaacaagguggagaacaugacgccccgggaccucggggccugcaucgacugcagcgcccgccacaucaacgcccagguggccaagucccacaacaucgcgcugaucuggaacgucaaggacuucaugagccuguccgagcagcuccggaagcagauccgcagcgccgccaagaagaacaaccugcccuucaagcugaccugcgccaccacccgccagguggugaacgucgugacgaccaagaucgcccucaagggcggguga

SEQ ID NO: 17671 - RNA, 5841 nt, Artificial Sequence
  SARS-CoV-2__MT892977.1__non-structural protein 3 (NSP3) CDS gc
auggcccccaccaaggugaccuucggcgacgacacggucaucgaggugcagggguacaagagcgugaacaucaccuucgagcuggacgagcgcaucgacaagguccucaacgagaagugcuccgccuacaccguggagcugggcaccgaggugaacgaguucgcgugcgucguggccgacgccgugaucaagacgcugcagccggucagcgagcuccugaccccccuggggaucgaccucgacgagugguccauggccaccuacuaccuguucgacgagagcggcgaguucaagcuggccucccacauguacugcagcuucuacccccccgacgaggacgaggaggagggggacugcgaggaggaggaguucgagccguccacccaguacgaguacggcacggaggacgacuaccagggcaagccccucgaguucggggcgaccagcgccgcccugcagcccgaggaggagcaggaggaggacuggcuggacgacgacucccagcagaccgugggccagcaggacgggagcgaggacaaccagaccacgaccauccagaccaucguggagguccagccccagcucgagauggagcugaccccgguggugcagacgaucgaggucaacuccuucagcggcuaccugaagcucaccgacaacguguacaucaagaacgccgacaucguggaggaggcgaagaaggucaagcccaccgugguggucaacgccgccaacguguaccugaagcacgggggcggcguggccggggcccugaacaaggcgaccaacaacgccaugcaggucgaguccgacgacuacaucgccacgaacggcccccucaagguggggggcagcugcguccuguccggccacaaccuggccaagcacugccuccacgugguggggcccaacgucaacaagggcgaggacauccagcugcugaagagcgccuacgagaacuucaaccagcacgaggugcuccuggcgccgcugcucuccgccgggaucuucggcgccgaccccauccacagccugcgggugugcgucgacaccgugcgcaccaacguguaccuggccgucuucgacaagaaccucuacgacaagcugguguccagcuuccuggagaugaagagcgagaagcagguggagcagaagaucgccgagauccccaaggaggaggucaagcccuucaucaccgaguccaagccgagcguggagcagcggaagcaggacgacaagaagaucaaggcgugcguggaggaggucacgaccacccucgaggagaccaaguuccugacggagaaccugcuccuguacaucgacaucaacgggaaccugcaccccgacuccgccacccucgugagcgacaucgacaucaccuuccugaagaaggacgcccccuacaucgugggcgacgucgugcaggagggcgugcugaccgccgucgugauccccacgaagaaggccgggggcaccaccgagaugcucgcgaaggcccugcgcaaggugccgaccgacaacuacaucacgaccuaccccgggcagggccugaacggguacaccgucgaggaggccaagaccgugcucaagaagugcaaguccgccuucuacauccugcccagcaucaucuccaacgagaagcaggagauccugggcaccgugagcuggaaccuccgggagaugcuggcgcacgccgaggagacgcgcaagcugaugcccgucugcguggagaccaaggccaucguguccaccauccagcggaaguacaagggcaucaagauccaggagggggucguggacuacggcgcccgcuucuacuucuacaccagcaagacgaccguggccucccugaucaacacccucaacgaccugaacgagacccuggucacgaugccgcucggguacgugacccacggccugaaccuggaggaggcggcccgguacaugcgcagccucaaggugcccgccaccgucuccgugagcucccccgacgccgugaccgccuacaacggguaccugacgagcuccagcaagacccccgaggagcacuucaucgagaccaucucccuggcgggcagcuacaaggacuggagcuacuccggccagagcacccagcucgggaucgaguuccugaagcggggcgacaaguccgucuacuacacgagcaacccgaccaccuuccaccuggacggggaggugaucaccuucgacaaccucaagacgcugcugucccuccgcgaggugcggaccaucaaggucuucaccaccguggacaacaucaaccugcacacgcagguggucgacaugagcaugaccuacggccagcaguucggccccaccuaccuggacggggccgacgugaccaagaucaagccccacaacucccacgagggcaagacguucuacgugcucccgaacgacgacacccugcgcgucgaggccuucgaguacuaccacaccaccgacagcuccuuccuggggcgguacaugagcgcccucaaccacacgaagaaguggaaguacccccaggugaacggccugaccuccaucaagugggccgacaacaacugcuaccuggcgaccgcccuccugacccugcagcagaucgagcucaaguucaacccccccgcccugcaggacgccuacuaccgcgcgcgggccggggaggccgccaacuucugcgcccugauccucgcguacugcaacaagacggugggcgagcugggcgacguccgcgagaccaugagcuaccuguuccagcacgccaaccucgacuccugcaagcgggugcugaacgucgugugcaagaccugcgggcagcagcagaccacccugaagggcguggaggccgucauguacauggggacgcucagcuacgagcaguucaagaagggcgugcagaucccgugcaccugcgggaagcaggccaccaaguaccuggugcagcaggagucccccuucgucaugaugagcgccccccccgcgcaguacgagcugaagcacggcaccuucacgugcgccuccgaguacaccggcaacuaccagugcgggcacuacaagcacaucaccagcaaggagacccucuacugcaucgacggcgcccugcugacgaagagcuccgaguacaaggggccgaucaccgacguguucuacaaggagaacagcuacaccaccacgaucaagcccgugaccuacaagcucgacggcgucgugugcaccgagaucgaccccaagcuggacaacuacuacaagaaggacaacuccuacuucaccgagcagcccaucgaccuggugccgaaccagcccuaccccaacgccagcuucgacaacuucaaguucgucugcgacaacaucaaguucgccgacgaccucaaccagcugacgggguacaagaagcccgcgucccgcgagcugaaggugaccuucuucccggaccucaacggcgacguggucgccaucgacuacaagcacuacacccccagcuucaagaagggcgccaagcugcugcacaagcccaucguguggcacgugaacaacgccaccaacaaggcgacguacaagcccaacaccuggugcauccggugccucugguccaccaagccggucgagaccagcaacuccuucgacgugcugaagagcgaggacgcccaggggauggacaaccuggccugcgaggaccucaagcccguguccgaggaggucguggagaaccccacgauccagaaggacgugcuggagugcaacgucaagaccaccgagguggugggcgacaucauccugaagcccgccaacaacagccucaagaucaccgaggaggucgggcacacggaccugauggccgcguacguggacaacuccagccugaccaucaagaagccgaacgagcucucccgcgugcugggccugaagacccucgccacccacgggcuggccgccgucaacagcgugcccugggacacgaucgccaacuacgcgaagcccuucuucaacaagguggucuccaccaccaccaacaucgugacgcgcugccugaaccgggugugcaccaacuacaugccguacuucuucacccuccugcugcagcucugcaccuucacccgcagcacgaacucccggaucaaggccagcaugcccaccaccaucgccaagaacaccgucaagagcgugggcaaguucugccuggaggccuccuucaacuaccugaagagccccaacuucuccaagcucaucaacaucaucaucugguuccugcugcucagcgugugccugggcucccugaucuacagcacggccgcgcucgggguccugauguccaaccugggcaugcccagcuacugcaccggguaccgcgagggcuaccucaacuccaccaacgugaccaucgccacguacugcaccggcagcaucccgugcuccgugugccugagcgggcuggacucccucgacaccuaccccagccuggagaccauccagaucacgaucuccagcuucaagugggaccugaccgccuucggccucgucgccgagugguuccuggccuacauccuguucacccgguucuucuacgugcucgggcuggcggccaucaugcagcuguucuucuccuacuucgccgugcacuucaucagcaacuccuggcucauguggcugaucaucaaccugguccagauggcccccaucagcgcgauggugcgcauguacaucuucuucgccagcuucuacuacguguggaaguccuacguccacgugguggacggcugcaacagcuccaccugcaugaugugcuacaagcggaaccgcgccacgcgggucgagugcaccaccaucgugaacgggguccgccggagcuucuacguguacgccaacggcggcaagggguucugcaagcugcacaacuggaacugcgugaacugcgacaccuucugcgccggcuccacguucaucagcgacgaggucgcgcgcgaccucucccugcaguucaagcggcccaucaacccgaccgaccagagcuccuacaucguggacagcgugaccgucaagaacggguccauccaccuguacuucgacaaggccggccagaagaccuacgagcgccacagccucucccacuucgugaaccuggacaaccugcgggccaacaacacgaaggggagccuccccaucaacgugaucgucuucgacggcaaguccaagugcgaggagagcuccgccaagagcgccuccguguacuacagccagcugaugugccagcccauccugcuccuggaccaggcgcuggugagcgacgucggcgacuccgccgagguggccgugaagauguucgacgccuacgucaacaccuucagcuccaccuucaacgugcccauggagaagcucaagacccugguggccacggcggaggccgagcuggccaagaacgucagccucgacaacgugcuguccaccuucaucagcgccgcgcgccagggguucguggacuccgacgucgagaccaaggacgugguggagugccugaagcucagccaccaguccgacaucgaggucaccggcgacagcugcaacaacuacaugcugacguacaacaagguggagaacaugaccccgcgggaccugggggccugcaucgacugcuccgcccgccacaucaacgcccagguggccaagagccacaacaucgcgcucaucuggaacgucaaggacuucaugucccugagcgagcagcugcggaagcagauccgcuccgccgccaagaagaacaaccuccccuucaagcugaccugcgccaccacgcgccagguggugaacgucgugaccaccaagaucgcccugaagggcggguga

SEQ ID NO: 17672 - RNA, 5841 nt, Artificial Sequence
  SARS-CoV-2__MT892981.1__non-structural protein 3 (NSP3) CDS gc
auggcccccaccaaggugaccuucggcgacgacacggucaucgaggugcagggguacaagagcgugaacaucaccuucgagcuggacgagcgcaucgacaagguccucaacgagaagugcuccgccuacaccguggagcugggcaccgaggugaacgaguucgcgugcgucguggccgacgccgugaucaagacgcugcagccggucagcgagcuccugaccccccuggggaucgaccucgacgagugguccauggccaccuacuaccuguucgacgagagcggcgaguucaagcuggccucccacauguacugcagcuucuacccccccgacgaggacgaggaggagggggacugcgaggaggaggaguucgagccguccacccaguacgaguacggcacggaggacgacuaccagggcaagccccucgaguucggggcgaccagcgccgcccugcagcccgaggaggagcaggaggaggacuggcuggacgacgacucccagcagaccgugggccagcaggacgggagcgaggacaaccagaccacgaccauccagaccaucguggagguccagccccagcucgagauggagcugaccccgguggugcagacgaucgaggucaacuccuucagcggcuaccugaagcucaccgacaacguguacaucaagaacgccgacaucguggaggaggcgaagaaggucaagcccaccgugguggucaacgccgccaacguguaccugaagcacgggggcggcguggccggggcccugaacaaggcgaccaacaacgccaugcaggucgaguccgacgacuacaucgccacgaacggcccccucaagguggggggcagcugcguccuguccggccacaaccuggccaagcacugccuccacgugguggggcccaacgucaacaagggcgaggacauccagcugcugaagagcgccuacgagaacuucaaccagcacgaggugcuccuggcgccgcugcucuccgccgggaucuucggcgccgaccccauccacagccugcgggugugcgucgacaccgugcgcaccaacguguaccuggccgucuucgacaagaaccucuacgacaagcugguguccagcuuccuggagaugaagagcgagaagcagguggagcagaagaucgccgagauccccaaggaggaggucaagcccuucaucaccgaguccaagccgagcguggagcagcggaagcaggacgacaagaagaucaaggcgugcguggaggaggucacgaccacccucgaggagaccaaguuccugacggagaaccugcuccuguacaucgacaucaacgggaaccugcaccccgacuccgccacccucgugagcgacaucgacaucaccuuccugaagaaggacgcccccuacaucgugggcgacgucgugcaggagggcgugcugaccgccgucgugauccccacgaagaaggccgggggcaccaccgagaugcucgcgaaggcccugcgcaaggugccgaccgacaacuacaucacgaccuaccccgggcagggccugaacggguacaccgucgaggaggccaagaccgugcucaagaagugcaaguccgccuucuacauccugcccagcaucaucuccaacgagaagcaggagauccugggcaccgugagcuggaaccuccgggagaugcuggcgcacgccgaggagacgcgcaagcugaugcccgucugcguggagaccaaggccaucguguccaccauccagcggaaguacaagggcaucaagauccaggagggggucguggacuacggcgcccgcuucuacuucuacaccagcaagacgaccguggccucccugaucaacacccucaacgaccugaacgagacccuggucacgaugccgcucggguacgugacccacggccugaaccuggaggaggcggcccgguacaugcgcagccucaaggugcccgccaccgucuccgugagcucccccgacgccgugaccgccuacaacggguaccugacgagcuccagcaagacccccgaggagcacuucaucgagaccaucucccuggcgggcagcuacaaggacuggagcuacuccggccagagcacccagcucgggaucgaguuccugaagcggggcgacaaguccgucuacuacacgagcaacccgaccaccuuccaccuggacggggaggugaucaccuucgacaaccucaagacgcugcugucccuccgcgaggugcggaccaucaaggucuucaccaccguggacaacaucaaccugcacacgcagguggucgacaugagcaugaccuacggccagcaguucggccccaccuaccuggacggggccgacgugaccaagaucaagccccacaacucccacgagggcaagacguucuacgugcucccgaacgacgacacccugcgcgucgaggccuucgaguacuaccacaccaccgaccccagcuuccuggggcgguacauguccgcccucaaccacacgaagaaguggaaguacccccaggugaacggccugaccagcaucaagugggccgacaacaacugcuaccuggcgaccgcccuccugauccugcagcagaucgagcucaaguucaaccccccggcccugcaggacgccuacuaccgcgcgcgggccggggaggccgccaacuucugcgcccugauccucgcguacugcaacaagaccgugggcgagcugggcgacguccgcgagacgauguccuaccuguuccagcacgccaaccucgacagcugcaagcgggugcugaacgucgugugcaagaccugcgggcagcagcagaccacccugaagggcguggaggccgucauguacauggggacccucuccuacgagcaguucaagaagggcgugcagauccccugcacgugcgggaagcaggccaccaaguaccuggugcagcaggagagccccuucgucaugauguccgcccccccggcgcaguacgagcugaagcacggcaccuucaccugcgccagcgaguacacgggcaacuaccagugcgggcacuacaagcacaucaccuccaaggagacccucuacugcaucgacggcgcccugcugaccaagagcagcgaguacaaggggcccaucacggacguguucuacaaggagaacuccuacaccaccaccaucaagcccgugacguacaagcucgacggcgucgugugcaccgagaucgaccccaagcuggacaacuacuacaagaaggacaacagcuacuucaccgagcagccgaucgaccuggugcccaaccagcccuaccccaacgccuccuucgacaacuucaaguucgucugcgacaacaucaaguucgccgacgaccucaaccagcugaccggguacaagaagccggcgagccgcgagcugaaggugacguucuuccccgaccucaacggcgacguggucgccaucgacuacaagcacuacacccccuccuucaagaagggcgccaagcugcugcacaagcccaucguguggcacgugaacaacgccaccaacaaggcgaccuacaagccgaacacguggugcauccggugccucuggagcaccaagcccgucgagaccuccaacagcuucgacgugcugaaguccgaggacgcccaggggauggacaaccuggccugcgaggaccucaagcccgugagcgaggaggucguggagaaccccaccauccagaaggacgugcuggagugcaacgucaagacgaccgagguggugggcgacaucauccugaagccggccaacaacucccucaagaucaccgaggaggucgggcacaccgaccugauggccgcguacguggacaacagcucccugacgaucaagaagcccaacgagcucagccgcgugcugggccugaagacccucgccacccacgggcuggccgccgucaacuccgugcccugggacaccaucgccaacuacgcgaagccguuccugaacaagguggucagcacgaccaccaacaucgugacccgcugccucaaccgggugugcacgaacuacaugcccuacuucuucacccugcugcuccagcugugcaccuucacccgcuccaccaacagccggaucaaggccuccaugcccacgaccaucgccaagaacaccgucaagagcgugggcaaguucugccuggaggccagcuucaacuaccucaagucccccaacuucagcaagcugaucaacaucaucaucugguuccugcuccuguccgugugccugggcagccucaucuacuccaccgccgcgcuggggguccugaugagcaaccucggcaugccguccuacugcacgggguaccgcgagggcuaccugaacagcaccaacgugaccaucgccaccuacugcacgggcuccauccccugcagcgugugccuguccgggcucgacagccuggacaccuaccccucccuggagaccauccagaucaccaucagcuccuucaagugggaccucacggccuucggccuggucgccgagugguuccuggccuacauccucuucacccgguucuucuacgugcuggggcuggcggccaucaugcagcucuucuucagcuacuucgccgugcacuucaucuccaacagcuggcugauguggcugaucaucaaccugguccagauggcccccaucuccgcgauggugcgcauguacaucuucuucgccagcuucuacuacguguggaagagcuacguccacgugguggacggcugcaacuccagcaccugcaugaugugcuacaagcggaaccgcgccacccgggucgagugcacgaccaucgugaacgggguccgccgguccuucuacguguacgccaacggcggcaagggguucugcaagcuccacaacuggaacugcgugaacugcgacaccuucugcgccggcagcaccuucaucuccgacgaggucgcgcgcgaccugagccugcaguucaagcggccgaucaaccccacggaccaguccagcuacaucguggacuccgugaccgucaagaacgggagcauccaccucuacuucgacaaggccggccagaagaccuacgagcgccacucccugagccacuucgugaaccuggacaaccuccgggccaacaacaccaaggggucccugcccaucaacgugaucgucuucgacggcaagagcaagugcgaggaguccagcgccaaguccgccagcguguacuacucccagcugaugugccagcccauccuccugcuggaccaggcgcucgugagcgacgucggcgacagcgccgagguggccgugaagauguucgacgccuacgucaacacguucuccagcaccuucaacgugccgauggagaagcugaagacccugguggccaccgcggaggccgagcucgccaagaacgucucccuggacaacgugcugagcacguucaucuccgccgcgcgccagggguucguggacagcgacgucgagaccaaggacgugguggagugccucaagcugucccaccagagcgacaucgaggucaccggcgacuccugcaacaacuacaugcugaccuacaacaagguggagaacaugacgccccgggaccucggggccugcaucgacugcagcgcccgccacaucaacgcccagguggccaagucccacaacaucgcgcugaucuggaacgucaaggacuucaugagccuguccgagcagcuccggaagcagauccgcagcgccgccaagaagaacaaccugcccuucaagcugaccugcgccaccacccgccagguggugaacgucgugacgaccaagaucgcccucaagggcggguga

SEQ ID NO: 17673 - RNA, 5841 nt, Artificial Sequence
  SARS-CoV-2__MT892982.1__non-structural protein 3 (NSP3) CDS gc
auggcccccaccaaggugaccuucggcgacgacacggucaucgaggugcagggguacaagagcgugaacaucaccuucgagcuggacgagcgcaucgacaagguccucaacgagaagugcuccgccuacaccguggagcugggcaccgaggugaacgaguucgcgugcgucguggccgacgccgugaucaagacgcugcagccggucagcgagcuccugaccccccuggggaucgaccucgacgagugguccauggccaccuacuaccuguucgacgagagcggcgaguucaagcuggccucccacauguacugcagcuucuacccccccgacgaggacgaggaggagggggacugcgaggaggaggaguucgagccguccacccaguacgaguacggcacggaggacgacuaccagggcaagccccucgaguucggggcgaccagcgccgcccugcagcccgaggaggagcaggaggaggacuggcuggacgacgacucccagcagaccgugggccagcaggacgggagcgaggacaaccagaccacgaccauccagaccaucguggagguccagccccagcucgagauggagcugaccccgguggugcagacgaucgaggucaacuccuucagcggcuaccugaagcucaccgacaacguguacaucaagaacgccgacaucguggaggaggcgaagaaggucaagcccaccgugguggucaacgccgccaacguguaccugaagcacgggggcggcguggccggggcccugaacaaggcgaccaacaacgccaugcaggucgaguccgacgacuacaucgccacgaacggcccccucaagguggggggcagcugcguccuguccggccacaaccuggccaagcacugccuccacgugguggggcccaacgucaacaagggcgaggacauccagcugcugaagagcgccuacgagaacuucaaccagcacgaggugcuccuggcgccgcugcucuccgccgggaucuucggcgccgaccccauccacagccugcgggugugcgucgacaccgugcgcaccaacguguaccuggccgucuucgacaagaaccucuacgacaagcugguguccagcuuccuggagaugaagagcgagaagcagguggagcagaagaucgccgagauccccaaggaggaggucaagcccuucaucaccgaguccaagccgagcguggagcagcggaagcaggacgacaagaagaucaaggcgugcguggaggaggucacgaccacccucgaggagaccaaguuccugacggagaaccugcuccuguacaucgacaucaacgggaaccugcaccccgacuccgccacccucgugagcgacaucgacaucaccuuccugaagaaggacgcccccuacaucgugggcgacgucgugcaggagggcgugcugaccgccgucgugauccccacgaagaaggccgggggcaccaccgagaugcucgcgaaggcccugcgcaaggugccgaccgacaacuacaucacgaccuaccccgggcagggccugaacggguacaccgucgaggaggccaagaccgugcucaagaagugcaaguccgccuucuacauccugcccagcaucaucuccaacgagaagcaggagauccugggcaccgugagcuggaaccuccgggagaugcuggcgcacgccgaggagacgcgcaagcugaugcccgucugcguggagaccaaggccaucguguccaccauccagcggaaguacaagggcaucaagauccaggagggggucguggacuacggcgcccgcuucuacuucuacaccagcaagacgaccguggccucccugaucaacacccucaacgaccugaacgagacccuggucacgaugccgcucggguacgugacccacggccugaaccuggaggaggcggcccgguacaugcgcagccucaaggugcccgccaccgucuccgugagcucccccgacgccgugaccgccuacaacggguaccugacgagcuccagcaagacccccgaggagcacuucaucgagaccaucucccuggcgggcagcuacaaggacuggagcuacuccggccagagcacccagcucgggaucgaguuccugaagcggggcgacaaguccgucuacuacacgagcaacccgaccaccuuccaccuggacggggaggugaucaccuucgacaaccucaagacgcugcugucccuccgcgaggugcggaccaucaaggucuucaccaccguggacaacaucaaccugcacacgcagguggucgacaugagcaugaccuacggccagcaguucggccccaccuaccuggacggggccgacgugaccaagaucaagccccacaacucccacgagggcaagacguucuacgugcucccgaacgacgacacccugcgcgucgaggccuucgaguacuaccacaccaccgaccccagcuuccuggggcgguacauguccgcccucaaccacacgaagaaguggaaguacccccaggugaacggccugaccagcaucaagugggccgacaacaacugcuaccuggcgaccgcccuccugacccugcagcagaucgagcucaaguucaaccccccggcccugcaggacgccuacuaccgcgcgcgggccggggaggccgugaacuucugcgcccugauccucgccuacugcaacaagacggucggcgagcugggcgacgugcgcgagaccauguccuaccuguuccagcacgcgaaccucgacagcugcaagcggguccugaacguggugugcaagaccugcgggcagcagcagaccacccugaagggcgucgaggccgugauguacauggggacgcucuccuacgagcaguucaagaagggcgugcagauccccugcaccugcgggaagcaggccaccaaguaccugguccagcaggagagccccuucgugaugauguccgcccccccggcccaguacgagcugaagcacggcaccuucacgugcgcgagcgaguacaccggcaacuaccagugcgggcacuacaagcacaucaccuccaaggagacccucuacugcaucgacggcgcccugcugacgaagagcagcgaguacaaggggcccaucaccgacguguucuacaaggagaacuccuacaccaccacgaucaagcccgucaccuacaagcucgacggcguggugugcaccgagaucgaccccaagcuggacaacuacuacaagaaggacaacagcuacuucaccgagcagccgaucgaccugguccccaaccagcccuaccccaacgccuccuucgacaacuucaaguucgugugcgacaacaucaaguucgccgacgaccucaaccagcugacgggguacaagaagccggccagccgcgagcugaaggugaccuucuuccccgaccucaacggcgacgucguggcgaucgacuacaagcacuacacccccuccuucaagaagggcgccaagcugcugcacaagcccaucguguggcacgucaacaacgccaccaacaaggccacguacaagccgaacaccuggugcauccggugccucuggagcaccaagcccguggagaccuccaacagcuucgacgugcugaaguccgaggacgcgcaggggauggacaaccuggccugcgaggaccucaagcccgucagcgaggaggugguggagaaccccacgauccagaaggacguccuggagugcaacgugaagaccaccgagguggucggcgacaucauccugaagccggccaacaacucccucaagaucaccgaggagguggggcacacggaccugauggccgccuacguggacaacagcucccugaccaucaagaagcccaacgagcucagccgcguccugggccugaagacccucgcgacccacgggcuggccgccgugaacuccgugcccugggacacgaucgccaacuacgccaagccguuccugaacaaggucgugagcaccaccaccaacaucgugacgcgcugccucaaccgggucugcaccaacuacaugcccuacuucuucacccugcugcuccagcugugcaccuucacccgcuccacgaacagccggaucaaggcguccaugcccaccaccaucgccaagaacaccgugaagagcgugggcaaguucugccuggaggccagcuucaacuaccucaagucccccaacuucagcaagcugaucaacaucaucaucugguuccugcuccuguccgucugccugggcagccucaucuacuccacggccgcccugggggugcugaugagcaaccucggcaugccguccuacugcaccggguaccgcgagggcuaccugaacagcaccaacgugaccaucgcgacguacugcaccggcuccauccccugcagcgucugccuguccgggcucgacagccuggacaccuaccccucccuggagaccauccagaucacgaucagcuccuucaagugggaccucaccgccuucggccugguggccgagugguuccuggccuacauccucuucacccgguucuucuacgugcuggggcuggccgcgaucaugcagcucuucuucagcuacuucgccguccacuucaucuccaacagcuggcugauguggcugaucaucaaccuggugcagauggcccccaucuccgccauggugcgcauguacaucuucuucgcgagcuucuacuacgucuggaagagcuacgugcacguggucgacggcugcaacuccagcaccugcaugaugugcuacaagcggaaccgcgccacgcggguggagugcaccaccaucgucaacggggugcgccgguccuucuacguguacgccaacggcggcaagggguucugcaagcuccacaacuggaacugcgucaacugcgacaccuucugcgccggcagcacguucaucuccgacgagguggcccgcgaccugagccugcaguucaagcggccgaucaaccccaccgaccaguccagcuacaucguggacuccgucaccgugaagaacgggagcauccaccucuacuucgacaaggcgggccagaagaccuacgagcgccacucccugagccacuucgugaaccuggacaaccuccgggccaacaacacgaaggggucccugcccaucaacgucaucguguucgacggcaagagcaagugcgaggaguccagcgccaaguccgccagcguguacuacucccagcugaugugccagcccauccuccugcuggaccaggcccucgucagcgacgugggcgacagcgcggagguggccgucaagauguucgacgccuacgugaacaccuucuccagcaccuucaacgugccgauggagaagcugaagacccuggucgccacggccgaggcggagcucgccaagaacgugucccuggacaacgugcugagcaccuucaucuccgccgcccgccagggguucgucgacagcgacguggagaccaaggacguggucgagugccucaagcugucccaccagagcgacaucgaggugaccggcgacuccugcaacaacuacaugcugacguacaacaagguggagaacaugaccccccgggaccucggggcgugcaucgacugcagcgcccgccacaucaacgcccaggucgccaagucccacaacaucgcccugaucuggaacgugaaggacuucaugagccuguccgagcagcuccggaagcagauccgcagcgcggccaagaagaacaaccugcccuucaagcugaccugcgccaccacgcgccagguggucaacguggugaccaccaagaucgcccucaagggcggguga

SEQ ID NO: 17674 - RNA, 5841 nt, Artificial Sequence
  SARS-CoV-2__MT892985.1__non-structural protein 3 (NSP3) CDS gc
auggcccccaccaaggugaccuucggcgacgacacggucaucgaggugcagggguacaagagcgugaacaucaccuucgagcuggacgagcgcaucgacaagguccucaacgagaagugcuccgccuacaccguggagcugggcaccgaggugaacgaguucgcgugcgucguggccgacgccgugaucaagacgcugcagccggucagcgagcuccugaccccccuggggaucgaccucgacgagugguccauggccaccuacuaccuguucgacgagagcggcgaguucaagcuggccucccacauguacugcagcuucuacccccccgacgaggacgaggaggagggggacugcgaggaggaggaguucgagccguccacccaguacgaguacggcacggaguacgacuaccagggcaagccccucgaguucggggcgaccagcgccgcccugcagcccgaggaggagcaggaggaggacuggcuggacgacgacucccagcagaccgugggccagcaggacgggagcgaggacaaccagaccacgaccauccagaccaucguggagguccagccccagcucgagauggagcugaccccgguggugcagacgaucgaggucaacuccuucagcggcuaccugaagcucaccgacaacguguacaucaagaacgccgacaucguggaggaggcgaagaaggucaagcccaccgugguggucaacgccgccaacguguaccugaagcacgggggcggcguggccggggcccugaacaaggcgaccaacaacgccaugcaggucgaguccgacgacuacaucgccacgaacggcccccucaagguggggggcagcugcguccuguccggccacaaccuggccaagcacugccuccacgugguggggcccaacgucaacaagggcgaggacauccagcugcugaagagcgccuacgagaacuucaaccagcacgaggugcuccuggcgccgcugcucuccgccgggaucuucggcgccgaccccauccacagccugcgggugugcgucgacaccgugcgcaccaacguguaccuggccgucuucgacaagaaccucuacgacaagcugguguccagcuuccuggagaugaagagcgagaagcagguggagcagaagaucgccgagauccccaaggaggaggucaagcccuucaucaccgaguccaagccgagcguggagcagcggaagcaggacgacaagaagaucaaggcgugcguggaggaggucacgaccacccucgaggagaccaaguuccugacggagaaccugcuccuguacaucgacaucaacgggaaccugcaccccgacuccgccacccucgugagcgacaucgacaucaccuuccugaagaaggacgcccccuacaucgugggcgacgucgugcaggagggcgugcugaccgccgucgugauccccacgaagaaggccgggggcaccaccgagaugcucgcgaaggcccugcgcaaggugccgaccgacaacuacaucacgaccuaccccgggcagggccugaacggguacaccgucgaggaggccaagaccgugcucaagaagugcaaguccgccuucuacauccugcccagcaucaucuccaacgagaagcaggagauccugggcaccgugagcuggaaccuccgggagaugcuggcgcacgccgaggagacgcgcaagcugaugcccgucugcguggagaccaaggccaucguguccaccauccagcggaaguacaagggcaucaagauccaggagggggucguggacuacggcgcccgcuucuacuucuacaccagcaagacgaccguggccucccugaucaacacccucaacgaccugaacgagacccuggucacgaugccgcucggguacgugacccacggccugaaccuggaggaggcggcccgguacaugcgcagccucaaggugcccgccaccgucuccgugagcucccccgacgccgugaccgccuacaacggguaccugacgagcuccagcaagacccccgaggagcacuucaucgagaccaucucccuggcgggcagcuacaaggacuggagcuacuccggccagagcacccagcucgggaucgaguuccugaagcggggcgacaaguccgucuacuacacgagcaacccgaccaccuuccaccuggacggggaggugaucaccuucgacaaccucaagacgcugcugucccuccgcgaggugcggaccaucaaggucuucaccaccguggacaacaucaaccugcacacgcagguggucgacaugagcaugaccuacggccagcaguucggccccaccuaccuggacggggccgacgugaccaagaucaagccccacaacucccacgagggcaagacguucuacgugcucccgaacgacgacacccugcgcgucgaggccuucgaguacuaccacaccaccgaccccagcuuccuggggcgguacauguccgcccucaaccacacgaagaaguggaaguacccccaggugaacggccugaccagcaucaagugggccgacaacaacugcuaccuggcgaccgcccuccugacccugcagcagaucgagcucaaguucaaccccccggcccugcaggacgccuacuaccgcgcgcgggccggggaggccgccaacuucugcgcccugauccucgcguacugcaacaagacggugggcgagcugggcgacguccgcgagaccauguccuaccuguuccagcacgccaaccucgacagcugcaagcgggugcugaacgucgugugcaagaccugcgggcagcagcagaccacccugaagggcguggaggccgucauguacauggggacgcucuccuacgagcaguucaagaagggcgugcagauccccugcaccugcgggaagcaggccaccaaguaccuggugcagcaggagagccccuucgucaugauguccgcccccccggcgcaguacgagcugaagcacggcaccuucacgugcgccagcgaguacaccggcaacuaccagugcgggcacuacaagcacaucaccuccaaggagacccucuacugcaucgacggcgcccugcugacgaagagcagcgaguacaaggggcccaucaccgacguguucuacaaggagaacuccuacaccaccacgaucaagcccgugaccuacaagcucgacggcgucgugugcaccgagaucgaccccaagcuggacaacuacuacaagaaggacaacagcuacuucaccgagcagccgaucgaccuggugcccaaccagcccuaccccaacgccuccuucgacaacuucaaguucgucugcgacaacaucaaguucgccgacgaccucaaccagcugacgggguacaagaagccggcgagccgcgagcugaaggugaccuucuuccccgaccucaacggcgacguggucgccaucgacuacaagcacuacacccccuccuucaagaagggcgccaagcugcugcacaagcccaucguguggcacgugaacaacgccaccaacaaggcgacguacaagccgaacaccuggugcauccggugccucuggagcaccaagcccgucgagaccuccaacagcuucgacgugcugaaguccgaggacgcccaggggauggacaaccuggccugcgaggaccucaagcccgugagcgaggaggucguggagaaccccacgauccagaaggacgugcuggagugcaacgucaagaccaccgagguggugggcgacaucauccugaagccggccaacaacucccucaagaucaccgaggaggucgggcacacggaccugauggccgcguacguggacaacagcucccugaccaucaagaagcccaacgagcucagccgcgugcugggccugaagacccucgccacccacgggcuggccgccgucaacuccgugcccugggacacgaucgccaacuacgcgaagccguuccugaacaagguggucagcaccaccaccaacaucgugacgcgcugccucaaccgggugugcaccaacuacaugcccuacuucuucacccugcugcuccagcugugcaccuucacccgcuccacgaacagccggaucaaggccuccaugcccaccaccaucgccaagaacaccgucaagagcgugggcaaguucugccuggaggccagcuucaacuaccucaagucccccaacuucagcaagcugaucaacaucaucaucugguuccugcuccuguccgugugccugggcagccucaucuacuccacggccgcgcuggggguccugaugagcaaccucggcaugccguccuacugcaccggguaccgcgagggcuaccugaacagcaccaacgugaccaucgccacguacugcaccggcuccauccccugcagcgugugccuguccgggcucgacagccuggacaccuaccccucccuggagaccauccagaucacgaucagcuccuucaagugggaccucaccgccuucggccuggucgccgagugguuccuggccuacauccucuucacccgguucuucuacgugcuggggcuggcggccaucaugcagcucuucuucagcuacuucgccgugcacuucaucuccaacagcuggcugauguggcugaucaucaaccugguccagauggcccccaucuccgcgauggugcgcauguacaucuucuucgccagcuucuacuacguguggaagagcuacguccacgugguggacggcugcaacuccagcaccugcaugaugugcuacaagcggaaccgcgccacgcgggucgagugcaccaccaucgugaacgggguccgccgguccuucuacguguacgccaacggcggcaagggguucugcaagcuccacaacuggaacugcgugaacugcgacaccuucugcgccggcagcacguucaucuccgacgaggucgcgcgcgaccugagccugcaguucaagcggccgaucaaccccaccgaccaguccagcuacaucguggacuccgugaccgucaagaacgggagcauccaccucuacuucgacaaggccggccagaagaccuacgagcgccacucccugagccacuucgugaaccuggacaaccuccgggccaacaacacgaaggggucccugcccaucaacgugaucgucuucgacggcaagagcaagugcgaggaguccagcgccaaguccgccagcguguacuacucccagcugaugugccagcccauccuccugcuggaccaggcgcucgugagcgacgucggcgacagcgccgagguggccgugaagauguucgacgccuacgucaacaccuucuccagcaccuucaacgugccgauggagaagcugaagacccugguggccacggcggaggccgagcucgccaagaacgucucccuggacaacgugcugagcaccuucaucuccgccgcgcgccagggguucguggacagcgacgucgagaccaaggacgugguggagugccucaagcugucccaccagagcgacaucgaggucaccggcgacuccugcaacaacuacaugcugacguacaacaagguggagaacaugaccccccgggaccucggggccugcaucgacugcagcgcccgccacaucaacgcccagguggccaagucccacaacaucgcgcugaucuggaacgucaaggacuucaugagccuguccgagcagcuccggaagcagauccgcagcgccgccaagaagaacaaccugcccuucaagcugaccugcgccaccacgcgccagguggugaacgucgugaccaccaagaucgcccucaagggcggguga

SEQ ID NO: 17675 - RNA, 5841 nt, Artificial Sequence
  SARS-CoV-2__MT893006.1__non-structural protein 3 (NSP3) CDS gc
auggcccccaccaaggugaccuucggcgacgacacggucaucgaggugcagggguacaagagcgugaacaucaccuucgagcuggacgagcgcaucgacaagguccucaacgagaagugcuccgccuacaccguggagcugggcaccgaggugaacgaguucgcgugcgucguggccgacgccgugaucaagacgcugcagccggucagcgagcuccugaccccccuggggaucgaccucgacgagugguccauggccaccuacuaccuguucgacgagagcggcgaguucaagcuggccucccacauguacugcagcuucuacccccccgacgaggacgaggaggagggggacugcgaggaggaggaguucgagccguccacccaguacgaguacggcacggaggacgacuaccagggcaagccccucgaguucggggcgaccagcgccgcccugcagcccgaggaggagcaggaggaggacuggcuggacgacgacucccagcagaccgugggccagcaggacgggagcgaggacaaccagaccacgaccauccagaccaucguggagguccagccccagcucgagauggagcugaccccgguggugcagacgaucgaggucaacuccuucagcggcuaccugaagcucaccgacaacguguacaucaagaacgccgacaucguggaggaggcgaagaaggucaagcccaccgugguggucaacgccgccaacguguaccugaagcacgggggcggcguggccggggcccugaacaaggcgaccaacaacgccaugcaggucgaguccgacgacuacaucgccacgaacggcccccucaagguggggggcagcugcguccuguccggccacaaccuggccaagcacugccuccacgugguggggcccaacgucaacaagggcgaggacauccagcugcugaagagcgccuacgagaacuucaaccagcacgaggugcuccuggcgccgcugcucuccgccgggaucuucggcgccgaccccauccacagccugcgggugugcgucgacaccgugcgcaccaacguguaccuggccgucuucgacaagaaccucuacgacaagcugguguccagcuuccuggagaugaagagcgagaagcagguggagcagaagaucgccgagauccccaaggaggaggucaagcccuucaucaccgaguccaagccgagcguggagcagcggaagcaggacgacaagaagaucaaggcgugcguggaggaggucacgaccacccucgaggagaccaaguuccugacggagaaccugcuccuguacaucgacaucaacgggaaccugcaccccgacuccgccacccucgugagcgacaucgacaucaccuuccugaagaaggacgcccccuacaucgugggcgacgucgugcaggagggcgugcugaccgccgucgugauccccacgaagaaggccgggggcaccaccgagaugcucgcgaaggcccugcgcaaggugccgaccgacaacuacaucacgaccuaccccgggcagggccugaacggguacaccgucgaggaggccaagaccgugcucaagaagugcaaguccgccuucuacauccugcccagcaucaucuccaacgagaagcaggagauccugggcaccgugagcuggaaccuccgggagaugcuggcgcacgccgaggagacgcgcaagcugaugcccgucugcguggagaccaaggccaucguguccaccauccagcggaaguacaagggcaucaagauccaggagggggucguggacuacggcgcccgcuucuacuucuacaccagcaagacgaccguggccucccugaucaacacccucaacgaccugaacgagacccuggucacgaugccgcucggguacgugacccacggccugaaccuggaggaggcggcccgguacaugcgcagccucaaggugcccgccaccgucuccgugagcucccccgacgccgugaccgccuacaacggguaccugacgagcuccagcaagacccccgaggagcacuucaucgagaccaucucccuggcgggcagcuacaaggacuggagcuacuccggccagagcacccagcucgggaucgaguuccugaagcggggcgacaaguccgucuacuacacgagcaacccgaccaccuuccaccuggacggggaggugaucaccuucgacaaccucaagacgcugcugucccuccgcgaggugcggaccaucaaggucuucaccaccguggacaacaucaaccugcacacgcagguggucgacaugagcaugaccuacggccagcaguucggccccaccuaccuggacggggccgacgugaccaagaucaagccccacaacucccacgagggcaagacguucuacgugcucccgaacgacgacacccugcgcgucgaggccuucgaguacuaccacaccaccgaccccagcuuccuggggcgguacauguccgcccucaaccacacgaagaaguggaaguacccccaggugaacggccugaccagcaucaagugggccgacaacaacugcuaccuggcgaccgcccuccugacccugcagcagaucgagcucaaguucaaccccccggcccugcaggacgccuacuaccgcgcgcgggccggggaggccgccaacuucugcgcccugauccucgcguacugcaacaagacggugggcgagcugggcgacguccgcgagaccauguccuaccuguuccagcacgccaaccucgacagcugcaagcgggugcugaacgucgugugcaagaccugcgggcagcagcagaccacccugaagggcguggaggccgucauguacauggggacgcucuccuacgagcaguucaagaagggcgugcagauccccugcaccugcgggaagcaggccaccaaguaccuggugcagcaggagagccccuucgucaugauguccgcccccccggcgcaguacgagcugaagcacggcaccuucacgugcgccagcgaguacaccggcaacuaccagugcgggcacuacaagcacaucaccuccaaggagacccucuacugcaucgacggcgcccugcugacgaagagcagcgaguacaaggggcccaucaccgacguguucuacaaggagaacuccuacaccaccacgaucaagcccgugaucuacaagcucgacggcgucgugugcaccgagaucgaccccaagcuggacaacuacuacaagaaggacaacagcuacuucaccgagcagccgaucgaccuggugcccaaccagcccuaccccaacgccuccuucgacaacuucaaguucgucugcgacaacaucaaguucgccgacgaccucaaccagcugaccggguacaagaagccggcgagccgcgagcugaaggugacguucuuccccgaccucaacggcgacguggucgccaucgacuacaagcacuacacccccuccuucaagaagggcgccaagcugcugcacaagcccaucguguggcacgugaacaacgccaccaacaaggcgaccuacaagccgaacacguggugcauccggugccucuggagcaccaagcccgucgagaccuccaacagcuucgacgugcugaaguccgaggacgcccaggggauggacaaccuggccugcgaggaccucaagcccgugagcgaggaggucguggagaaccccaccauccagaaggacgugcuggagugcaacgucaagacgaccgagguggugggcgacaucauccugaagccggccaacaacucccucaagaucaccgaggaggucgggcacaccgaccugauggccgcguacguggacaacagcucccugacgaucaagaagcccaacgagcucagccgcgugcugggccugaagacccucgccacccacgggcuggccgccgucaacuccgugcccugggacaccaucgccaacuacgcgaagccguuccugaacaagguggucagcacgaccaccaacaucgugacccgcugccucaaccgggugugcacgaacuacaugcccuacuucuucacccugcugcuccagcugugcaccuucacccgcuccaccaacagccggaucaaggccuccaugcccacgaccaucgccaagaacaccgucaagagcgugggcaaguucugccuggaggccagcuucaacuaccucaagucccccaacuucagcaagcugaucaacaucaucaucugguuccugcuccuguccgugugccugggcagccucaucuacuccaccgccgcgcuggggguccugaugagcaaccucggcaugccguccuacugcacgggguaccgcgagggcuaccugaacagcaccaacgugaccaucgccaccuacugcacgggcuccauccccugcagcgugugccuguccgggcucgacagccuggacaccuaccccucccuggagaccauccagaucaccaucagcuccuucaagugggaccucacggccuucggccuggucgccgagugguuccuggccuacauccucuucacccgguucuucuacgugcuggggcuggcggccaucaugcagcucuucuucagcuacuucgccgugcacuucaucuccaacagcuggcugauguggcugaucaucaaccugguccagauggcccccaucuccgcgauggugcgcauguacaucuucuucgccagcuucuacuacguguggaagagcuacguccacgugguggacggcugcaacuccagcaccugcaugaugugcuacaagcggaaccgcgccacccgggucgagugcacgaccaucgugaacgggguccgccgguccuucuacguguacgccaacggcggcaagggguucugcaagcuccacaacuggaacugcgugaacugcgacaccuucugcgccggcagcaccuucaucuccgacgaggucgcgcgcgaccugagccugcaguucaagcggccgaucaaccccacggaccaguccagcuacaucguggacuccgugaccgucaagaacgggagcauccaccucuacuucgacaaggccggccagaagaccuacgagcgccacucccugagccacuucgugaaccuggacaaccuccgggccaacaacaccaaggggucccugcccaucaacgugaucgucuucgacggcaagagcaagugcgaggaguccagcgccaaguccgccagcguguacuacucccagcugaugugccagcccauccuccugcuggaccaggcgcucgugagcgacgucggcgacagcgccgagguggccgugaagauguucgacgccuacgucaacacguucuccagcaccuucaacgugccgauggagaagcugaagacccugguggccaccgcggaggccgagcucgccaagaacgucucccuggacaacgugcugagcacguucaucuccgccgcgcgccagggguucguggacagcgacgucgagaccaaggacgugguggagugccucaagcugucccaccagagcgacaucgaggucaccggcgacuccugcaacaacuacaugcugaccuacaacaagguggagaacaugacgccccgggaccucggggccugcaucgacugcagcgcccgccacaucaacgcccagguggccaagucccacaacaucgcgcugaucuggaacgucaaggacuucaugagccuguccgagcagcuccggaagcagauccgcagcgccgccaagaagaacaaccugcccuucaagcugaccugcgccaccacccgccagguggugaacgucgugacgaccaagaucgcccucaagggcggguga

SEQ ID NO: 17676 - RNA, 5841 nt, Artificial Sequence
  SARS-CoV-2__MT893010.1__non-structural protein 3 (NSP3) CDS gc
auggcccccaccaaggugaccuucggcgacgacacggucaucgaggugcagggguacaagagcgugaacaucaccuucgagcuggacgaguccaucgacaagguccucaacgagaagugcagcgccuacaccguggagcugggcaccgaggugaacgaguucgcgugcgucguggccgacgccgugaucaagacgcugcagccggucuccgagcuccugaccccccuggggaucgaccucgacgaguggagcauggccaccuacuaccuguucgacgaguccggcgaguucaagcuggccagccacauguacugcuccuucuacccccccgacgaggacgaggaggagggggacugcgaggaggaggaguucgagccgagcacccaguacgaguacggcacggaggacgacuaccagggcaagccccucgaguucggggcgaccuccgccgcccugcagcccgaggaggagcaggaggaggacuggcuggacgacgacagccagcagaccgugggccagcaggacggguccgaggacaaccagaccacgaccauccagaccaucguggagguccagccccagcucgagauggagcugaccccgguggugcagacgaucgaggucaacagcuucuccggcuaccugaagcucaccgacaacguguacaucaagaacgccgacaucguggaggaggcgaagaaggucaagcccaccgugguggucaacgccgccaacguguaccugaagcacgggggcggcguggccggggcccugaacaaggcgaccaacaacgccaugcaggucgagagcgacgacuacaucgccacgaacggcccccucaagguggggggcuccugcguccugagcggccacaaccuggccaagcacugccuccacgugguggggcccaacgucaacaagggcgaggacauccagcugcugaaguccgccuacgagaacuucaaccagcacgaggugcuccuggcgccgcugcucagcgccgggaucuucggcgccgaccccauccacucccugcgcgugugcgucgacaccgugcggaccaacguguaccuggccgucuucgacaagaaccucuacgacaagcuggugagcagcuuccuggagaugaaguccgagaagcagguggagcagaagaucgccgagauccccaaggaggaggucaagcccuucaucaccgagagcaagccguccguggagcagcgcaagcaggacgacaagaagaucaaggcgugcguggaggaggucacgaccacccucgaggagaccaaguuccugacggagaaccugcuccuguacaucgacaucaacgggaaccugcaccccgacagcgccacccucguguccgacaucgacaucaccuuccugaagaaggacgcccccuacaucgugggcgacgucgugcaggagggcgugcugaccgccgucgugauccccacgaagaaggccgggggcaccaccgagaugcucgcgaaggcccugcggaaggugccgaccgacaacuacaucacgaccuaccccgggcagggccugaacggguacaccgucgaggaggccaagaccgugcucaagaagugcaagagcgccuucuacauccugcccuccaucaucagcaacgagaagcaggagauccugggcaccguguccuggaaccuccgcgagaugcuggcgcacgccgaggagacgcggaagcugaugcccgucugcguggagaccaaggccaucgugagcaccauccagcgcaaguacaagggcaucaagauccaggagggggucguggacuacggcgcccgguucuacuucuacaccuccaagacgaccguggccagccugaucaacacccucaacgaccugaacgagacccuggucacgaugccgcucggguacgugacccacggccugaaccuggaggaggcggcccgcuacaugcggucccucaaggugcccgccaccgucagcguguccagccccgacgccgugaccgccuacaacggguaccugacguccagcuccaagacccccgaggagcacuucaucgagaccaucagccuggcgggcagcuacaaggacugguccuacagcggccaguccacccagcucgggaucgaguuccugaagcgcggcgacaagagcgucuacuacacguccaacccgaccaccuuccaccuggacggggaggugaucaccuucgacaaccucaagacgcugcugagccuccgggaggugcgcaccaucaaggucuucaccaccguggacaacaucaaccugcacacgcagguggucgacauguccaugaccuacggccagcaguucggccccaccuaccuggacggggccgacgugaccaagaucaagccccacaacagccacgagggcaagacguucuacgugcucccgaacgacgacacccugcgggucgaggccuucgaguacuaccacaccaccgaccccuccuuccuggggcgcuacaugagcgcccucaaccacacgaagaaguggaaguacccccaggugaacggccugaccuccaucaagugggccgacaacaacugcuaccuggcgaccgcccuccugacccugcagcagaucgagcucaaguucaaccccccggcccugcaggacgccuacuaccgggcgcgcgccggggaggccgccaacuucugcgcccugauccucgcguacugcaacaagacggugggcgagcugggcgacguccgggagaccaugagcuaccuguuccagcacgccaaccucgacuccugcaagcgcgugcugaacgucgugugcaagaccugcgggcagcagcagaccacccugaagggcguggaggccgucauguacauggggacgcucagcuacgagcaguucaagaagggcgugcagauccccugcaccugcgggaagcaggccaccaaguaccuggugcagcaggagucccccuucgucaugaugagcgcccccccggcgcaguacgagcugaagcacggcaccuucacgugcgccuccgaguacaccggcaacuaccagugcgggcacuacaagcacaucaccagcaaggagacccucuacugcaucgacggcgcccugcugacgaagagcuccgaguacaaggggcccaucaccgacguguucuacaaggagaacagcuacaccaccacgaucaagcccgugaccuacaagcucgacggcgucgugugcaccgagaucgaccccaagcuggacaacuacuacaagaaggacaacuccuacuucaccgagcagccgaucgaccuggugcccaaccagcccuaccccaacgccagcuucgacaacuucaaguucgucugcgacaacaucaaguucgccgacgaccucaaccagcugacgggguacaagaagccggcgucccgggagcugaaggugaccuucuuccccgaccucaacggcgacguggucgccaucgacuacaagcacuacacccccagcuucaagaagggcgccaagcugcugcacaagcccaucguguggcacgugaacaacgccaccaacaaggcgacguacaagccgaacaccuggugcauccgcugccucugguccaccaagcccgucgagaccagcaacuccuucgacgugcugaagagcgaggacgcccaggggauggacaaccuggccugcgaggaccucaagcccguguccgaggaggucguggagaaccccacgauccagaaggacgugcuggagugcaacgucaagaccaccgagguggugggcgacaucauccugaagccggccaacaacagccucaagaucaccgaggaggucgggcacacggaccugauggccgcguacguggacaacuccagccugaccaucaagaagcccaacgagcucucccgggugcugggccugaagacccucgccacccacgggcuggccgccgucaacagcgugcccugggacacgaucgccaacuacgcgaagccguuccugaacaagguggucuccaccaccaccaacaucgugacgcgcugccucaaccgcgugugcaccaacuacaugcccuacuucuucacccugcugcuccagcugugcaccuucacccggagcacgaacucccgcaucaaggccagcaugcccaccaccaucgccaagaacaccgucaagagcgugggcaaguucugccuggaggccuccuucaacuaccucaagagccccaacuucuccaagcugaucaacaucaucaucugguuccugcuccugagcgugugccugggcucccucaucuacagcacggccgcgcuggggguccugauguccaaccucggcaugccgagcuacugcaccggguaccgggagggcuaccugaacuccaccaacgugaccaucgccacguacugcaccggcagcauccccugcuccgugugccugagcgggcucgacucccuggacaccuaccccagccuggagaccauccagaucacgaucuccagcuucaagugggaccucaccgccuucggccuggucgccgagugguuccuggccuacauccucuucacccgcuucuucuacgugcuggggcuggcggccaucaugcagcucuucuucuccuacuucgccgugcacuucaucagcaacuccuggcugauguggcugaucaucaaccugguccagauggcccccaucagcgcgauggugcggauguacaucuucuucgccagcuucuacuacguguggaaguccuacguccacgugguggacggcugcaacagcuccaccugcaugaugugcuacaagcgcaaccgggccacgcgcgucgagugcaccaccaucgugaacgggguccggcgcagcuucuacguguacgccaacggcggcaagggguucugcaagcuccacaacuggaacugcgugaacugcgacaccuucugcgccggcuccacguucaucagcgacgaggucgcgcgggaccugucccugcaguucaagcgcccgaucaaccccaccgaccagagcuccuacaucguggacagcgugaccgucaagaacggguccauccaccucuacuucgacaaggccggccagaagaccuacgagcggcacagccugucccacuucgugaaccuggacaaccuccgcgccaacaacacgaaggggagccugcccaucaacgugaucgucuucgacggcaaguccaagugcgaggagagcuccgccaagagcgccuccguguacuacagccagcugaugugccagcccauccuccugcuggaccaggcgcucgugagcgacgucggcgacuccgccgagguggccgugaagauguucgacgccuacgucaacaccuucagcuccaccuucaacgugccgauggagaagcugaagacccugguggccacggcggaggccgagcucgccaagaacgucagccuggacaacgugcuguccaccuucaucagcgccgcgcggcagggguucguggacuccgacgucgagaccaaggacgugguggagugccucaagcugagccaccaguccgacaucgaggucaccggcgacagcugcaacaacuacaugcugacguacaacaagguggagaacaugaccccccgcgaccucggggccugcaucgacugcuccgcccggcacaucaacgcccagguggccaagagccacaacaucgcgcugaucuggaacgucaaggacuucaugucccugagcgagcagcuccgcaagcagauccgguccgccgccaagaagaacaaccugcccuucaagcugaccugcgccaccacgcgccagguggugaacgucgugaccaccaagaucgcccucaagggcggguga

SEQ ID NO: 17677 - RNA, 5841 nt, Artificial Sequence
  SARS-CoV-2__MT893018.1__non-structural protein 3 (NSP3) CDS gc
auggcccccaccaaggugaccuucggcgacgacacggucaucgaggugcagggguacaagagcgugaacaucaccuucgagcuggacgagcgcaucgacaagguccucaacgagaagugcuccgccuacaccguggagcugggcaccgaggugaacgaguucgcgugcgucguggccgacgccgugaucaagacgcugcagccggucagcgagcuccugaccccccuggggaucgaccucgacgagugguccauggccaccuacuaccuguucgacgagagcggcgaguucaagcuggccucccacauguacugcagcuucuacccccccgacgaggacgaggaggagggggacugcgaggaggaggaguucgagccguccacccaguacgaguacggcacggaggacgacuaccagggcaagccccucgaguucggggcgaccagcgccgcccugcagcccgaggaggagcaggaggaggacuggcuggacgacgacucccagcagaccgugggccagcaggacgggagcgaggacaaccagaccacgaccauccagaccaucguggagguccagccccagcucgagauggagcugaccccgguggugcagacgaucgaggucaacuccuucagcggcuaccugaagcucaccgacaacguguacaucaagaacgccgacaucguggaggaggcgaagaaggucaagcccaccgugguggucaacgccgccaacguguaccugaagcacgggggcggcguggccggggcccugaacaaggcgaccaacaacgccaugcaggucgaguccgacgacuacaucgccacgaacggcccccucaagguggggggcagcugcguccuguccggccacaaccuggccaagcacugccuccacgugguggggcccaacgucaacaagggcgaggacauccagcugcugaagagcgccuacgagaacuucaaccagcacgaggugcuccuggcgccgcugcucuccgccgggaucuucggcgccgaccccauccacagccugcgggugugcgucgacaccgugcgcaccaacguguaccuggccgucuucgacaagaaccucuacgacaagcugguguccagcuuccuggagaugaagagcgagaagcagguggagcagaagaucgccgagauccccaaggaggaggucaagcccuucaucaccgaguccaagccgagcguggagcagcggaagcaggacgacaagaagaucaaggcgugcguggaggaggucacgaccacccucgaggagaccaaguuccugacggagaaccugcuccuguacaucgacaucaacgggaaccugcaccccgacuccgccacccucgugagcgacaucgacaucaccuuccugaagaaggacgcccccuacaucgugggcgacgucgugcaggagggcgugcugaccgccgucgugauccccacgaagaaggccgggggcaccaccgagaugcucgcgaaggcccugcgcaaggugccgaccgacaacuacaucacgaccuaccccgggcagggccugaacggguacaccgucgaggaggccaagaccgugcucaagaagugcaaguccgccuucuacauccugcccagcaucaucuccaacgagaagcaggagauccugggcaccgugagcuggaaccuccgggagaugcuggcgcacgccgaggagacgcgcaagcugaugcccgucugcguggagaccaaggccaucguguccaccauccagcggaaguacaagggcaucaagauccaggagggggucguggacuacggcgcccgcuucuacuucuacaccagcaagacgaccguggccucccugaucaacacccucaacgaccugaacgagacccuggucacgaugccgcucggguacgugacccacggccugaaccuggaggaggcggcccgguacaugcgcagccucaaggugcccgccaccgucuccgugagcucccccgacgccgugaccgccuacaacggguaccugacgagcuccagcaagacccccgaggagcacuucaucgagaccaucucccuggcgggcagcuacaaggacuggagcuacuccggccagagcacccagcucgggaucgaguuccugaagcggggcgacaaguccgucuacuacacgagcaacccgaccaccuuccaccuggacggggaggugaucaccuucgacaaccucaagacgcugcugucccuccgcgaggugcggaccaucaaggucuucaccaccguggacaacaucaaccugcacacgcagguggucgacaugagcaugaccuacggccagcaguucggccccaccuaccuggacggggccgacgugaccaagaucaagccccacaacucccacgagggcaagacguucuacgugcucccgaacgacgacauccugcgcgucgaggccuucgaguacuaccacaccaccgaccccagcuuccuggggcgguacauguccgcccucaaccacaccaagaaguggaaguacccccaggugaacggccugacgagcaucaagugggccgacaacaacugcuaccuggcgaccgcccuccugacccugcagcagaucgagcucaaguucaaccccccggcccugcaggacgccuacuaccgcgcgcgggccggggaggccgccaacuucugcgcccugauccucgcguacugcaacaagaccgugggcgagcugggcgacguccgcgagacgauguccuaccuguuccagcacgccaaccucgacagcugcaagcgggugcugaacgucgugugcaagaccugcgggcagcagcagaccacccugaagggcguggaggccgucauguacauggggacccucuccuacgagcaguucaagaagggcgugcagauccccugcacgugcgggaagcaggccaccaaguaccuggugcagcaggagagccccuucgucaugauguccgcccccccggcgcaguacgagcugaagcacggcaccuucaccugcgccagcgaguacacgggcaacuaccagugcgggcacuacaagcacaucaccuccaaggagacccucuacugcaucgacggcgcccugcugaccaagagcagcgaguacaaggggcccaucacggacguguucuacaaggagaacuccuacaccaccaccaucaagcccgugacguacaagcucgacggcgucgugugcaccgagaucgaccccaagcuggacaacuacuacaagaaggacaacagcuacuucaccgagcagccgaucgaccuggugcccaaccagcccuaccccaacgccuccuucgacaacuucaaguucgucugcgacaacaucaaguucgccgacgaccucaaccagcugaccggguacaagaagccggcgagccgcgagcugaaggugacguucuuccccgaccucaacggcgacguggucgccaucgacuacaagcacuacacccccuccuucaagaagggcgccaagcugcugcacaagcccaucguguggcacgugaacaacgccaccaacaaggcgaccuacaagccgaacacguggugcauccggugccucuggagcaccaagcccgucgagaccuccaacagcuucgacgugcugaaguccgaggacgcccaggggauggacaaccuggccugcgaggaccucaagcccgugagcgaggaggucguggagaaccccaccauccagaaggacgugcuggagugcaacgucaagacgaccgagguggugggcgacaucauccugaagccggccaacaacucccucaagaucaccgaggaggucgggcacaccgaccugauggccgcguacguggacaacagcucccugacgaucaagaagcccaacgagcucagccgcgugcugggccugaagacccucgccacccacgggcuggccgccgucaacuccgugcccugggacaccaucgccaacuacgcgaagccguuccugaacaagguggucagcacgaccaccaacaucgugacccgcugccucaaccgggugugcacgaacuacaugcccuacuucuucacccugcugcuccagcugugcaccuucacccgcuccaccaacagccggaucaaggccuccaugcccacgaccaucgccaagaacaccgucaagagcgugggcaaguucugccuggaggccagcuucaacuaccucaagucccccaacuucagcaagcugaucaacaucaucaucugguuccugcuccuguccgugugccugggcagccucaucuacuccaccgccgcgcuggggguccugaugagcaaccucggcaugccguccuacugcacgggguaccgcgagggcuaccugaacagcaccaacgugaccaucgccaccuacugcacgggcuccauccccugcagcgugugccuguccgggcucgacagccuggacaccuaccccucccuggagaccauccagaucaccaucagcuccuucaagugggaccucacggccuucggccuggucgccgagugguuccuggccuacauccucuucacccgguucuucuacgugcuggggcuggcggccaucaugcagcucuucuucagcuacuucgccgugcacuucaucuccaacagcuggcugauguggcugaucaucaaccugguccagauggcccccaucuccgcgauggugcgcauguacaucuucuucgccagcuucuacuacguguggaagagcuacguccacgugguggacggcugcaacuccagcaccugcaugaugugcuacaagcggaaccgcgccacccgggucgagugcacgaccaucgugaacgggguccgccgguccuucuacguguacgccaacggcggcaagggguucugcaagcuccacaacuggaacugcgugaacugcgacaccuucugcgccggcagcaccuucaucuccgacgaggucgcgcgcgaccugagccugcaguucaagcggccgaucaaccccacggaccaguccagcuacaucguggacuccgugaccgucaagaacgggagcauccaccucuacuucgacaaggccggccagaagaccuacgagcgccacucccugagccacuucgugaaccuggacaaccuccgggccaacaacaccaaggggucccugcccaucaacgugaucgucuucgacggcaagagcaagugcgaggaguccagcgccaaguccgccagcguguacuacucccagcugaugugccagcccauccuccugcuggaccaggcgcucgugagcgacgucggcgacagcgccgagguggccgugaagauguucgacgccuacgucaacacguucuccagcaccuucaacgugccgauggagaagcugaagacccugguggccaccgcggaggccgagcucgccaagaacgucucccuggacaacgugcugagcacguucaucuccgccgcgcgccagggguucguggacagcgacgucgagaccaaggacgugguggagugccucaagcugucccaccagagcgacaucgaggucaccggcgacuccugcaacaacuacaugcugaccuacaacaagguggagaacaugacgccccgggaccucggggccugcaucgacugcagcgcccgccacaucaacgcccagguggccaagucccacaacaucgcgcugaucuggaacgucaaggacuucaugagccuguccgagcagcuccggaagcagauccgcagcgccgccaagaagaacaaccugcccuucaagcugaccugcgccaccacccgccagguggugaacgucgugacgaccaagaucgcccucaagggcggguga

SEQ ID NO: 17678 - RNA, 5841 nt, Artificial Sequence
  SARS-CoV-2__MT889692.1__non-structural protein 3 (NSP3) CDS gc
auggcccccaccaaggugaccuucggcgacgacacggucaucgaggugcagggguacaagagcgugaacaucaccuucgagcuggacgagcgcaucgacaagguccucaacgagaagugcuccgccuacaccguggagcugggcaccgaggugaacgaguucgcgugcgucguggccgacgccgugaucaagacgcugcagccggucagcgagcuccugaccccccuggggaucgaccucgacgagugguccauggccaccuacuaccuguucgacgagagcggcgaguucaagcuggccucccacauguacugcagcuucuacccccccgacgaggacgaggaggagggggacugcgaggaggaggaguucgagccguccacccaguacgaguacggcacggaggacgacuaccagggcaagccccucgaguucggggcgaccagcgccgcccugcagcccgaggaggagcaggaggaggacuggcuggacgacgacucccagcagaccgugggccagcaggacgggagcgaggacaaccagaccacgaccauccagaccaucguggagguccagccccagcucgagauggagcugaccccgguggugcagacgaucgaggucaacuccuucagcggcuaccugaagcucaccgacaacguguacaucaagaacgccgacaucguggcggaggccaccaaggucaagcccaccgugguggucaacgccgccaacguguaccugaagcacgggggcggcguggccggggcgcugaacaaggccacgaacaacgccaugcaggucgaguccgacgacuacaucgccaccaacggcccccucaagguggggggcagcugcguccuguccggccacaaccuggccaagcaccggcuccacgugguggggcccaacgucaacaagggcgaggacauccagcugcugaagagcgcguacgagaacuucaaccagcacgaggugcuccuggccccgcugcucuccgccgggaucuucggcgccgaccccauccacagccugcgcgugugcgucgacaccgugcggaccaacguguaccuggccgucuucgacaagaaccucuacgacaagcugguguccagcuuccuggagaugaagagcgagaagcagguggagcagaagaucgcggagauccccaaggaggaggucaagcccuucaucacggaguccaagccgagcguggagcagcgcaagcaggacgacaagaagaucaaggccugcguggaggaggucaccaccacccucgaggagacgaaguuccugaccgagaaccugcuccuguacaucgacaucaacgggaaccugcaccccgacuccgccacccucgugagcgacaucgacaucaccuuccugaagaaggacgcccccuacaucgugggcgacgucgugcaggagggcgugcugacggccgucgugauccccaccaagaaggcggggggcaccaccgagaugcucgccaaggcccugcggaaggugccgacggacaacuacaucaccaccuaccccgggcagggccugaacggguacaccgucgaggaggccaagaccgugcucaagaagugcaaguccgcguucuacauccugcccagcaucaucuccaacgagaagcaggagauccugggcacggugagcuggaaccuccgcgagaugcuggcccacgccgaggagacccggaagcugaugcccgucugcguggagaccaaggccaucguguccaccauccagcgcaaguacaagggcaucaagauccaggagggggucguggacuacggcgcccgguucuacuucuacacgagcaagaccaccguggcgucccugaucaacacccucaacgaccugaacgagacgcuggucaccaugccgcucggguacgugacccacggccugaaccuggaggaggccgcccgcuacaugcggagccucaaggugcccgccaccgucuccgugagcucccccgacgccgugacggcguacaacggguaccugaccagcuccagcaagacccccgaggagcacuucaucgagaccaucucccuggccggcagcuacaaggacuggagcuacuccggccagagcacgcagcucgggaucgaguuccugaagcgcggcgacaaguccgucuacuacaccagcaacccgaccaccuuccaccuggacggggaggugaucacguucgacaaccucaagacccugcugucccuccgggaggugcgcaccaucaaggucuucaccacgguggacaacaucaaccugcacacccagguggucgacaugagcaugaccuacggccagcaguucggccccaccuaccuggacggggccgacgugacgaagaucaagccccacaacucccacgagggcaagaccuucuacgugcucccgaacgacgacacccugcgggucgaggccuucgaguacuaccacaccacggaccccagcuuccuggggcgcuacauguccgcccucaaccacaccaagaaguggaaguacccccaggugaacggccugaccagcaucaagugggcggacaacaacugcuaccuggccaccgcccuccugacgcugcagcagaucgagcucaaguucaaccccccggcccugcaggacgcguacuaccgggcccgcgccggggaggccgccaacuucugcgcgcugauccucgccuacugcaacaagaccgugggcgagcugggcgacguccgggagaccauguccuaccuguuccagcacgccaaccucgacagcugcaagcgcgugcugaacgucgugugcaagaccugcgggcagcagcagaccacgcugaagggcguggaggccgucauguacauggggacccucuccuacgagcaguucaagaagggcgugcagauccccugcaccugcgggaagcaggccaccaaguaccuggugcagcaggagagccccuucgucaugauguccgcgcccccggcccaguacgagcugaagcacggcacguucaccugcgccagcgaguacaccggcaacuaccagugcgggcacuacaagcacaucaccuccaaggagacgcucuacugcaucgacggcgcccugcugaccaagagcagcgaguacaaggggcccaucaccgacguguucuacaaggagaacuccuacaccacgaccaucaagcccgugaccuacaagcucgacggcgucgugugcaccgagaucgaccccaagcuggacaacuacuacaagaaggacaacagcuacuucacggagcagccgaucgaccuggugcccaaccagcccuaccccaacgccuccuucgacaacuucaaguucgucugcgacaacaucaaguucgcggacgaccucaaccagcugaccggguacaagaagccggccagccgggagcugaaggugaccuucuuccccgaccucaacggcgacguggucgccaucgacuacaagcacuacacccccuccuucaagaagggcgccaagcugcugcacaagcccaucguguggcacgugaacaacgcgacgaacaaggccaccuacaagccgaacaccuggugcauccgcugccucuggagcaccaagcccgucgagacguccaacagcuucgacgugcugaaguccgaggacgcccaggggauggacaaccuggccugcgaggaccucaagcccgugagcgaggaggucguggagaaccccaccauccagaaggacgugcuggagugcaacgucaagaccaccgagguggugggcgacaucauccugaagccggccaacaacucccucaagaucacggaggaggucgggcacaccgaccugauggcggccuacguggacaacagcucccugaccaucaagaagcccaacgagcucagccgcgugcugggccugaagacccucgccacgcacgggcuggccgccgucaacuccgugcccugggacaccaucgcgaacuacgccaagccguuccugaacaagguggucagcaccaccacgaacaucgugacccucugccugaaccgggugugcaccaacuacaugcccuacuucuucacccugcuccugcagcugugcaccuucacgcgcuccaccaacagccggaucaaggccuccaugcccaccaccaucgccaagaacacggucaagagcgugggcaaguucugccucgaggccagcuucaacuaccugaagucccccaacuucagcaagcugaucaacaucaucaucugguuccuccugcuguccgugugccucggcagccugaucuacuccaccgcggcccuggggguccucaugagcaaccugggcaugccguccuacugcaccggguaccgcgagggcuaccugaacagcaccaacgugacgaucgccaccuacugcaccggcuccauccccugcagcgugugccucuccgggcuggacagccuggacaccuaccccucccucgagacgauccagaucaccaucagcuccuucaagugggaccugaccgccuucggccuggucgccgagugguuccucgcguacauccuguucacccgguucuucuacgugcuggggcucgccgccaucaugcagcuguucuucagcuacuucgccgugcacuucaucuccaacagcuggcugauguggcugaucaucaaccucguccagauggcgcccaucuccgccauggugcgcauguacaucuucuucgccagcuucuacuacguguggaagagcuacguccacgugguggacggcugcaacuccagcacgugcaugaugugcuacaagcggaaccgcgccacccgggucgagugcaccaccaucgugaacgggguccgccgguccuucuacguguacgccaacggcggcaagggguucugcaagcugcacaacuggaacugcgugaacugcgacacguucugcgcgggcagcaccuucaucuccgacgaggucgcccgcgaccugagccuccaguucaagcggccgaucaaccccaccgaccaguccagcuacaucguggacuccgugaccgucaagaacgggagcauccaccuguacuucgacaaggccggccagaagacguacgagcgccacucccugagccacuucgugaaccucgacaaccugcgggccaacaacaccaaggggucccugcccaucaacgugaucgucuucgacggcaagagcaagugcgaggaguccagcgccaaguccgcgagcguguacuacucccagcucaugugccagcccauccugcugcucgaccaggcccuggugagcgacgucggcgacagcgccgagguggccgugaagauguucgacgccuacgucuccaccuucagcuccaccuucaacgugccgauggagaagcugaagacgcucguggcgaccgccgaggccgagcuggccaagaacgucagccuggacaacgugcucuccaccuucaucagcgcggcccgccagggguucguggacuccgacgucgagaccaaggacgugguggagugccugaagcugagccaccaguccgacaucgaggucacgggcgacagcugcaacaacuacaugcucaccuacaacaagguggagaacaugaccccccgggaccugggggccugcaucgacugcuccgcccgccacaucaacgcccagguggcgaagagccacaacaucgcccugaucuggaacgucaaggacuucaugucccucagcgagcagcugcggaagcagauccgcuccgccgccaagaagaacaaccugcccuucaagcucaccugcgccacgacccgccagguggugaacgucgugaccaccaagaucgcgcugaagggcggguga

SEQ ID NO: 17679 - RNA, 5841 nt, Artificial Sequence
  SARS-CoV-2__MT883499.1__non-structural protein 3 (NSP3) CDS gc
auggcccccaccaaggugaccuucggcgacgacacggucaucgaggugcagggguacaagagcgugaacaucaccuucgagcuggacgagcgcaucgacaagguccucaacgagaagugcuccgccuacaccguggagcugggcaccgaggugaacgaguucgcgugcgucguggccgacgccgugaucaagacgcugcagccggucagcgagcuccugaccccccuggggaucgaccucgacgagugguccauggccaccuacuaccuguucgacgagagcggcgaguucaagcuggccucccacauguacugcagcuucuacccccccgacgaggacgaggaggagggggacugcgaggaggaggaguucgagccguccacccaguacgaguacggcacggaggacgacuaccagggcaagccccucgaguucggggcgaccagcgccgcccugcagcccgaggaggagcaggaggaggacuggcuggacgacgacucccagcagaccgugggccagcaggacgggagcgaggacaaccagaccacgaccauccagaccaucguggagguccagccccagcucgagauggagcugaccccgguggugcagacgaucgaggucaacuccuucagcggcuaccugaagcucaccgacaacguguacaucaagaacgccgacaucguggaggaggcgaagaaggucaagcccaccgugguggucaacgccgccaacguguaccugaagcacgggggcggcguggccggggcccugaacaaggcgaccaacaacgccaugcaggucgaguccgacgacuacaucgccacgaacggcccccucaagguggggggcagcugcguccuguccggccacaaccuggccaagcacugccuccacgugguggggcccaacgucaacaagggcgaggacauccagcugcugaagagcgccuacgagaacuucaaccagcacgaggugcuccuggcgccgcugcucuccgccgggaucuucggcgccgaccccauccacagccugcgggugugcgucgacaccgugcgcaccaacguguaccuggccgucuucgacaagaaccucuacgacaagcugguguccagcuuccuggagaugaagagcgagaagcagguggagcagaagaucgccgagauccccaaggaggaggucaagcccuucaucaccgaguccaagccgagcguggagcagcggaagcaggacgacaagaagaucaaggcgugcguggaggaggucacgaccacccucgaggagaucaaguuccugaccgagaaccugcuccuguacaucgacaucaacgggaaccugcaccccgacuccgccacgcucgugagcgacaucgacaucaccuuccugaagaaggacgcccccuacaucgugggcgacgucgugcaggagggcgugcugaccgccgucgugauccccaccaagaaggccgggggcacgaccgagaugcucgcgaaggcccugcgcaaggugccgaccgacaacuacaucaccacguaccccgggcagggccugaacggguacaccgucgaggaggccaagaccgugcucaagaagugcaaguccgccuucuacauccugcccagcaucaucuccaacgagaagcaggagauccugggcaccgugagcuggaaccuccgggagaugcuggcgcacgccgaggagacccgcaagcugaugcccgucugcguggagacgaaggccaucguguccaccauccagcggaaguacaagggcaucaagauccaggagggggucguggacuacggcgcccgcuucuacuucuacaccagcaagaccacgguggccucccugaucaacacccucaacgaccugaacgagacccuggucaccaugccgcucggguacgugacgcacggccugaaccuggaggaggcggcccgguacaugcgcagccucaaggugcccgccaccgucuccgugagcucccccgacgccgugaccgccuacaacggguaccugaccagcuccagcaagacgcccgaggagcacuucaucgagaccaucucccuggcgggcagcuacaaggacuggagcuacuccggccagagcacccagcucgggaucgaguuccugaagcggggcgacaaguccgucuacuacaccagcaacccgacgaccuuccaccuggacggggaggugaucaccuucgacaaccucaagacccugcugucccuccgcgaggugcggacgaucaaggucuucaccaccguggacaacaucaaccugcacacccagguggucgacaugagcaugacguacggccagcaguucggccccaccuaccuggacggggccgacgugaccaagaucaagccccacaacucccacgagggcaagaccuucuacgugcucccgaacgacgacacgcugcgcgucgaggccuucgaguacuaccacaccaccgaccccagcuuccuggggcgguacauguccgcccucaaccacaccaagaaguggaaguacccccaggugaacggccugacgagcaucaagugggccgacaacaacugcuaccuggcgaccgcccuccugacccugcagcagaucgagcucaaguucaaccccccggcccugcaggacgccuacuaccgcgcgcgggccggggaggccgccaacuucugcgcccugauccucgcguacugcaacaagaccgugggcgagcugggcgacguccgcgagacgauguccuaccuguuccagcacgccaaccucgacagcugcaagcgggugcugaacgucgugugcaagaccugcgggcagcagcagaccacccugaagggcguggaggccgucauguacauggggacccucuccuacgagcaguucaagaagggcgugcagauccccugcacgugcgggaagcaggccaccaaguaccuggugcagcaggagagccccuucgucaugauguccgcccccccggcgcaguacgagcugaagcacggcaccuucaccugcgccagcgaguacacgggcaacuaccagugcgggcacuacaagcacaucaccuccaaggagacccucuacugcaucgacggcgcccugcugaccaagagcagcgaguacaaggggcccaucacggacguguucuacaaggagaacuccuacaccaccaccaucaagcccgugacguacaagcucgacggcgucgugugcaccgagaucgaccccaagcuggacaacuacuacaagaaggacaacagcuacuucaccgagcagccgaucgaccuggugcccaaccagcccuaccccaacgccuccuucgacaacuucaaguucgucugcgacaacaucaaguucgccgacgaccucaaccagcugaccggguacaagaagccggcgagccgcgagcugaaggugacguucuuccccgaccucaacggcgacguggucgccaucgacuacaagcacuacacccccuccuucaagaagggcgccaagcugcugcacaagcccaucguguggcacgugaacaacgccaccaacaaggcgaccuacaagccgaacacguggugcauccggugccucuggagcaccaagcccgucgagaccuccaacagcuucgacgugcugaaguccgaggacgcccaggggauggacaaccuggccugcgaggaccucaagcccgugagcgaggaggucguggagaaccccaccauccagaaggacgugcuggagugcaacgucaagacgaccgagguggugggcgacaucauccugaagccggccaacaacucccucaagaucaccgaggaggucgggcacaccgaccugauggccgcguacguggacaacagcucccugacgaucaagaagcccaacgagcucagccgcgugcugggccugaagacccucgccacccacgggcuggccgccgucaacuccgugcccugggacaccaucgccaacuacgcgaagccguuccugaacaagguggucagcacgaccaccaacaucgugacccgcugccucaaccgggugugcacgaacuacaugcccuacuucuucacccugcugcuccagcugugcaccuucacccgcuccaccaacagccggaucaaggccuccaugcccacgaccaucgccaagaacaccgucaagagcgugggcaaguucugccuggaggccagcuucaacuaccucaagucccccaacuucagcaagcugaucaacaucaucaucugguuccugcuccuguccgugugccugggcagccucaucuacuccaccgccgcgcuggggguccugaugagcaaccucggcaugccguccuacugcacgggguaccgcgagggcuaccugaacagcaccaacgugaccaucgccaccuacugcacgggcuccauccccugcagcgugugccuguccgggcucgacagccuggacaccuaccccucccuggagaccauccagaucaccaucagcuccuucaagugggaccucacggccuucggccuggucgccgagugguuccuggccuacauccucuucacccgguucuucuacgugcuggggcuggcggccaucaugcagcucuucuucagcuacuucgccgugcacuucaucuccaacagcuggcugauguggcugaucaucaaccugguccagauggcccccaucuccgcgauggugcgcauguacaucuucuucgccagcuucuacuacguguggaagagcuacguccacgugguggacggcugcaacuccagcaccugcaugaugugcuacaagcggaaccgcgccacccgggucgagugcacgaccaucgugaacgggguccgccgguccuucuacguguacgccaacggcggcaagggguucugcaagcuccacaacuggaacugcgugaacugcgacaccuucugcgccggcagcaccuucaucuccgacgaggucgcgcgcgaccugagccugcaguucaagcggccgaucaaccccacggaccaguccagcuacaucguggacuccgugaccgucaagaacgggagcauccaccucuacuucgacaaggccggccagaagaccuacgagcgccacucccugagccacuucgugaaccuggacaaccuccgggccaacaacaccaaggggucccugcccaucaacgugaucgucuucgacggcaagagcaagugcgaggaguccagcgccaaguccgccagcguguacuacucccagcugaugugccagcccauccuccugcuggaccaggcgcucgugagcgacgucggcgacagcgccgagguggccgugaagauguucgacgccuacgucaacacguucuccagcaccuucaacgugccgauggagaagcugaagacccugguggccaccgcggaggccgagcucgccaagaacgucucccuggacaacgugcugagcacguucaucuccgccgcgcgccagggguucguggacagcgacgucgagaccaaggacgugguggagugccucaagcugucccaccagagcgacaucgaggucaccggcgacuccugcaacaacuacaugcugaccuacaacaagguggagaacaugacgccccgggaccucggggccugcaucgacugcagcgcccgccacaucaacgcccagguggccaagucccacaacaucgcgcugaucuggaacgucaaggacuucaugagccuguccgagcagcuccggaagcagauccgcagcgccgccaagaagaacaaccugcccuucaagcugaccugcgccaccacccgccagguggugaacgucgugacgaccaagaucgcccucaagggcggguga

SEQ ID NO: 17680 - RNA, 5841 nt, Artificial Sequence
  SARS-CoV-2__MT886301.1__non-structural protein 3 (NSP3) CDS gc
auggcccccaccaaggugaccuucggcgacgacacggucaucgaggugcagggguacaagagcgugaacaucaccuucgagcuggacgagcgcaucgacaagguccucaacgagaagugcuccgccuacaccguggagcugggcaccgaggugaacgaguucgcgugcgucgugacggacgccgugaucaagacccugcagccggucagcgagcuccugaccccccuggggaucgaccucgacgagugguccauggccaccuacuaccuguucgacgagagcggcgaguucaagcuggccucccacauguacugcagcuucuacccccccgacgaggacgaggaggagggggacugcgaggaggaggaguucgagccguccacgcaguacgaguacggcaccgaggacgacuaccagggcaagccccucgaguucggggccaccagcgcggcccugcagcccgaggaggagcaggaggaggacuggcuggacgacgacucccagcagaccgugggccagcaggacgggagcgaggacaaccagacgaccaccauccagaccaucguggagguccagccccagcucgagauggagcugacgccgguggugcagaccaucgaggucaacuccuucagcggcuaccugaagcucaccgacaacguguacaucaagaacgccgacaucguggaggaggccaagaaggucaagcccaccgugguggucaacgcggccaacguguaccugaagcacgggggcggcguggccggggcccugaacaaggccacgaacaacgcgaugcaggucgaguccgacgacuacaucgccaccaacggcccccucaagguggggggcagcugcguccuguccggccacaaccuggccaagcacugccuccacgugguggggcccaacgucaacaagggcgaggacauccagcugcugaagagcgccuacgagaacuucaaccagcacgaggugcuccuggccccgcugcucuccgcggggaucuucggcgccgaccccauccacagccugcgggugugcgucgacaccgugcgcaccaacguguaccuggccgucuucgacaagaaccucuacgacaagcugguguccagcuuccuggagaugaagagcgagaagcagguggagcagaagaucgccgagauccccaaggaggaggucaagcccuucaucacggaguccaagccgagcguggagcagcggaagcaggacgacaagaagaucaaggccugcguggaggaggucaccaccacccucgaggagacgaaguuccugaccgagaaccugcuccuguacaucgacaucaacgggaaccugcaccccgacuccgcgacccucgugagcgacaucgacaucaccuuccugaagaaggacgcccccuacaucgugggcgacgucgugcaggagggcgugcugacggccgucgugauccccaccaagaaggccgggggcaccaccgagaugcucgccaaggcgcugcgcaaggugccgacggacaacuacaucaccaccuaccccgggcagggccugaacggguacaccgucgaggaggccaagaccgugcucaagaagugcaaguccgccuucuacauccugcccagcaucaucuccaacgagaagcaggagauccugggcacggugagcuggaaccuccgggagaugcuggcccacgcggaggagacccgcaagcugaugcccgucugcguggagaccaaggccaucguguccaccauccagcggaaguacaagggcaucaagauccaggagggggucguggacuacggcgcccgcuucuacuucuacacgagcaagaccaccguggccucccugaucaacacccucaacgaccugaacgagacgcuggucaccaugccgcucggguacgugacccacggccugaaccuggaggaggccgcgcgguacaugcgcagccucaaggugcccgccaccgucuccgugagcucccccgacgccgugacggccuacaacggguaccugaccagcuccagcaagacccccgaggagcacuucaucgagaccaucucccuggccggcagcuacaaggacuggagcuacuccggccagagcacgcagcucgggaucgaguuccugaagcggggcgacaaguccgucuacuacaccagcaacccgaccaccuuccaccuggacggggaggugaucacguucgacaaccucaagacccugcugucccuccgcgaggugcggaccaucaaggucuucaccacgguggacaacaucaaccugcacacccagguggucgacaugagcaugaccuacggccagcaguucggccccaccuaccuggacggggcggacgugacgaagaucaagccccacaacucccacgagggcaagaccuucuacgugcucccgaacgacgacacccugcgcgucgaggccuucgaguacuaccacaccacggaccccagcuuccuggggcgguacauguccgcccucaaccacaccaagaaguggaaguacccccaggugaacggccugaccagcaucaagugggccgacaacaacugcuaccuggccaccgcgcuccugacgcugcagcagaucgagcucaaguucaaccccccggcccugcaggacgccuacuaccgcgcccgggcgggggaggccgccaacuucugcgcccugauccucgccuacugcaacaagaccgugggcgagcugggcgacguccgcgagaccauguccuaccuguuccagcacgcgaaccucgacagcugcaagcgggugcugaacgucgugugcaagaccugcgggcagcagcagaccacgcugaagggcguggaggccgucauguacauggggacccucuccuacgagcaguucaagaagggcgugcagauccccugcaccugcgggaagcaggccaccaaguaccuggugcagcaggagagccccuucgucaugauguccgcccccccggcccaguacgagcugaagcacggcacguucaccugcgcgagcgaguacaccggcaacuaccagugcgggcacuacaagcacaucaccuccaaggagacgcucuacugcaucgacggcgcccugcugaccaagagcagcgaguacaaggggcccaucaccgacguguucuacaaggagaacuccuacaccacgaccaucaagcccgugaccuacaagcucgacggcgucgugugcaccgagaucgaccccaagcuggacaacuacuacaagaaggacaacagcuacuucacggagcagccgaucgaccuggugcccaaccagcccuaccccaacgccuccuucgacaacuucaaguucgucugcgacaacaucaaguucgccgacgaccucaaccagcugaccggguacaagaagccggccagccgcgagcugaaggugaccuucuuccccgaccucaacggcgacguggucgcgaucgacuacaagcacuacacccccuccuucaagaagggcgccaagcugcugcacaagcccaucguguggcacgugaacaacgccacgaacaaggccaccuacaagccgaacaccuggugcauccggugccucuggagcaccaagcccgucgagacguccaacagcuucgacgugcugaaguccgaggacgcgcaggggauggacaaccuggccugcgaggaccucaagcccgugagcgaggaggucguggagaaccccaccauccagaaggacgugcuggagugcaacgucaagaccaccgagguggugggcgacaucauccugaagccggccaacaacucccucaagaucacggaggaggucgggcacaccgaccugauggccgccuacguggacaacagcucccugaccaucaagaagcccaacgagcucagccgcgugcugggccugaagacccucgcgacgcacgggcuggccgccgucaacuccgugcccugggacaccaucgccaacuacgccaagccguuccugaacaagguggucagcaccaccacgaacaucgugacccgcugccucaaccgggugugcaccaacuacaugcccuacuucuucacccugcugcuccagcugugcaccuucacgcgcuccaccaacagccggaucaaggcguccaugcccaccaccaucgccaagaacacggucaagagcgugggcaaguucugccuggaggccagcuucaacuaccucaagucccccaacuucagcaagcugaucaacaucaucaucugguuccugcuccuguccgugugccugggcagccucaucuacuccaccgccguccugggggugcugaugagcaaccucggcaugccguccuacugcaccggguaccgcgagggcuaccugaacagcaccaacgugacgaucgccaccuacugcaccggcuccauccccugcagcgucugccuguccgggcucgacagccuggacaccuaccccucccuggagacgauccagaucaccaucagcuccuucaagugggaccucaccgcguucggccugguggccgagugguuccuggccuacauccucuucacccgguucuucuacgugcuggggcuggccgccaucaugcagcucuucuucagcuacuucgcgguccacuucaucuccaacagcuggcugauguggcugaucaucaaccuggugcagauggcccccaucuccgccauggugcgcauguacaucuucuucgccagcuucuacuacgucuggaagagcuacgugcacguggucgacggcugcaacuccagcacgugcaugaugugcuacaagcggaaccgcgcgacccggguggagugcaccaccaucgucaacggggugcgccgguccuucuacguguacgccaacggcggcaagggguucugcaagcuccacaacuggaacugcgucaacugcgacacguucugcgccggcagcaccuucaucuccgacgagguggcccgcgaccugagccugcaguucaagcggccgaucaaccccaccgaccaguccagcuacaucguggacuccgucaccgugaagaacgggagcauccaccucuacuucgacaaggccggccagaagacguacgagcgccacucccugagccacuucgugaaccuggacaaccuccgggcgaacaacaccaaggggucccugcccaucaacgucaucguguucgacggcaagagcaagugcgaggaguccagcgccaaguccgccagcguguacuacucccagcugaugugccagcccauccuccugcuggaccaggcccucgucagcgacgugggcgacagcgccgagguggcggucaagauguucgacgccuacgugaacaccuucuccagcaccuucaacgugccgauggagaagcugaagacgcuggucgccaccgccgaggccgagcucgcgaagaacgugucccuggacaacgugcugagcaccuucaucuccgccgcccgccagggguucgucgacagcgacguggagaccaaggacguggucgagugccucaagcugucccaccagagcgacaucgaggugacgggcgacuccugcaacaacuacaugcugaccuacaacaagguggagaacaugaccccccgggaccucggggccugcaucgacugcagcgcgcgccacaucaacgcccaggucgccaagucccacaacaucgcccugaucuggaacgugaaggacuucaugagccuguccgagcagcuccggaagcagauccgcagcgccgcgaagaagaacaaccugcccuucaagcugaccugcgccacgacccgccagguggucaacguggugaccaccaagaucgcccucaagggcggguga

SEQ ID NO: 17681 - RNA, 5841 nt, Artificial Sequence
  SARS-CoV-2__MT886315.1__non-structural protein 3 (NSP3) CDS gc
auggcccccaccaaggugaccuucggcgacgacacggucaucgaggugcagggguacaagagcgugaacaucaccuucgagcuggacgagcgcaucgacaagguccucaacgagaagugcuccgccuacaccguggagcugggcaccgaggugaacgaguucgcgugcgucguggccgacgccgugaucaagacgcugcagccggucagcgagcuccugaccccccuggggaucgaccucgacgagugguccauggccaccuacuaccuguucgacgagagcggcgaguucaagcuggccucccacauguacugcagcuucuacccccccgacgaggacgaggaggagggggacugcgaggaggaggaguucgagccguccacccaguacgaguacggcacggaggacgacuaccagggcaagccccucgaguucggggcgaccagcgccgcccugcagcccgaggaggagcaggaggaggacuggcuggacgacgacucccagcagaccgugggccagcaggacgggagcgaggacaaccagaccacgaccauccagaccaucguggagguccagccccagcucgagauggagcugaccccgguggugcagacgaucgaggucaacuccuucagcggcuaccugaagcucaccgacaacguguacaucaagaacgccgacaucguggaggaggcgaagaaggucaagcccaccgugguggucaacgccgccaacguguaccugaagcacgggggcggcguggccggggcccugaacaaggcgaccaacaacgccaugcaggucgaguccgacgacuacaucgccacgaacggcccccucaagguggggggcagcugcguccuguccggccacaaccuggccaagcacugccuccacgugguggggcccaacgucaacaagggcgaggacauccagcugcugaagagcgccuacgagaacuucaaccagcacgaggugcuccuggcgccgcugcucuccgccgggaucuucggcgccgaccccauccacagccugcgggugugcgucgacaccgugcgcaccaacguguaccuggccgucuucgacaagaaccucuacgacaagcugguguccagcuuccuggagaugaagagcgagaagcagguggagcagaagaucgccgagauccccaaggaggaggucaagcccuucaucaccgaguccaagccgagcguggagcagcggaagcaggacgacaagaagaucaaggcgugcguggaggaggucacgaccacccucgaggagaccaaguuccugacggagaaccugcuccuguacaucgacaucaacgggaaccugcaccccgacuccgccacccucgugagcgacaucgacaucaccuuccugaagaaggacgcccccuacaucgugggcgacgucgugcaggagggcgugcugaccgccgucgugauccccacgaagaaggccgggggcaccaccgagaugcucgcgaaggcccugcgcaaggugccgaccgacaacuacaucacgaccuaccccgggcagggccugaacggguacaccgucgaggaggccaagaccgugcucaagaagugcaaguccgccuucuacauccugcccagcaucaucuccaacgagaagcaggagauccugggcaccgugagcuggaaccuccgggagaugcuggcgcacgccgaggagacgcgcaagcugaugcccgucugcguggagaccaaggccaucguguccaccauccagcggaaguacaagggcaucaagauccaggagggggucguggacuacggcgcccgcuucuacuucuacaccagcaagacgaccguggccucccugaucaacacccucaacgaccugaacgagacccuggucacgaugccgcucggguacgugacccacggccugaaccuggaggaggcggcccgguacaugcgcagccucaaggugcccgccaccgucuccgugagcucccccgacgccgugaccgccuacaacggguaccugacgagcuccagcaagacccuggaggagcacuucaucgagaccaucucccucgcgggcagcuacaaggacuggagcuacuccggccagagcacccagcuggggaucgaguuccugaagcggggcgacaaguccgucuacuacacgagcaaccccaccaccuuccaccucgacggggaggugaucaccuucgacaaccugaagacgcugcucucccugcgcgaggugcggaccaucaaggucuucaccaccguggacaacaucaaccugcacacgcagguggucgacaugagcaugaccuacggccagcaguucggcccgaccuaccucgacggggccgacgugaccaagaucaagccccacaacucccacgagggcaagacguucuacgugcugcccaacgacgacacccugcgcgucgaggccuucgaguacuaccacaccaccgacccgagcuuccucgggcgguacauguccgcccugaaccacacgaagaaguggaaguacccccaggugaacggccugaccagcaucaagugggccgacaacaacugcuaccucgcgaccgcccugcugacccuccagcagaucgagcugaaguucaacccccccgcccugcaggacgccuacuaccgcgcgcgggccggggaggccgccaacuucugcgcccucauccuggcguacugcaacaagacggugggcgagcugggcgacguccgcgagaccauguccuaccucuuccagcacgccaaccuggacagcugcaagcgggugcugaacgucgugugcaagaccugcgggcagcagcagaccacccucaagggcguggaggccgucauguacauggggacgcuguccuacgagcaguucaagaagggcgugcagaucccgugcaccugcgggaagcaggccaccaaguaccuggugcagcaggagagccccuucgucaugauguccgccccccccgcgcaguacgagcucaagcacggcaccuucacgugcgccagcgaguacaccggcaacuaccagugcgggcacuacaagcacaucaccuccaaggagacccuguacugcaucgacggcgcccugcucacgaagagcagcgaguacaaggggccgaucaccgacguguucuacaaggagaacuccuacaccaccacgaucaagcccgugaccuacaagcuggacggcgucgugugcaccgagaucgaccccaagcuggacaacuacuacaagaaggacaacagcuacuucaccgagcagcccaucgaccucgugccgaaccagcccuaccccaacgccuccuucgacaacuucaaguucgucugcgacaacaucaaguucgccgacgaccugaaccagcugacgggguacaagaagcccgcgagccgcgagcucaaggugaccuucuucccggaccugaacggcgacguggucgccaucgacuacaagcacuacacccccuccuucaagaagggcgccaagcugcuccacaagcccaucguguggcacgugaacaacgccaccaacaaggcgacguacaagcccaacaccuggugcauccggugccuguggagcaccaagccggucgagaccuccaacagcuucgacgugcugaaguccgaggacgcccaggggauggacaaccucgccugcgaggaccugaagcccgugagcgaggaggucguggagaaccccacgauccagaaggacgugcuggagugcaacgucaagaccaccgagguggugggcgacaucauccucaagcccgccaacaacucccugaagaucaccgaggaggucgggcacacggaccugauggccgcguacguggacaacagcucccucaccaucaagaagccgaacgagcugagccgcgugcugggccucaagacccuggccacccacgggcuggccgccgucaacuccgugcccugggacacgaucgccaacuacgcgaagcccuuccucaacaagguggucagcaccaccaccaacaucgugacgcgcugccugaaccgggugugcaccaacuacaugccguacuucuucacccugcuccugcagcugugcaccuucacccgcuccacgaacagccggaucaaggccuccaugcccaccaccaucgccaagaacaccgucaagagcgugggcaaguucugccucgaggccagcuucaacuaccugaagucccccaacuucagcaagcugaucaacaucaucaucugguuccuccugcuguccgugugccucggcagccugaucuacuccacggccgcgcuggggguccucaugagcaaccugggcaugcccuccuacugcaccggguaccgcgagggcuaccugaacagcaccaacgugaccaucgccacguacugcaccggcuccaucccgugcagcgugugccucuccgggcuggacagccuggacaccuaccccucccucgagaccauccagaucacgaucagcuccuucaagugggaccugaccgccuucggccuggucgccgagugguuccucgccuacauccuguucacccgguucuucuacgugcuggggcucgcggccaucaugcagcuguucuucagcuacuucgccgugcacuucaucuccaacagcuggcugauguggcugaucaucaaccucguccagauggcccccaucuccgcgauggugcgcauguacaucuucuucgccagcuucuacuacguguggaagagcuacguccacgugguggacggcugcaacuccagcaccugcaugaugugcuacaagcggaaccgcgccacgcgggucgagugcaccaccaucgugaacgggguccgccgguccuucuacguguacgccaacggcggcaagggguucugcaagcugcacaacuggaacugcgugaacugcgacaccuucugcgccggcagcacguucaucuccgacgaggucgcgcgcgaccugagccuccaguucaagcggcccaucaacccgaccgaccaguccagcuacaucguggacuccgugaccgucaagaacgggagcauccaccuguacuucgacaaggccggccagaagaccuacgagcgccacucccugagccacuucgugaaccucgacaaccugcgggccaacaacacgaaggggucccugcccaucaacgugaucgucuucgacggcaagagcaagugcgaggaguccagcgccaaguccgccagcguguacuacucccagcucaugugccagcccauccugcugcucgaccaggcgcuggugagcgacgucggcgacagcgccgagguggccgugaagauguucgacgccuacgucaacaccuucuccagcaccuucaacgugcccauggagaagcugaagacccucguggccacggcggaggccgagcuggccaagaacgucucccuggacaacgugcucagcaccuucaucuccgccgcgcgccagggguucguggacagcgacgucgagaccaaggacgugguggagugccugaagcugucccaccagagcgacaucgaggucaccggcgacuccugcaacaacuacaugcucacguacaacaagguggagaacaugaccccgcgggaccugggggccugcaucgacugcagcgcccgccacaucaacgcccagguggccaagucccacaacaucgcgcugaucuggaacgucaaggacuucaugagccucuccgagcagcugcggaagcagauccgcagcgccgccaagaagaacaaccugcccuucaagcucaccugcgccaccacgcgccagguggugaacgucgugaccaccaagaucgcccugaagggcggguga

SEQ ID NO: 17682 - RNA, 5841 nt, Artificial Sequence
  SARS-CoV-2__MT886334.1__non-structural protein 3 (NSP3) CDS gc
auggcccccaccaaggugaccuucggcgacgacacggucaucgaggugcagggguacaagagcgugaacaucaccuucgagcuggacgagcgcaucgacaagguccucaacgagaagugcuccgccuacaccguggagcugggcaccgaggugaacgaguucgcgugcgucguggccgacgccgugaucaagacgcugcagccggucagcgagcuccugaccccccuggggaucgaccucgacgagugguccauggccaccuacuaccuguucgacgagagcggcgaguucaagcuggccucccacauguacugcagcuucuacccccccgacgaggacgaggaggagggggacugcgaggaggaggaguucgagccguccacccaguacgaguacggcacggaggacgacuaccagggcaagccccucgaguucggggcgaccagcgccgcccugcagcccgaggaggagcaggaggaggacuggcuggacgacgacucccagcagaccgugggccagcaggacgggagcgaggacaaccagaccacgaccauccagaccaucguggagguccagccccagcucgagauggagcugaccccgguggugcagacgaucgaggucaacuccuucagcggcuaccugaagcucaccgacaacguguacaucaagaacgccgacaucguggaggaggcgaagaaggucaagcccaccgugguggucaacgccgccaacguguaccugaagcacgggggcggcguggccggggcccugaacaaggcgaccaacaacgccaugcaggucgaguccgacgacuacaucgccacgaacggcccccucaagguggggggcagcugcguccuguccggccacaaccuggccaagcacugccuccacgugguggggcccaacgucaacaagggcgaggacauccagcugcugaagagcgccuacgagaacuucaaccagcacgaggugcuccuggcgccgcugcucuccgccgggaucuucggcgccgaccccauccacagccugcgggugugcgucgacaccgugcgcaccaacguguaccuggccgucuucgacaagaaccucuacgacaagcugguguccagcuuccuggagaugaagagcgagaagcagguggagcagaagaucgccgagauccccaaggaggaggucaagcccuucaucaccgaguccaagccgagcguggagcagcggaagcaggacgacaagaagaucaaggcgugcguggaggaggucacgaccacccucgaggagaccaaguuccugacggagaaccugcuccuguacaucgacaucaacgggaaccugcaccccgacuccgccacccucgugagcgacaucgacaucaccuuccugaagaaggacgcccccuacaucgugggcgacgucgugcaggagggcgugcugaccgccgucgugauccccacgaagaaggccgggggcaccaccgagaugcucgcgaaggcccugcgcaaggugccgaccgacaacuacaucacgaccuaccccgggcagggccugaacggguacaccgucgaggaggccaagaccgugcucaagaagugcaaguccgccuucuacauccugcccagcaucaucuccaacgagaagcaggagauccugggcaccgugagcuggaaccuccgggagaugcuggcgcacgccgaggagacgcgcaagcugaugcccgucugcguggagaccaaggccaucguguccaccauccagcggaaguacaagggcaucaagauccaggagggggucguggacuacggcgcccgcuucuacuucuacaccagcaagacgaccguggccucccugaucaacacccucaacgaccugaacgagacccuggucacgaugccgcucggguacgugacccacggccugaaccuggaggaggcggcccgguacaugcgcagccucaaggugcccgccaccgucuccgugagcucccccgacgccgugaccgccuacaacggguaccugacgagcuccagcaagacccccgaggagcacuucaucgagaccaucucccuggcgggcagcuacaaggacuggagcuacuccggccagagcacccagcucgggaucgaguuccugaagcggggcgacaaguccgucuacuacacgagcaacccgaccaccuuccaccuggacggggaggugaucaccuucgacaaccucaagacgcugcugucccuccgcgaggugcggaccaucaaggucuucaccaccguggacaacaucaaccugcacacgcagguggucgacaugagcaugaccuacggccagcaguucggccccaccuaccuggacggggccgacgugaccaagaucaagccccacaacucccacgagggcaagacguucuacgugcucccgaacgacgacacccugcgcgucgaggccuucgaguacuaccacaccaccgaccccagcuuccuggggcgguacauguccgcccucaaccacacgaagaaguggaaguacccccaggugaacggccugaccagcaucaagugggccgacaacaacugcuaccuggcgaccgcccuccugacccugcagcagaucgagcucaaguucaaccccccggcccugcaggacgccuacuaccgcgcgcgggccggggaggccgccaacuucugcgcccugauccucgcguacugcaacaagacggugggcgagcugggcgacguccgcgagaccauguccuaccuguuccagcacgccaaccucgacagcugcaagcgggugcugaacgucgugugcaagaccugcgggcagcagcagaccacccugaagggcguggaggccgucauguacauggggacgcucuccuacgagcaguucaagaagggcgugcagauccccugcaccugcgggaagcaggccaccaaguaccuggugcagcaggagagccccuucgucaugauguccgcccccccggcgcaguacgagcugaagcacggcaccuucacgugcgccagcgaguacaccggcaacuaccagugcgggcacuacaagcacaucaccuccaaggagacccucuacugcaucgacggcgcccugcugacgaagagcagcgaguacaaggggcccaucaccgacguguucuacaaggagaacuccuacaccaccacgaucaagcccgugaccuacaagcucgacggcgucgugugcaccgagaucgaccccaagcuggacaacuacuacaagaaggacaacagcuacuucaccgagcagccgaucgaccuggugcccaaccagcccuaccccaacgccuccuucgacaacuucaaguucgucugcgacaacaucaaguucgccgacgaccucaaccagcugacgggguacaagaagccggcgagccgcgagcugaaggugaccuucuuccccgaccucaacggcgacguggucgccaucgacuacaagcacuacacccccuccuucaagaagggcgccaagcugcugcacaagcccaucguguggcacgugaacaacgccaccaacaaggcgacguacaagccgaacaccuggugcauccggugccucuggagcaccaagcccgucgagaccuccaacagcuucgacgugcugaaguccgaggacgcccaggggauggacaaccuggccugcgaggaccucaagcccgugagcgaggaggucguggagaaccccacgauccagaaggacgugcuggagugcaacgucaagaccaccgagguggugggcgacaucauccugaagccggccaacaacucccucaagaucaccgaggaggucgggcacacggaccugauggccgcguacguggacaacagcucccugaccaucaagaagcccaacgagcucagccgcgugcugggccugaagacccucgccacccacgggcuggccgccgucaacuccgugcccugggacacgaucgccaacuacgcgaagccguuccugaacaagguggucagcaccaccaccaacaucgugacgcgcugccucaaccgggugugcaccaacuacaugcccuacuucuucacccugcugcuccagcugugcaccuucacccgcuccacgaacagccggaucaaggccuccaugcccaccaccaucgccaagaacaccgucaagagcgugggcaaguucugccuggaggccagcuucaacuaccucaagucccccaacuucagcaagcugaucaacaucaucaucugguuccugcuccuguccgugugccugggcagccucaucuacuccacggccgcgcuggggguccugaugagcaaccucggcaugccguccuacugcaccggguaccgcgagggcuaccugaacagcaccaacgugaccaucgccacguacugcaccggcuccauccccugcagcgugugccuguccgggcucgacagccuggacaccuaccccucccuggagaccauccagaucacgaucagcuccuucaagugggaccucaccgccuucggccuggucgccgagugguuccuggccuacauccucuucacccgguucuucuacgugcuggggcuggcggccaucaugcagcucuucuucagcuacuucgccgugcacuucaucuccaacagcuggcugauguggcugaucaucaaccugguccagauggcccccaucuccgcgauggugcgcauguacaucuucuucgccagcuucuacuacguguggaagagcuacguccacgugguggacggcugcaacuccagcaccugcaugaugugcuacaagcggaaccgcgccacgcgggucgagugcaccaccaucgugaacgggguccgccgguccuucuacguguacgccaacggcggcaagggguucugcaagcuccacaacuggaacugcgugaacugcgacaccuucugcgccggcagcacguucaucuccgacgaggucgcgcgcgaccugagccugcaguucaagcggccgaucaaccccaccgaccaguccagcuacaucguggacuccgugaccgucaagaacgggagcauccaccucuacuucgacaaggccggccagaagaccuacgagcgccacucccugagccacuucgugaaccuggacaaccuccgggccaacaacacgaaggggucccugcccaucaacgugaucgucuucgacggcaagagcaagugcgaggaguccagcgccaaguccgccagcguguacuacucccagcugaugugccagcccauccuccugcuggaccaggcgcucgugagcgacgucggcgacagcgccgagguggccgugaagauguucgacgccuacgucaacaccuucuccagcaccuucaacgugccgauggagaagcugaagacccuguucgccacggcggaggccgagcucgccaagaacgugucccuggacaacguccugagcaccuucaucuccgccgcgcgccagggguucguggacagcgacguggagaccaaggacgucguggagugccucaagcugucccaccagagcgacaucgaggugaccggcgacuccugcaacaacuacaugcugacguacaacaaggucgagaacaugaccccccgggaccucggggccugcaucgacugcagcgcccgccacaucaacgcccagguggccaagucccacaacaucgcgcugaucuggaacgugaaggacuucaugagccuguccgagcagcuccggaagcagauccgcagcgccgccaagaagaacaaccugcccuucaagcugaccugcgccaccacgcgccaggucgugaacguggucaccaccaagaucgcccucaagggcggguga

SEQ ID NO: 17683 - RNA, 5841 nt, Artificial Sequence
  SARS-CoV-2__MT886345.1__non-structural protein 3 (NSP3) CDS gc
auggcccccaccaaggugaccuucggcgacgacacggucaucgaggugcagggguacaagagcgugaacaucaccuucgagcuggacgagcgcaucgacaagguccucaacgagaagugcuccgccuacaccguggagcugggcaccgaggugaacgaguucgcgugcgucguggccgacgccgugaucaagacgcugcagccggucagcgagcuccugaccccccuggggaucgaccucgacgagugguccauggccaccuacuaccuguucgacgagagcggcgaguucaagcuggccucccacauguacugcagcuucuacccccccgacgaggacgaggaggagggggacugcgaggaggaggaguucgagccguccacccaguacgaguacggcacggaggacgacuaccagggcaagccccucgaguucggggcgaccagcgccgcccugcagcccgaggaggagcaggaggaggacuggcuggacgacgacucccagcagaccgugggccagcaggacgggagcgaggacaaccagaccacgaccauccagaccaucguggagguccagccccagcucgagauggagcugaccccgguggugcagacgaucgaggucaacuccuucagcggcuaccugaagcucaccgacaacguguacaucaagaacgccgacaucguggaggaggcgaagaaggucaagcccaccgugguggucaacgccgccaacguguaccugaagcacgggggcggcguggccggggcccugaacaaggcgaccaacaacgccaugcaggucgaguccgacgacuacaucgccacgaacggcccccucaagguggggggcagcugcguccuguccggccacaaccuggccaagcacugccuccacgugguggggcccaacgucaacaagggcgaggacauccagcugcugaagagcgccuacgagaacuucaaccagcacgaggugcuccuggcgccgcugcucuccgccgggaucuucggcgccgaccccauccacagccugcgggugugcgucgacaccgugcgcaccaacguguaccuggccgucuucgacaagaaccucuacgacaagcugguguccagcuuccuggagaugaagagcgagaagcagguggagcagaagaucgccgagauccccaaggaggaggucaagcccuucaucaccgaguccaagccgagcguggagcagcggaagcaggacgacaagaagaucaaggcgugcguggaggaggucacgaccacccucgaggagaccaaguuccugacggagaaccugcuccuguacaucgacaucaacgggaaccugcaccccgacuccgccacccucgugagcgacaucgacaucaccuuccugaagaaggacgcccccuacaucgugggcgacgucgugcaggagggcgugcugaccgccgucgugauccccacgaagaaggccgggggcaccaccgagaugcucgcgaaggcccugcgcaaggugccgaccgacaacuacaucacgaccuaccccgggcagggccugaacggguacaccgucgaggaggccaagaccgugcucaagaagugcaaguccgccuucuacauccugcccagcaucaucuccaacgagaagcaggagauccugggcaccgugagcuggaaccuccgggagaugcuggcgcacgccgaggagacgcgcaagcugaugcccgucugcguggagaccaaggccaucguguccaccauccagcggaaguacaagggcaucaagauccaggagggggucguggacuacggcgcccgcuucuacuucuacaccagcaagacgaccguggccucccugaucaacacccucaacgaccugaacgagacccuggucacgaugccgcucggguacgugacccacggccugaaccuggaggaggcggcccgguacaugcgcagccucaaggugcccgccaccgucuccgugagcucccccgacgccgugaccgccuacaacggguaccugacgagcuccagcaagacccccgaggagcacuucaucgagaccaucucccuggcgggcagcuacaaggacuggagcuacuccggccagagcacccagcucgggaucgaguuccugaagcggggcgacaaguccgucuacuacacgagcaacccgaccaccuuccaccuggacggggaggugaucaccuucgacaaccucaagacgcugcugucccuccgcgaggugcggaccaucaaggucuucaccaccguggacaacaucaaccugcacacgcagguggucgacaugagcaugaccuacggccagcaguucggccccaccuaccuggacggggccgacgugaccaagaucaagccccacaacucccacgagggcaagacguucuacgugcucccgaacgacgacacccugcgcgucgaggccuucgaguacuaccacaccaccgaccccagcuuccuggggcgguacauguccgcccucaaccacacgaagaaguggaaguacccccaggugaacggccugaccagcaucaagugggccgacaacaacugcuaccuggcgaccgcccuccugacccugcagcagaucgagcucaaguucaaccccccggcccugcaggacgccuacuaccgcgcgcgggccggggaggccgccaacuucugcgcccugauccucgcguacugcaacaagacggugggcgagcugggcgacguccgcgagaccauguccuaccuguuccagcacgccaaccucgacagcugcaagcgggugcugaacgucgugugcaagaccugcgggcagcagcagaccacccugaagggcguggaggccgucauguacauggggacgcucuccuacgagcaguucaagaagggcgugcagauccccugcaccugcgggaagcaggccaccaaguaccuggugcagcaggagagccccuucgucaugauguccgcccccccggcgcaguacgagcugaagcacggcaccuucacgugcgccagcgaguacaccggcaacuaccagugcgggcacuacaagcacaucaccuccaaggagacccucuacugcaucgacggcgcccugcugacgaagagcagcgaguacaaggggcccaucaccgacguguucuacaaggagaacuccuacaccaccacgaucaagcccgugaccuacaagcucgacggcgucgugugcaccgagaucgaccccaagcuggacaacuacuacaagaaggacaacagcuacuucaccgagcagccgaucgaccuggugcccaaccagcccuaccccaacgccuccuucgacaacuucaaguucgucugcgacaacaucaaguucgccgacgaccucaaccagcugacgggguacaagaagccggcgagccgcgagcugaaggugaccuucuuccccgaccucaacggcgacguggucgccaucgacuacaagcacuacacccccuccuucaagaagggcgccaagcugcugcacaagcccaucguguggcacgugaacaacgccaccaacaaggcgacguacaagccgaacaccuggugcauccggugccucuggagcaccaagcccgucgagaccuccaacagcuucgacgugcugaaguccgaggacgcccaggggauggacaaccuggccugcgaggaccucaagcccgugagcgaggaggucguggagaaccccacgauccagaaggacgugcuggagugcaacgucaagaccaccgagguggugggcgacaucauccugaagccggccaacaacucccucaagaucaccgaggaggucgggcacacggaccugauggccgcguacguggacaacagcucccugaccaucaagaagcccaacgagcucagccgcgugcugggccugaagacccucgccacccacgggcuggccgccgucaacuccgugcccugggacacgaucgccaacuacgcgaagccguuccugaacaagguggucagcaccaccaccaacaucgugacgcgcugccucaaccgggugugcaccaacuacaugcccuacuucuucacccugcugcuccagcugugcaccuucacccgcuccacgaacagccggaucaaggccuccaugcccaccaccaucgccaagaacaccgucaacagcgugggcaaguucugccuggaggccagcuucaacuaccucaagucccccaacuucagcaagcugaucaacaucaucaucugguuccugcuccuguccgugugccugggcagccucaucuacuccacggccgcgcuggggguccugaugagcaaccucggcaugccguccuacugcaccggguaccgcgagggcuaccugaacagcaccaacgugaccaucgccacguacugcaccggcuccauccccugcagcgugugccuguccgggcucgacagccuggacaccuaccccucccuggagaccauccagaucacgaucagcuccuucaagugggaccucaccgccuucggccuggucgccgagugguuccuggccuacauccucuucacccgguucuucuacgugcuggggcuggcggccaucaugcagcucuucuucagcuacuucgccgugcacuucaucuccaacagcuggcugauguggcugaucaucaaccugguccagauggcccccaucuccgcgauggugcgcauguacaucuucuucgccagcuucuacuacguguggaagagcuacguccacgugguggacggcugcaacuccagcaccugcaugaugugcuacaagcggaaccgcgccacgcgggucgagugcaccaccaucgugaacgggguccgccgguccuucuacguguacgccaacggcggcaagggguucugcaagcuccacaacuggaacugcgugaacugcgacaccuucugcgccggcagcacguucaucuccgacgaggucgcgcgcgaccugagccugcaguucaagcggccgaucaaccccaccgaccaguccagcuacaucguggacuccgugaccgucaagaacgggagcauccaccucuacuucgacaaggccggccagaagaccuacgagcgccacucccugagccacuucgugaaccuggacaaccuccgggccaacaacacgaaggggucccugcccaucaacgugaucgucuucgacggcaagagcaagugcgaggaguccagcgccaaguccgccagcguguacuacucccagcugaugugccagcccauccuccugcuggaccaggcgcucgugagcgacgucggcgacagcgccgagguggccgugaagauguucgacgccuacgucaacaccuucuccagcaccuucaacgugccgauggagaagcugaagacccugguggccacggcggaggccgagcucgccaagaacgucucccuggacaacgugcugagcaccuucaucuccgccgcgcgccagggguucguggacagcgacgucgagaccaaggacgugguggagugccucaagcugucccaccagagcgacaucgaggucaccggcgacuccugcaacaacuacaugcugacguacaacaagguggagaacaugaccccccgggaccucggggccugcaucgacugcagcgcccgccacaucaacgcccagguggccaagucccacaacaucgcgcugaucuggaacgucaaggacuucaugagccuguccgagcagcuccggaagcagauccgcagcgccgccaagaagaacaaccugcccuucaagcugaccugcgccaccacgcgccagguggugaacgucgugaccaccaagaucgcccucaagggcggguga

SEQ ID NO: 17684 - RNA, 5841 nt, Artificial Sequence
  SARS-CoV-2__MT886363.1__non-structural protein 3 (NSP3) CDS gc
auggcccccaccaaggugaccuucggcgacgacacggucaucgaggugcagggguacaagagcgugaacaucaccuucgagcuggacgagcgcaucgacaagguccucaacgagaagugcuccgccuacaccguggagcugggcaccgaggugaacgaguucgcgugcgucguggccgacgccgugaucaagacgcugcagccggucagcgagcuccugaccccccuggggaucgaccucgacgagugguccauggccaccuacuaccuguucgacgagagcggcgaguucaagcuggccucccacauguacugcagcuucuacccccccgacgaggacgaggaggagggggacugcgaggaggaggaguucgagccguccacccaguacgaguacggcacggaggacgacuaccagggcaagccccucgaguucggggcgaccagcgccgcccugcagcccgaggaggagcaggaggaggacuggcuggacgacgacucccagcagaccgugggccagcaggacgggagcgaggacaaccagaccacgaccauccagaccaucguggagguccagccccagcucgagauggagcugaccccgguggugcagacgaucgaggucaacuccuucagcggcuaccugaagcucaccgacaacguguacaucaagaacgccgacaucguggaggaggcgaagaaggucaagcccaccgugguggucaacgccgccaacguguaccugaagcacgggggcggcguggccggggcccugaacaaggcgaccaacaacgccaugcaggucgaguccgacgacuacaucgccacgaacggcccccucaagguggggggcagcugcguccuguccggccacaaccuggccaagcacugccuccacgugguggggcccaacgucaacaagggcgaggacauccagcugcugaagagcgccuacgagaacuucaaccagcacgaggugcuccuggcgccgcugcucuccgccgggaucuucggcgccgaccccauccacagccugcgggugugcgucgacaccgugcgcaccaacguguaccuggccgucuucgacaagaaccucuacgacaagcugguguccagcuuccuggagaugaagagcgagaagcagguggagcagaagaucgccgagauccccaaggaggaggucaagcccuucaucaccgaguccaagccgagcguggagcagcggaagcaggacgacaagaagaucaaggcgugcguggaggaggucacgaccacccucgaggagaccaaguuccugacggagaaccugcuccuguacaucgacaucaacgggaaccugcaccccgacuccgccacccucgugagcgacaucgacaucaccuuccugaagaaggacgcccccuacaucgugggcgacgucgugcaggagggcgugcugaccgccgucgugauccccacgaagaaggccgggggcaccaccgagaugcucgcgaaggcccugcgcaaggugccgaccgacaacuacaucacgaccuaccccgggcagggccugaacggguacaccgucgaggaggccaagaccgugcucaagaagugcaaguccgccuucuacauccugcccagcaucaucuccaacgagaagcaggagauccugggcaccgugagcuggaaccuccgggagaugcuggcgcacgccgaggagacgcgcaagcugaugcccgucugcguggagaccaaggccaucguguccaccauccagcggaaguacaagggcaucaagauccaggagggggucguggacuacggcgcccgcuucuacuucuacaccagcaagacgaccguggccucccugaucaacacccucaacgaccugaacgagacccuggucacgaugccgcucggguacgugacccacggccugaaccuggaggaggcggcccgguacaugcgcagccucaaggugcccgccaccgucuccgugagcucccccgacgccgugaccgccuacaacggguaccugacgagcuccagcaagacccccgaggagcacuucaucgagaccaucucccuggcgggcagcuacaaggacuggagcuacuccggccagagcacccagcucgggaucgaguuccugaagcggggcgacaaguccgucuacuacacgagcaacccgaccaccuuccaccuggacggggaggugaucaccuucgacaaccucaagacgcugcugucccuccgcgaggugcggaccaucaaggucuucaccaccguggacaacaucaaccugcacacgcagguggucgacaugagcaugaccuacggccagcaguucggccccaccuaccuggacggggccgacgugaccaagaucaagccccacaacucccacgagggcaagacguucuacgugcucccgaacgacgacacccugcgcgucgaggccuucgaguacuaccacaccaccgaccccagcuuccuggggcgguacauguccgcccucaaccacacgaagaaguggaaguacccccaggugaacggccugaccagcaucaagugggccgacaacaacugcuaccuggcgaccgcccuccugacccugcagcagaucgagcucaaguucaaccccccggcccugcaggacgccuacuaccgcgcgcgggccggggaggccgccaacuucugcgcccugauccucgcguacugcaacaagacggugggcgagcugggcgacguccgcgagaccauguccuaccuguuccagcacgccaaccucgacagcugcaagcgggugcugaacgucgugugcaagaccugcgggcagcagcagaccacccugaagggcguggaggccgucauguacauggggacgcucuccuacgagcaguucaagaagggcgugcagauccccugcaccugcgggaagcaggccaccaaguaccuggugcagcaggagagccccuucgucaugauguccgcccccccggcgcaguacgagcugaagcacggcaccuucacgugcgccagcgaguacaccggcaacuaccagugcgggcacuacaagcacaucaccuccaaggagacccucuacugcaucgacggcgcccugcugacgaagagcagcgaguacaaggggcccaucaccgacguguucuacaaggagaacuccuacaccaccacgaucaagcccgugaccuacaagcucgacggcgucgugugcaccgagaucgaccccaagcuggacaacuacuacaagaaggacaacagcuacuucaccgagcagccgaucgaccuggugcccaaccagcccuaccccaacgccuccuucgacaacuucaaguucgucugcgacaacaucaaguucgccgacgaccucaaccagcugacgggguacaagaagccggcgagccgcgagcugaaggugaccuucuuccccgaccucaacggcgacguggucgccaucgacuacaagcacuacacccccuccuucaagaagggcgccaagcugcugcacaagcccaucguguggcacgugaacaacgccaccaacaaggcgacguacaagccgaacaccuggugcauccggugccucuggagcaccaagcccgucgagaccuccaacagcuucgacgugcugaaguccgaggacgcccaggggauggacaaccuggccugcgaggaccucaagcccgugagcgaggaggucguggagaaccccacgauccagaaggacgugcuggagugcaacgucaagaccaccgagguggugggcgacaucauccugaagccggccaacaacucccucaagaucaccgaggaggucgggcacacggaccugauggccguguacguggacaacagcucccugaccaucaagaagcccaacgagcucagccgcguccugggccugaagacccucgcgacccacgggcuggccgccgugaacuccgugcccugggacacgaucgccaacuacgccaagccguuccugaacaaggucgugagcaccaccaccaacaucgugacgcgcugccucaaccgggucugcaccaacuacaugcccuacuucuucacccugcugcuccagcugugcaccuucacccgcuccacgaacagccggaucaaggcguccaugcccaccaccaucgccaagaacaccgugaagagcgugggcaaguucugccuggaggccagcuucaacuaccucaagucccccaacuucagcaagcugaucaacaucaucaucugguuccugcuccuguccgucugccugggcagccucaucuacuccacggccgcccugggggugcugaugagcaaccucggcaugccguccuacugcaccggguaccgcgagggcuaccugaacagcaccaacgugaccaucgcgacguacugcaccggcuccauccccugcagcgucugccuguccgggcucgacagccuggacaccuaccccucccuggagaccauccagaucacgaucagcuccuucaagugggaccucaccgccuucggccugguggccgagugguuccuggccuacauccucuucacccgguucuucuacgugcuggggcuggccgcgaucaugcagcucuucuucagcuacuucgccguccacuucaucuccaacagcuggcugauguggcugaucaucaaccuggugcagauggcccccaucuccgccauggugcgcauguacaucuucuucgcgagcuucuacuacgucuggaagagcuacgugcacguggucgacggcugcaacuccagcaccugcaugaugugcuacaagcggaaccgcgccacgcggguggagugcaccaccaucgucaacggggugcgccgguccuucuacguguacgccaacggcggcaagggguucugcaagcuccacaacuggaacugcgucaacugcgacaccuucugcgccggcagcacguucaucuccgacgagguggcccgcgaccugagccugcaguucaagcggccgaucaaccccaccgaccaguccagcuacaucguggacuccgucaccgugaagaacgggagcauccaccucuacuucgacaaggcgggccagaagaccuacgagcgccacucccugagccacuucgugaaccuggacaaccuccgggccaacaacacgaaggggucccugcccaucaacgucaucguguucgacggcaagagcaagugcgaggaguccagcgccaaguccgccagcguguacuacucccagcugaugugccagcccauccuccugcuggaccaggcccucgucagcgacgugggcgacagcgcggagguggccgucaagauguucgacgccuacgugaacaccuucuccagcaccuucaacgugccgauggagaagcugaagacccuggucgccacggccgaggcggagcucgccaagaacgugucccuggacaacgugcugagcaccuucaucuccgccgcccgccagggguucgucgacagcgacguggagaccaaggacguggucgagugccucaagcugucccaccagagcgacaucgaggugaccggcgacuccugcaacaacuacaugcugacguacaacaagguggagaacaugaccccccgggaccucggggcgugcaucgacugcagcgcccgccacaucaacgcccaggucgccaagucccacaacaucgcccugaucuggaacgugaaggacuucaugagccuguccgagcagcuccggaagcagauccgcagcgcggccaagaagaacaaccugcccuucaagcugaccugcgccaccacgcgccagguggucaacguggugaccaccaagaucgcccucaagggcggguga

SEQ ID NO: 17685 - RNA, 5841 nt, Artificial Sequence
  SARS-CoV-2__MT886381.1__non-structural protein 3 (NSP3) CDS gc
auggcccccaccaaggugaccuucggcgacgacacggucaucgaggugcagggguacaagagcgugaacaucaccuucgagcuggacgagcgcaucgacaagguccucaacgagaagugcuccgccuacaccguggagcugggcaccgaggugaacgaguucgcgugcgucguggccgacgccgugaucaagacgcugcagccggucagcgagcuccugaccccccuggggaucgaccucgacgagugguccauggccaccuacuaccuguucgacgagagcggcgaguucaagcuggccucccacauguacugcagcuucuacccccccgacgaggacgaggaggagggggacugcgaggaggaggaguucgagccguccacccaguacgaguacggcacggaggacgacuaccagggcaagccccucgaguucggggcgaccagcgccgcccugcagcccgaggaggagcaggaggaggacuggcuggacgacgacucccagcagaccgugggccagcaggacgggagcgaggacaaccagaccacgaccauccagaccaucguggagguccagccccagcucgagauggagcugaccuccguggugcagacgaucgaggucaacagcuucuccggcuaccugaagcucaccgacaacguguacaucaagaacgccgacaucguggaggaggcgaagaaggucaagccgaccgugguggucaacgccgccaacguguaccugaagcacgggggcggcguggccggggcccugaacaaggcgaccaacaacgccaugcaggucgagagcgacgacuacaucgccacgaacggcccccucaagguggggggcuccugcguccugagcggccacaaccuggccaagcacugccuccacgugguggggcccaacgucaacaagggcgaggacauccagcugcugaaguccgccuacgagaacuucaaccagcacgaggugcuccuggcgccccugcucagcgccgggaucuucggcgccgacccgauccacucccugcgggugugcgucgacaccgugcgcaccaacguguaccuggccgucuucgacaagaaccucuacgacaagcuggugagcagcuuccuggagaugaaguccgagaagcagguggagcagaagaucgccgagauccccaaggaggaggucaagcccuucaucaccgagagcaagcccuccguggagcagcggaagcaggacgacaagaagaucaaggcgugcguggaggaggucacgaccacccucgaggagaccaaguuccugacggagaaccugcuccuguacaucgacaucaacgggaaccugcacccggacagcgccacccucguguccgacaucgacaucaccuuccugaagaaggacgcccccuacaucgugggcgacgucgugcaggagggcgugcugaccgccgucgugauccccacgaagaaggccgggggcaccaccgagaugcucgcgaaggcccugcgcaaggugcccaccgacaacuacaucacgaccuacccggggcagggccugaacggguacaccgucgaggaggccaagaccgugcucaagaagugcaagagcgccuucuacauccugcccuccaucaucagcaacgagaagcaggagauccugggcaccguguccuggaaccuccgggagaugcuggcgcacgccgaggagacgcgcaagcugaugcccgucugcguggagaccaaggccaucgugagcaccauccagcggaaguacaagggcaucaagauccaggagggggucguggacuacggcgcccgcuucuacuucuacaccuccaagacgaccguggccagccugaucaacacccucaacgaccugaacgagacccuggucacgaugccccucggguacgugacccacggccugaaccuggaggaggcggcccgguacaugcgcucccucaaggugccggccaccgucagcguguccagccccgacgccgugaccgccuacaacggguaccugacguccagcuccaagacccccgaggagcacuucaucgagaccaucagccuggcgggcagcuacaaggacugguccuacagcggccaguccacccagcucgggaucgaguuccugaagcggggcgacaagagcgucuacuacacguccaaccccaccaccuuccaccuggacggggaggugaucaccuucgacaaccucaagacgcugcugagccuccgcgaggugcggaccaucaaggucuucaccaccguggacaacaucaaccugcacacgcagguggucgacauguccaugaccuacggccagcaguucggcccgaccuaccuggacggggccgacgugaccaagaucaagccccacaacagccacgagggcaagacguucuacgugcuccccaacgacgacacccugcgcgucgaggccuucgaguacuaccacaccaccgacccguccuuccuggggcgguacaugagcgcccucaaccacacgaagaaguggaaguacccccaggugaacggccugaccuccaucaagugggccgacaacaacugcuaccuggcgaccgcccuccugacccugcagcagaucgagcucaaguucaacccccccgcccugcaggacgccuacuaccgcgcgcgggccggggaggccgccaacuucugcgcccugauccucgcguacugcaacaagacggugggcgagcugggcgacguccgcgagaccaugagcuaccuguuccagcacgccaaccucgacuccugcaagcgggugcugaacgucgugugcaagaccugcgggcagcagcagaccacccugaagggcguggaggccgucauguacauggggacgcucagcuacgagcaguucaagaagggcgugcagaucccgugcaccugcgggaagcaggccaccaaguaccuggugcagcaggagucccccuucgucaugaugagcgccccccccgcgcaguacgagcugaagcacggcaccuucacgugcgccuccgaguacaccggcaacuaccagugcgggcacuacaagcacaucaccagcaaggagacccucuacugcaucgacggcgcccugcugacgaagagcuccgaguacaaggggccgaucaccgacguguucuacaaggagaacagcuacaccaccacgaucaagcccgugaccuacaagcucgacggcgucgugugcaccgagaucgaccccaagcuggacaacuacuacaagaaggacaacuccuacuucaccgagcagcccaucgaccuggugccgaaccagcccuaccccaacgccagcuucgacaacuucaaguucgucugcgacaacaucaaguucgccgacgaccucaaccagcugacgggguacaagaagcccgcgucccgcgagcugaaggugaccuucuucccggaccucaacggcgacguggucgccaucgacuacaagcacuacacccccagcuucaagaagggcgccaagcugcugcacaagcccaucguguggcacgugaacaacgccaccaacaaggcgacguacaagcccaacaccuggugcauccggugccucugguccaccaagccggucgagaccagcaacuccuucgacgugcugaagagcgaggacgcccaggggauggacaaccuggccugcgaggaccucaagcccguguccgaggaggucguggagaaccccacgauccagaaggacgugcuggagugcaacgucaagaccaccgagguggugggcgacaucauccugaagcccgccaacaacagccucaagaucaccgaggaggucgggcacacggaccugauggccgcguacguggacaacuccagccugaccaucaagaagccgaacgagcucucccgcgugcugggccugaagacccucgccacccacgggcuggccgccgucaacagcgugcccugggacacgaucgccaacuacgcgaagcccuuccugaacaagguggucuccaccaccaccaacaucgugacgcgcugccucaaccgggugugcaccaacuacaugccguacuucuucacccugcugcuccagcugugcaccuucacccgcagcacgaacucccggaucaaggccagcaugcccaccaccaucgccaagaacaccgucaagagcgugggcaaguucugccuggaggccuccuucaacuaccucaagagccccaacuucuccaagcugaucaacaucaucaucugguuccugcuccugagcgugugccugggcucccucaucuacagcacggccgcgcuggggguccugauguccaaccucggcaugcccagcuacugcaccggguaccgcgagggcuaccugaacuccaccaacgugaccaucgccacguacugcaccggcagcaucccgugcuccgugugccugagcgggcucgacucccuggacaccuaccccagccuggagaccauccagaucacgaucuccagcuucaagugggaccucaccgccuucggccuggucgccgagugguuccuggccuacauccucuucacccgguucuucuacgugcuggggcuggcggccaucaugcagcucuucuucuccuacuucgccgugcacuucaucagcaacuccuggcugauguggcugaucaucaaccugguccagauggcccccaucagcgcgauggugcgcauguacaucuucuucgccagcuucuacuacguguggaaguccuacguccacgugguggacggcugcaacagcuccaccugcaugaugugcuacaagcggaaccgcgccacgcgggucgagugcaccaccaucgugaacgggguccgccggagcuucuacguguacgccaacggcggcaagggguucugcaagcuccacaacuggaacugcgugaacugcgacaccuucugcgccggcuccacguucaucagcgacgaggucgcgcgcgaccugucccugcaguucaagcggcccaucaacccgaccgaccagagcuccuacaucguggacagcgugaccgucaagaacggguccauccaccucuacuucgacaaggccggccagaagaccuacgagcgccacagccugucccacuucgugaaccuggacaaccuccgggccaacaacacgaaggggagccugcccaucaacgugaucgucuucgacggcaaguccaagugcgaggagagcuccgccaagagcgccuccguguacuacagccagcugaugugccagcccauccuccugcuggaccaggcgcucgugagcgacgucggcgacuccgccgagguggccgugaagauguucgacgccuacgucaacaccuucagcuccaccuucaacgugcccauggagaagcugaagacccugguggccacggcggaggccgagcucgccaagaacgucagccuggacaacgugcuguccaccuucaucagcgccgcgcgccagggguucguggacuccgacgucgagaccaaggacgugguggagugccucaagcugagccaccaguccgacaucgaggucaccggcgacagcugcaacaacuacaugcugacguacaacaagguggagaacaugaccccgcgggaccucggggccugcaucgacugcuccgcccgccacaucaacgcccagguggccaagagccacaacaucgcgcugaucuggaacgucaaggacuucaugucccugagcgagcagcuccggaagcagauccgcuccgccgccaagaagaacaaccugcccuucaagcugaccugcgccaccacgcgccagguggugaacgucgugaccaccaagaucgcccucaagggcggguga

SEQ ID NO: 17686 - RNA, 5841 nt, Artificial Sequence
  SARS-CoV-2__MT879619.1__non-structural protein 3 (NSP3) CDS gc
auggcccccaccaaggugaccuucggcgacgacacggucaucgaggugcagggguacaagagcgugaacaucaccuucgagcuggacgagcgcaucgacaagguccucaacgagaagugcuccgccuacaccguggagcugggcaccgaggugaacgaguucgcgugcgucguggccgacgccgugaucaagacgcugcagccggucagcgagcuccugaccccccuggggaucgaccucgacgagugguccauggccaccuacuaccuguucgacgagagcggcgaguucaagcuggccucccacauguacugcagcuucuacccccccgacgaggacgaggaggagggggacugcgaggaggaggaguucgagccguccacccaguacgaguacggcacggaggacgacuaccagggcaagccccucgaguucggggcgaccagcgccgcccugcagcccgaggaggagcaggaggaggacuggcuggacgacgacucccagcagaccgugggccagcaggacgggagcgaggacaaccagaccacgaccauccagaccaucguggagguccagccccagcucgagauggagcugaccccgguggugcagacgaucgaggucaacuccuucagcggcuaccugaagcucaccgacaacguguacaucaagaacgccgacaucguggaggaggcgaagaaggucaagcccaccgugguggucaacgccgccaacguguaccugaagcacgggggcggcguggccggggcccugaacaaggcgaccaacaacgccaugcaggucgaguccgacgacuacaucgccacgaacggcccccucaagguggggggcagcugcguccuguccggccacaaccuggccaagcacugccuccacgugguggggcccaacgucaacaagggcgaggacauccagcugcugaagagcgccuacgagaacuucaaccagcacgaggugcuccuggcgccgcugcucuccgccgggaucuucggcgccgaccccauccacagccugcgggugugcgucgacaccgugcgcaccaacguguaccuggccgucuucgacaagaaccucuacgacaagcugguguccagcuuccuggagaugaagagcgagaagcagguggagcagaagaucgccgagauccccaaggaggaggucaagcccuucaucaccgaguccaagccgagcguggagcagcggaagcaggacgacaagaagaucaaggcgugcguggaggaggucacgaccacccucgaggagaccaaguuccugacggagaaccugcuccuguacaucgacaucaacgggaaccugcaccccgacuccgccacccucgugagcgacaucgacaucaccuuccugaagaaggacgcccccuacaucgugggcgacgucgugcaggagggcgugcugaccgccgucgugauccccacgaagaaggccgggggcaccaccgagaugcucgcgaaggcccugcgcaaggugccgaccgacaacuacaucacgaccuaccccgggcagggccugaacggguacaccgucgaggaggccaagaccgugcucaagaagugcaaguccgccuucuacauccugcccagcaucaucuccaacgagaagcaggagauccugggcaccgugagcuggaaccuccgggagaugcuggcgcacgccgaggagacgcgcaagcugaugcccgucugcguggagaccaaggccaucguguccaccauccagcggaaguacaagggcaucaagauccaggagggggucguggacuacggcgcccgcuucuacuucuacaccagcaagacgaccguggccucccugaucaacacccucaacgaccugaacgagacccuggucacgaugccgcucggguacgugacccacggccugaaccuggaggaggcggcccgguacaugcgcagccucaaggugcccgccaccgucuccgugagcucccccgacgccgugaccgccuacaacggguaccugacgagcuccagcaagacccccgaggagcacuucaucgagaccaucucccuggcgggcagcuacaaggacuggagcuacuccggccagagcacccagcucgggaucgaguuccugaagcggggcgacaaguccgucuacuacacgagcaacccgaccaccuuccaccuggacggggaggugaucaccuucgacaaccucaagacgcugcugucccuccgcgaggugcggaccaucaaggucuucaccaccguggacaacaucaaccugcacacgcagguggucgacaugagcaugaccuacggccagcaguucggccccaccuaccuggacggggccgacgugaccaagaucaagccccacaacucccacgagggcaagacguucuacgugcucccgaacgacgacacccugcgcgucgaggccuucgaguacuaccacaccaccgaccccagcuuccuggggcgguacauguccgcccucaaccacacgaagaaguggaaguacccccaggugaacggccugaccagcaucaagugggccgacaacaacugcuaccuggcgaccgcccuccugacccugcagcagaucgagcucaaguucaaccccccggcccugcaggacgccuacuaccgcgcgcgggccggggaggccgccaacuucugcgcccugauccucgcguacugcaacaagacggugggcgagcugggcgacguccgcgagaccauguccuaccuguuccagcacgccaaccucgacagcugcaagcgggugcugaacgucgugugcaagaccugcgggcagcagcagaccacccugaagggcguggaggccgucauguacauggggacgcucuccuacgagcaguucaagaagggcgugcagauccccugcaccugcgggaagcaggccaccaaguaccuggugcagcaggagagccccuucgucaugauguccgcccccccggcgcaguacgagcugaagcacggcaccuucacgugcgccagcgaguacaccggcaacuaccagugcgggcacuacaagcacaucaccuccaaggagacccucuacugcaucgacggcgcccugcugacgaagagcagcgaguacaaggggcccaucaccgacguguucuacaaggagaacuccuacaccaccacgaucaagcccgugaccuacaagcucgacggcgucgugugcaccgagaucgaccccaagcuggacaacuacuacaagaaggacaacagcuacuucaccgagcagccgaucgaccuggugcccaaccagcccuaccccaacgccuccuucgacaacuucaaguucgucugcgacaacaucaaguucgccgacgaccucaaccagcugacgggguacaagaagccggcgagccgcgagcugaaggugaccuucuuccccgaccucaacggcgacguggucgccaucgacuacaagcacuacacccccuccuucaagaagggcgccaagcugcugcacaagcccaucguguggcacgugaacaacgccaccaacaaggcgacguacaagccgaacaccuggugcauccggugccucuggagcaccaagcccgucgagaccuccaacagcuucgacgugcugaaguccgaggacgcccaggggauggacaaccuggccugcgaggaccucaagcccgugagcgaggaggucguggagaaccccacgauccagaaggacgugcuggagugcaacgucaagaccaccgagguggugggcgacaucauccugaagccggccaacaacucccucaagaucaccgaggaggucgggcacacggaccugauggccgcguacguggacaacagcucccugaccaucaagaagcccaacgagcucagccgcgugcugggccugaagacccucgccacccacgggcuggccgccgucaacuccgugcccugggacacgaucgccaacuacgcgaagccguuccugaacaagguggucagcaccaccaccaacaucgugacgcgcugccucaaccgggugugcaccaacuacaugcccuacuucuucacccugcugcuccagcugugcaccuucacccgcuccacgaacagccggaucaaggccuccaugcccaccaccaucgccaagaacaccgucaagagcgugggcaaguucugccuggaggccagcuucaacuaccucaagucccccaacuucagcaagcugaucaacaucaucaucugguuccugcuccuguccgugugccugggcagccucaucuacuccacggccgcgcuggggguccugaugagcaaccucggcaugccguccuacugcaccggguaccgcgagggcuaccugaacagcaccaacgugaccaucgccacguacugcaccggcuccauccccugcagcgugugccuguccgggcucgacagccuggacaccuaccccucccuggagaccauccagaucacgaucagcuccuucaagugggaccucaccgccuucggccuggucgccgagugguuccuggccuacauccucuucacccgguucuucuacgugcuggggcuggcggccaucaugcagcucuucuucagcuacuucgccgugcacuucaucuccaacagcuggcugauguggcugaucaucaaccugguccagauggcccccaucuccgcgauggugcgcauguacaucuucuucgccagcuucuacuacguguggaagagcuacguccacgugguggacggcugcaacuccagcaccugcaugaugugcuacaagcggaaccgcgccacgcgggucgagugcaccaccaucgugaacgggguccgccgguccuucuacguguacgccaacggcggcaagggguucugcaagcuccacaacuggaacugcgugaacugcgacaccuucugcgccggcagcacguucaucuccgacgaggucgcgcgcgaccugagccugcaguucaagcggccgaucaaccccaccgaccaguccagcuacaucguggacuccgugaccgucaagaacgggagcauccaccucuacuucgacaaggccggccagaagaccuacgagcgccacucccugagccacuucgugaaccuggacaaccuccgggccaacaacacgaaggggucccugcccaucaacgugaucgucuucgacggcaagagcaagugcgaggaguccagcgccaaguccgccagcguguacuacucccagcugaugugccagcccauccuccugcuggaccaggcgcucgugagcgacgucggcgacagcgccgagguggccgugaagauguucgacgccuacgucaacaccuucuccagcaccuucaacgugccgauggagaagcugaagacccugguggccacggcggaggccgagcucgccaagaacgucucccuggacaacgugcugagcaccuucaucuccgccgcgcgccagggguucguggacagcgacgucgagaccaaggacgugguggagugccucaagcugucccaccagagcgacaucgaggucaccggcgacuccugcaacaacuacaugcugacguacaacaagguggagaacaugaccccccgggaccucggggccugcaucgacugcagcgcccgccacaucaacgcccacguggccaagucccacaacaucgcgcugaucuggaacgucaaggacuucaugagccuguccgagcagcuccggaagcagauccgcagcgccgccaagaagaacaaccugcccuucaagcugaccugcgccaccacgcgccagguggugaacgucgugaccaccaagaucgcccucaagggcggguga

SEQ ID NO: 17687 - RNA, 5841 nt, Artificial Sequence
  SARS-CoV-2__MT880873.1__non-structural protein 3 (NSP3) CDS gc
auggcccccaccaaggugaccuucggcgacgacacggucaucgaggugcagggguacaagagcgugaacaucaccuucgagcuggacgagcgcaucgacaagguccucaacgagaagugcuccgccuacaccguggagcugggcaccgaggugaacgaguucgcgugcgucguggccgacgccgugaucaagacgcugcagccggucagcgagcuccugaccccccuggggaucgaccucgacgagugguccauggccaccuacuaccuguucgacgagagcggcgaguucaagcuggccucccacauguacugcagcuucuacccccccgacgaggacgaggaggagggggacugcgaggaggaggaguucgagccguccacccaguacgaguacggcacggaggacgacuaccagggcaagccccucgaguucggggcgaccagcgccgcccugcagcccgaggaggagcaggaggaggacuggcuggacgacgacucccagcagaccgugggccagcaggacgggagcgaggacaaccagaccacgaccauccagaccaucguggagguccagccccagcucgagauggagcugaccccgguggugcagacgaucgaggucaacuccuucagcggcuaccugaagcucaccgacaacguguacaucaagaacgccgacaucguggaggaggcgaagaaggucaagcccaccgugguggucaacgccgccaacguguaccugaagcacgggggcggcguggccggggcccugaacaaggcgaccaacaacgccaugcaggucgaguccgacgacuacaucgccacgaacggcccccucaagguggggggcagcugcguccuguccggccacaaccuggccaagcacugccuccacgugguggggcccaacgucaacaagggcgaggacauccagcugcugaagagcgccuacgagaacuucaaccagcacgaggugcuccuggcgccgcugcucuccgccgggaucuucggcgccgaccccauccacagccugcgggugugcgucgacaccgugcgcaccaacguguaccuggccgucuucgacaagaaccucuacgacaagcugguguccagcuuccuggagaugaagagcgagaagcagguggagcagaagaucgccgagauccccaaggaggaggucaagcccuucaucaccgaguccaagccgagcguggagcagcggaagcaggacgacaagaagaucaaggcgugcguggaggaggucacgaccacccucgaggagaccaaguuccugacggagaaccugcuccuguacaucgacaucaacgggaaccugcaccccgacuccgccacccucgugagcgacaucgacaucaccuuccugaagaaggacgcccccuacaucgugggcgacgucgugcaggagggcgugcugaccgccgucgugauccccacgaagaaggccgggggcaccaccgagaugcucgcgaaggcccugcgcaaggugccgaccgacaacuacaucacgaccuaccccgggcagggccugaacggguacaccgucgaggaggccaagaccgugcucaagaagugcaaguccgccuucuacauccugcccagcaucaucuccaacgagaagcaggagauccugggcaccgugagcuggaaccuccgggagaugcuggcgcacgccgaggagacgcgcaagcugaugcccgucugcguggagaccaaggccaucguguccaccauccagcggaaguacaagggcaucaagauccaggagggggucguggacuacggcgcccgcuucuacuucuacaccagcaagacgaccguggccucccugaucaacacccucaacgaccugaacgagacccuggucacgaugccgcucggguacgugacccacggccugaaccuggaggaggcggcccgguacaugcgcagccucaaggugcccgccaccgucuccgugagcucccccgacgccgugaccgccuacaacggguaccugacgagcuccagcaagacccccgaggagcacuucaucgagaccaucucccuggcgggcagcuacaaggacuggagcuacuccggccagagcacccagcucgggaucgaguuccugaagcggggcgacaaguccgucuacuacacgagcaacccgaccaccuuccaccuggacggggaggugaucaccuucgacaaccucaagacgcugcugucccuccgcgaggugcggaccaucaaggucuucaccaccguggacaacaucaaccugcacacgcagguggucgacaugagcaugaccuacggccagcaguucggccccaccuaccuggacggggccgacgugaccaagaucaagccccacaacucccacgagggcaagacguucuacgugcucccgaacgacgacacccugcgcgucgaggccuucgaguacuaccacaccaccgaccccagcuuccuggggcgguacauguccgcccucaaccacacgaagaaguggaaguacccccaggugaacggccugaccagcaucaagugggccgacaacaacugcuaccuggcgaccgcccuccugacccugcagcagaucgagcucaaguucaaccccccggcccugcaggacgccuacuaccgcgcgcgggccggggaggccgccaacuucugcgcccugauccucgcguacugcaacaagacggugggcgagcugggcgacguccgcgagaccauguccuaccuguuccagcacgccaaccucgacagcugcaagcgggugcugaacgucgugugcaagaccugcgggcagcagcagaccacccugaagggcguggaggccgucauguacauggggacgcucuccuacgagcaguucaagaagggcgugcagauccccugcaccugcgggaagcaggccaccaaguaccuggugcagcaggagagccccuucgucaugauguccgcccccccggcgcaguacgagcugaagcacggcaccuucacgugcgccagcgaguacaccggcaacuaccagugcgggcacuacaagcacaucaccuccaaggagacccucuacugcaucgacggcgcccugcugacgaagagcagcgaguacaaggggcccaucaccgacguguucuacaaggagaacuccuacaccaccacgaucaagcccgugaccuacaagcucgacggcgucgugugcaccgagaucgaccccaagcuggacaacuacuacaagaaggacaacagcuacuucaccgagcagccgaucgaccuggugcccaaccagcccuaccccaacgccuccuucgacaacuucaaguucgucugcgacaacaucaaguucgccgacgaccucaaccagcugacgggguacaagaagccggcgagccgcgagcugaaggugaccuucuuccccgaccucaacggcgacguggucgccaucgacuacaagcacuacacccccuccuucaagaagggcgccaagcugcugcacaagcccaucguguggcacgugaacaacgccaccaacaaggcgacguacaagccgaacaccuggugcauccggugccucuggagcaccaagcccgucgagaccuccaacagcuucgacgugcugaaguccgaggacgcccaggggauggacaaccuggccugcgaggaccucaagcccgugagcgaggaggucguggagaaccccacgauccagaaggacgugcuggagugcaacgucaagaccaccgagguggugggcgacaucauccugaagccggccaacaacucccucaagaucaccgaggaggucgggcacacggaccugauggccgcguacguggacaacagcucccugaccaucaagaagcccaacgagcucagccgcgugcugggccugaagacccucgccacccacgggcuggccgccgucaacuccgugcccugggacacgaucgccaacuacgcgaagccguuccugaacaagguggucagcaccaccaccaacaucgugacgcgcugccucaaccgggugugcaccaacuacaugcccuacuucuucacccugcugcuccagcugugcaccuucacccgcuccacgaacagccggaucaaggccuccaugcccaccaccaucgccaagaacaccgucaagagcgugggcaaguucugccuggaggccagcuucaacuaccucaagucccccaacuucagcaagcugaucaacaucaucaucugguuccugcuccuguccgugugccugggcagccucaucuacuccacggccgcgcuggggguccugaugagcaaccucggcaugccguccuacugcaccggguaccgcgagggcuaccugaacagcaccaacgugaccaucgccacguacugcaccggcuccauccccugcagcgugugccuguccgggcucgacagccuggacaccuaccccucccuggagaccauccagaucacgaucagcuccuucaagugggaccucaccgccuucggccuggucgccgagugguuccuggccuacauccucuucacccgguucuucuacgugcuggggcuggcggccaucaugcagcucuucuucagcuacuucgccgugcacuucaucuccaacagcuggcugauguggcugaucaucaaccugguccagauggcccccaucuccgcgauggugcgcauguacaucuucuucgccagcuucuacuacguguggaagagcuacguccacgugguggacggcugcaacuccagcaccugcaugaugugcuacaagcggaaccgcgccacgcgggucgagugcaccaccaucgugaacgggguccgccgguccuucuacguguacgccaacggcggcaagggguucugcaagcuccacaacuggaacugcgugaacugcgacaccuucugcgccggcagcacguucaucuccgacgaggucgcgcgcgaccugagccugcaguucaagcggccgaucaaccccaccgaccaguccagcuacaucguggacuccgugaccgucaagaacgggagcauccaccucuacuucgacaaggccggccagaagaccuacgagcgccacucccugagccacuucgugaaccuggacaaccuccgggccaacaacacgaaggggucccugcccaucaacgugaucgucuucgacggcaagagcaagugcgaggaguccagcgcccgcuccgccagcguguacuacucccagcugaugugccagcccauccuccugcuggaccaggcgcucgugagcgacgucggcgacagcgccgagguggccgugaagauguucgacgccuacgucaacaccuucuccagcaccuucaacgugccgauggagaagcugaagacccugguggccacggcggaggccgagcucgccaagaacgucucccuggacaacgugcugagcaccuucaucuccgccgcgcggcagggguucguggacagcgacgucgagaccaaggacgugguggagugccucaagcugucccaccagagcgacaucgaggucaccggcgacuccugcaacaacuacaugcugacguacaacaagguggagaacaugaccccccgcgaccucggggccugcaucgacugcagcgcccggcacaucaacgcccagguggccaagucccacaacaucgcgcugaucuggaacgucaaggacuucaugagccuguccgagcagcuccgcaagcagauccgcagcgccgccaagaagaacaaccugcccuucaagcugaccugcgccaccacgcggcagguggugaacgucgugaccaccaagaucgcccucaagggcggguga

SEQ ID NO: 17688 - RNA, 5841 nt, Artificial Sequence
  SARS-CoV-2__MT880876.1__non-structural protein 3 (NSP3) CDS gc
auggcccccaccaaggugaccuucggcgacgacacggucaucgaggugcagggguacaagagcgugaacaucaccuucgagcuggacgagcgcaucgacaagguccucaacgagaagugcuccgccuacaccguggagcugggcaccgaggugaacgaguucgcgugcgucguggccgacgccgugaucaagacgcugcagccggucagcgagcuccugaccccccuggggaucgaccucgacgagugguccauggccaccuacuaccuguucgacgagagcggcgaguucaagcuggccucccacauguacugcagcuucuacccccccgacgaggacgaggaggagggggacugcgaggaggaggaguucgagccguccacccaguacgaguacggcacggaggacgacuaccagggcaagccccucgaguucggggcgaccagcgccgcccugcagcccgaggaggagcaggaggaggacuggcuggacgacgacucccagcagaccgugggccagcaggacgggagcgaggacaaccagaccacgaccauccagaccaucguggagguccagccccagcucgagauggagcugaccccgguggugcagacgaucgaggucaacuccuucagcggcuaccugaagcucaccgacaacguguacaucaagaacgccgacaucguggaggaggcgaagaaggucaagcccaccgugguggucaacgccgccaacguguaccugaagcacgggggcggcguggccggggcccugaacaaggcgaccaacaacgccaugcaggucgaguccgacgacuacaucgccacgaacggcccccucaagguggggggcagcugcguccuguccggccacaaccuggccaagcacugccuccacgugguggggcccaacgucaacaagggcgaggacauccagcugcugaacagcgccuacgagaacuucaaccagcacgaggugcuccuggcgccgcugcucuccgccgggaucuucggcgccgaccccauccacagccugcgggugugcgucgacaccgugcgcaccaacguguaccuggccgucuucgacaagaaccucuacgacaagcugguguccagcuuccuggagaugaagagcgagaagcagguggagcagaagaucgccgagauccccaaggaggaggucaagcccuucaucaccgaguccaagccgagcguggagcagcggaagcaggacgacaagaagaucaaggcgugcguggaggaggucacgaccacccucgaggagaccaaguuccugacggagaaccugcuccuguacaucgacaucaacgggaaccugcaccccgacuccgccacccucgugagcgacaucgacaucaccuuccugaagaaggacgcccccuacaucgugggcgacgucgugcaggagggcgugcugaccgccgucgugauccccacgaagaaggccgggggcaccaccgagaugcucgcgaaggcccugcgcaaggugccgaccgacaacuacaucacgaccuaccccgggcagggccugaacggguacaccgucgaggaggccaagaccgugcucaagaagugcaaguccgccuucuacauccugcccagcaucaucuccaacgagaagcaggagauccugggcaccgugagcuggaaccuccgggagaugcuggcgcacgccgaggagacgcgcaagcugaugcccgucugcguggagaccaaggccaucguguccaccauccagcggaaguacaagggcaucaagauccaggagggggucguggacuacggcgcccgcuucuacuucuacaccagcaagacgaccguggccucccugaucaacacccucaacgaccugaacgagacccuggucacgaugccgcucggguacgugacccacggccugaaccuggaggaggcggcccgguacaugcgcagccucaaggugcccgccaccgucuccgugagcucccccgacgccgugaccgccuacaacggguaccugacgagcuccagcaagacccccgaggagcacuucaucgagaccaucucccuggcgggcagcuacaaggacuggagcuacuccggccagagcacccagcucgggaucgaguuccugaagcggggcgacaaguccgucuacuacacgagcaacccgaccaccuuccaccuggacggggaggugaucaccuucgacaaccucaagacgcugcugucccuccgcgaggugcggaccaucaaggucuucaccaccguggacaacaucaaccugcacacgcagguggucgacaugagcaugaccuacggccagcaguucggccccaccuaccuggacggggccgacgugaccaagaucaagccccacaacucccacgagggcaagacguucuacgugcucccgaacgacgacacccugcgcgucgaggccuucgaguacuaccacaccaccgaccccagcuuccuggggcgguacauguccgcccucaaccacacgaagaaguggaaguacccccaggugaacggccugaccagcaucaagugggccgacaacaacugcuaccuggcgaccgcccuccugacccugcagcagaucgagcucaaguucaaccccccggcccugcaggacgccuacuaccgcgcgcgggccggggaggccgccaacuucugcgcccugauccucgcguacugcaacaagacggugggcgagcugggcgacguccgcgagaccauguccuaccuguuccagcacgccaaccucgacagcugcaagcgggugcugaacgucgugugcaagaccugcgggcagcagcagaccacccugaagggcguggaggccgucauguacauggggacgcucuccuacgagcaguucaagaagggcgugcagauccccugcaccugcgggaagcaggccaccaaguaccuggugcagcaggagagccccuucgucaugauguccgcccccccggcgcaguacgagcugaagcacggcaccuucacgugcgccagcgaguacaccggcaacuaccagugcgggcacuacaagcacaucaccuccaaggagacccucuacugcaucgacggcgcccugcugacgaagagcagcgaguacaaggggcccaucaccgacguguucuacaaggagaacuccuacaccaccacgaucaagcccgugaccuacaagcucgacggcgucgugugcaccgagaucgaccccaagcuggacaacuacuacaagaaggacaacagcuacuucaccgagcagccgaucgaccuggugcccaaccagcccuaccccaacgccuccuucgacaacuucaaguucgucugcgacaacaucaaguucgccgacgaccucaaccagcugacgggguacaagaagccggcgagccgcgagcugaaggugaccuucuuccccgaccucaacggcgacguggucgccaucgacuacaagcacuacacccccuccuucaagaagggcgccaagcugcugcacaagcccaucguguggcacgugaacaacgccaccaacaaggcgacguacaagccgaacaccuggugcauccggugccucuggagcaccaagcccgucgagaccuccaacagcuucgacgugcugaaguccgaggacgcccaggggauggacaaccuggccugcgaggaccucaagcccgugagcgaggaggucguggagaaccccacgauccagaaggacgugcuggagugcaacgucaagaccaccgagguggugggcgacaucauccugaagccggccaacaacucccucaagaucaccgaggaggucgggcacacggaccugauggccgcguacguggacaacagcucccugaccaucaagaagcccaacgagcucagccgcgugcugggccugaagacccucgccacccacgggcuggccgccgucaacuccgugcccugggacacgaucgccaacuacgcgaagccguuccugaacaagguggucagcaccaccaccaacaucgugacgcgcugccucaaccgggugugcaccaacuacaugcccuacuucuucacccugcugcuccagcugugcaccuucacccgcuccacgaacagccggaucaaggccuccaugcccaccaccaucgccaagaacaccgucaagagcgugggcaaguucugccuggaggccagcuucaacuaccucaagucccccaacuucagcaagcugaucaacaucaucaucugguuccugcuccuguccgugugccugggcagccucaucuacuccacggccgcgcuggggguccugaugagcaaccucggcaugccguccuacugcaccggguaccgcgagggcuaccugaacagcaccaacgugaccaucgccacguacugcaccggcuccauccccugcagcgugugccuguccgggcucgacagccuggacaccuaccccucccuggagaccauccagaucacgaucagcuccuucaagugggaccucaccgccuucggccuggucgccgagugguuccuggccuacauccucuucacccgguucuucuacgugcuggggcuggcggccaucaugcagcucuucuucagcuacuucgccgugcacuucaucuccaacagcuggcugauguggcugaucaucaaccugguccagauggcccccaucuccgcgauggugcgcauguacaucuucuucgccagcuucuacuacguguggaagagcuacguccacgugguggacggcugcaacuccagcaccugcaugaugugcuacaagcggaaccgcgccacgcgggucgagugcaccaccaucgugaacgggguccgccgguccuucuacguguacgccaacggcggcaagggguucugcaagcuccacaacuggaacugcgugaacugcgacaccuucugcgccggcagcacguucaucuccgacgaggucgcgcgcgaccugagccugcaguucaagcggccgaucaaccccaccgaccaguccagcuacaucguggacuccgugaccgucaagaacgggagcauccaccucuacuucgacaaggccggccagaagaccuacgagcgccacucccugagccacuucgugaaccuggacaaccuccgggccaacaacacgaaggggucccugcccaucaacgugaucgucuucgacggcaagagcaagugcgaggaguccagcgcccgcuccgccagcguguacuacucccagcugaugugccagcccauccuccugcuggaccaggcgcucgugagcgacgucggcgacagcgccgagguggccgugaagauguucgacgccuacgucaacaccuucuccagcaccuucaacgugccgauggagaagcugaagacccugguggccacggcggaggccgagcucgccaagaacgucucccuggacaacgugcugagcaccuucaucuccgccgcgcggcagggguucguggacagcgacgucgagaccaaggacgugguggagugccucaagcugucccaccagagcgacaucgaggucaccggcgacuccugcaacaacuacaugcugacguacaacaagguggagaacaugaccccccgcgaccucggggccugcaucgacugcagcgcccggcacaucaacgcccagguggccaagucccacaacaucgcgcugaucuggaacgucaaggacuucaugagccuguccgagcagcuccgcaagcagauccgcagcgccgccaagaagaacaaccugcccuucaagcugaccugcgccaccacgcggcagguggugaacgucgugaccaccaagaucgcccucaagggcggguga

SEQ ID NO: 17689 - RNA, 5841 nt, Artificial Sequence
  SARS-CoV-2__MT873050.1__non-structural protein 3 (NSP3) CDS gc
auggcccccaccaaggugaccuucggcgacgacacggucaucgaggugcagggguacaagagcgugaacaucaccuucgagcuggacgagcgcaucgacaagguccucaacgagaagugcuccgccuacaccguggagcugggcaccgaggugaacgaguucgcgugcgucguggccgacgccgugaucaagacgcugcagccggucagcgagcuccugaccccccuggggaucgaccucgacgagugguccauggccaccuacuaccuguucgacgagagcggcgaguucaagcuggccucccacauguacugcagcuucuacccccccgacgaggacgaggaggagggggacugcgaggaggaggaguucgagccguccacccaguacgaguacggcacggaggacgacuaccagggcaagccccucgaguucggggcgaccagcgccgcccugcagcccgaggaggagcaggaggaggacuggcuggacgacgacucccagcagaccgugggccagcaggacgggagcgaggacaaccagaccacgaccauccagaccaucguggagguccagccccagcucgagauggagcugaccccgguggugcagacgaucgaggucaacuccuucagcggcuaccugaagcucaccgacaacguguacaucaagaacgccgacaucguggaggaggcgaagaaggucaagcccaccgugguggucaacgccgccaacguguaccugaagcacgggggcggcguggccggggcccugaacaaggcgaccaacaacgccaugcaggucgaguccgacgacuacaucgccacgaacggcccccucaagguggggggcagcugcguccuguccggccacaaccuggccaagcacugccuccacgugguggggcccaacgucaacaagggcgaggacauccagcugcugaagagcgccuacgagaacuucaaccagcacgaggugcuccuggcgccgcugcucuccgccgggaucuucggcgccgaccccauccacagccugcgggugugcgucgacaccgugcgcaccaacguguaccuggccgucuucgacaagaaccucuacgacaagcugguguccagcuuccuggagaugaagagcgagaagcagguggagcagaagaucgccgagauccucaaggaggaggucaagcccuucaucaccgaguccaagcccagcguggagcagcggaagcaggacgacaagaagaucaaggcgugcguggaggaggucacgaccacccuggaggagaccaaguuccugacggagaaccuccugcuguacaucgacaucaacgggaaccuccacccggacuccgccacccuggugagcgacaucgacaucaccuuccugaagaaggacgcccccuacaucgugggcgacgucgugcaggagggcgugcucaccgccgucgugauccccacgaagaaggccgggggcaccaccgagaugcuggcgaaggcccugcgcaaggugcccaccgacaacuacaucacgaccuacccggggcagggccucaacggguacaccgucgaggaggccaagaccgugcugaagaagugcaaguccgccuucuacauccugcccagcaucaucuccaacgagaagcaggagauccucggcaccgugagcuggaaccugcgggagaugcuggcgcacgccgaggagacgcgcaagcugaugcccgucugcguggagaccaaggccaucguguccaccauccagcggaaguacaagggcaucaagauccaggagggggucguggacuacggcgcccgcuucuacuucuacaccagcaagacgaccguggccucccucaucaacacccugaacgaccugaacgagacccucgucacgaugccccugggguacgugacccacggccugaaccucgaggaggcggcccgguacaugcgcagccugaaggugccggccaccgucuccgugagcucccccgacgccgugaccgccuacaacggguaccugacgagcuccagcaagacccccgaggagcacuucaucgagaccaucucccucgcgggcagcuacaaggacuggagcuacuccggccagagcacccagcuggggaucgaguuccugaagcggggcgacaaguccgucuacuacacgagcaaccccaccaccuuccaccucgacggggaggugaucaccuucgacaaccugaagacgcugcucucccugcgcgaggugcggaccaucaaggucuucaccaccguggacaacaucaaccugcacacgcagguggucgacaugagcaugaccuacggccagcaguucggcccgaccuaccucgacggggccgacgugaccaagaucaagccccacaacucccacgagggcaagacguucuacgugcugcccaacgacgacacccugcgcgucgaggccuucgaguacuaccacaccaccgacccgagcuuccucgggcgguacauguccgcccugaaccacacgaagaaguggaaguacccccaggugaacggccugaccagcaucaagugggccgacaacaacugcuaccucgcgaccgcccugcugacccuccagcagaucgagcugaaguucaacccccccgcccugcaggacgccuacuaccgcgcgcgggccggggaggccgccaacuucugcgcccucauccuggcguacugcaacaagacggugggcgagcugggcgacguccgcgagaccauguccuaccucuuccagcacgccaaccuggacagcugcaagcgggugcugaacgucgugugcaagaccugcgggcagcagcagaccacccucaagggcguggaggccgucauguacauggggacgcuguccuacgagcaguucaagaagggcgugcagaucccgugcaccugcgggaagcaggccaccaaguaccuggugcagcaggagagccccuucgucaugauguccgccccccccgcgcaguacgagcucaagcacggcaccuucacgugcgccagcgaguacaccggcaacuaccagugcgggcacuacaagcacaucaccuccaaggagacccuguacugcaucgacggcgcccugcucacgaagagcagcgaguacaaggggccgaucaccgacguguucuacaaggagaacuccuacaccaccacgaucaagcccgugaccuacaagcuggacggcgucgugugcaccgagaucgaccccaagcuggacaacuacuacaagaaggacaacagcuacuucaccgagcagcccaucgaccucgugccgaaccagcccuaccccaacgccuccuucgacaacuucaaguucgucugcgacaacaucaaguucgccgacgaccugaaccagcugacgggguacaagaagcccgcgagccgcgagcucaaggugaccuucuucccggaccugaacggcgacguggucgccaucgacuacaagcacuacacccccuccuucaagaagggcgccaagcugcuccacaagcccaucguguggcacgugaacaacgccaccaacaaggcgacguacaagcccaacaccuggugcauccggugccuguggagcaccaagccggucgagaccuccaacagcuucgacgugcugaaguccgaggacgcccaggggauggacaaccucgccugcgaggaccugaagcccgugagcgaggaggucguggagaaccccacgauccagaaggacgugcuggagugcaacgucaagaccaccgagguggugggcgacaucauccucaagcccgccaacaacucccugaagaucaccgaggaggucgggcacacggaccugauggccgcguacguggacaacagcucccucaccaucaagaagccgaacgagcugagccgcgugcugggccucaagacccuggccacccacgggcuggccgccgucaacuccgugcccugggacacgaucgccaacuacgcgaagcccuuccucaacaagguggucagcaccaccaccaacaucgugacgcgcugccugaaccgggugugcaccaacuacaugccguacuucuucacccugcuccugcagcugugcaccuucacccgcuccacgaacagccggaucaaggccuccaugcccaccaccaucgccaagaacaccgucaagagcgugggcaaguucugccucgaggccagcuucaacuaccugaagucccccaacuucagcaagcugaucaacaucaucaucugguuccuccugcuguccgugugccucggcagccugaucuacuccacggccgcgcuggggguccucaugagcaaccugggcaugcccuccuacugcaccggguaccgcgagggcuaccugaacagcaccaacgugaccaucgccacguacugcaccggcuccaucccgugcagcgugugccucuccgggcuggacagccuggacaccuaccccucccucgagaccauccagaucacgaucagcuccuucaagugggaccugaccgccuucggccuggucgccgagugguuccucgccuacauccuguucacccgguucuucuacgugcuggggcucgcggccaucaugcagcuguucuucagcuacuucgccgugcacuucaucuccaacagcuggcugauguggcugaucaucaaccucguccagauggcccccaucuccgcgauggugcgcauguacaucuucuucgccagcuucuacuacguguggaagagcuacguccacgugguggacggcugcaacuccagcaccugcaugaugugcuacaagcggaaccgcgccacgcgggucgagugcaccaccaucgugaacgggguccgccgguccuucuacguguacgccaacggcggcaagggguucugcaagcugcacaacuggaacugcgugaacugcgacaccuucugcgccggcagcacguucaucuccgacgaggucgcgcgcgaccugagccuccaguucaagcggcccaucaacccgaccgaccaguccagcuacaucguggacuccgugaccgucaagaacgggagcauccaccuguacuucgacaaggccggccagaagaccuacgagcgccacucccugagccacuucgugaaccucgacaaccugcgggccaacaacacgaaggggucccugcccaucaacgugaucgucuucgacggcaagagcaagugcgaggaguccagcgccaaguccgccagcguguacuacucccagcucaugugccagcccauccugcugcucgaccaggcgcuggugagcgacgucggcgacagcgccgagguggccgugaagauguucgacgccuacgucaacaccuucuccagcaccuucaacgugcccauggagaagcugaagacccucguggccacggcggaggccgagcuggccaagaacgucucccuggacaacgugcucagcaccuucaucuccgccgcgcgccagggguucguggacagcgacgucgagaccaaggacgugguggagugccugaagcugucccaccagagcgacaucgaggucaccggcgacuccugcaacaacuacaugcucacguacaacaagguggagaacaugaccccgcgggaccugggggccugcaucgacugcagcgcccgccacaucaacgcccagguggccaagucccacaacaucgcgcugaucuggaacgucaaggacuucaugagccucuccgagcagcugcggaagcagauccgcagcgccgccaagaagaacaaccugcccuucaagcucaccugcgccaccacgcgccagguggugaacgucgugaccaccaagaucgcccugaagggcggguga

SEQ ID NO: 17690 - RNA, 5841 nt, Artificial Sequence
  SARS-CoV-2__MT873051.1__non-structural protein 3 (NSP3) CDS gc
auggcccccaccaaggugaccuucggcgacgacacggucaucgaggugcagggguacaagagcgugaacaucaccuucgagcuggacgagcgcaucgacaagguccucaacgagaagugcuccgccuacaccguggagcugggcaccgaggugaacgaguucgcgugcgucguggccgacgccgugaucaagacgcugcagccggucagcgagcuccugaccccccuggggaucgaccucgacgagugguccauggccaccuacuaccuguucgacgagagcggcgaguucaagcuggccucccacauguacugcagcuucuacccccccgacgaggacgaggaggagggggacugcgaggaggaggaguucgagccguccacccaguacgaguacggcacggaggacgacuaccagggcaagccccucgaguucggggcgaccagcgccgcccugcagcccgaggaggagcaggaggaggacuggcuggacgacgacucccagcagaccgugggccagcaggacgggagcgaggacaaccagaccacgaccauccagaccaucguggagguccagccccagcucgagauggagcugaccccgguggugcagacgaucgaggucaacuccuucagcggcuaccugaagcucaccgacaacguguacaucaagaacgccgacaucguggaggaggcgaagaaggucaagcccaccgugguggucaacgccgccaacguguaccugaagcacgggggcggcguggccggggcccugaacaaggcgaccaacaacgccaugcaggucgaguccgacgacuacaucgccacgaacggcccccucaagguggggggcagcugcguccuguccggccacaaccuggccaagcacugccuccacgugguggggcccaacgucaacaagggcgaggacauccagcugcugaagagcgccuacgagaacuucaaccagcacgaggugcuccuggcgccgcugcucuccgccgggaucuucggcgccgaccccauccacagccugcgggugugcgucgacaccgugcgcaccaacguguaccuggccgucuucgacaagaaccucuacgacaagcugguguccagcuuccuggagaugaagagcgagaagcagguggagcagaagaucgccgagauccccaaggaggaggucaagcccuucaucaccgaguccaagccgagcguggagcagcggaagcaggacgacaagaagaucaaggcgugcguggaggaggucacgaccacccucgaggagaccaaguuccugacggagaaccugcuccuguacaucgacaucaacgggaaccugcaccccgacuccgccacccucgugagcgacaucgacaucaccuuccugaagaaggacgcccccuacaucgugggcgacgucgugcaggagggcgugcugaccgccgucgugauccccacgaagaaggccgggggcaccaccgagaugcucgcgaaggcccugcgcaaggugccgaccgacaacuacaucacgaccuaccccgggcagggccugaacggguacaccgucgaggaggccaagaccgugcucaagaagugcaaguccgccuucuacauccugcccagcaucaucuccaacgagaagcaggagauccugggcaccgugagcuggaaccuccgggagaugcuggcgcacgccgaggagacgcgcaagcugaugcccgucugcguggagaccaaggccaucguguccaccauccagcggaaguacaagggcaucaagauccaggagggggucguggacuacggcgcccgcuucuacuucuacaccagcaagacgaccguggccucccugaucaacacccucaacgaccugaacgagacccuggucacgaugccgcucggguacgugacccacggccugaaccuggaggaggcggcccgguacaugcgcagccucaaggugcccgccaccgucuccgugagcucccccgacgccgugaccgccuacaacggguaccugacgagcuccagcaagacccccgaggagcacuucaucgagaccaucucccuggcgggcagcuacaaggacuggagcuacuccggccagagcacccagcucgggaucgaguuccugaagcggggcgacaaguccgucuacuacacgagcaacccgaccaccuuccaccuggacggggaggugaucaccuucgacaaccucaagacgcugcugucccuccgcgaggugcggaccaucaaggucuucaccaccguggacaacaucaaccugcacacgcagguggucgacaugagcaugaccuacggccagcaguucggccccaccuaccuggacggggccgacgugaccaagaucaagccccacaacucccacgagggcaagacguucuacgugcucccgaacgacgacacccugcgcgucgaggccuucgaguacuaccacaccaccgaccccagcuuccuggggcgguacauguccgcccucaaccacacgaagaaguggaaguacccccaggugaacggccugaccagcaucaagugggccgacaacaacugcuaccuggcgaccgcccuccugacccugcagcagaucgagcucaaguucaaccccccggcccugcaggacgccuacuaccgcgcgcgggccggggaggccgccaacuucugcgcccugauccucgcguacugcaacaagacggugggcgagcugggcgacguccgcgagaccauguccuaccuguuccagcacgccaaccucgacagcugcaagcgggugcugaacgucgugugcaagaccugcgggcagcagcagaccacccugaagggcguggaggccgucauguacauggggacgcucuccuacgagcaguucaagaagggcgugcagauccccugcaccugcgggaagcaggccaccaaguaccuggugcagcaggagagccccuucgucaugauguccgcccccccggcgcaguacgagcugaagcacggcaccuucacgugcgccagcgaguacaccggcaacuaccagugcgggcacuacaagcacaucaccuccaaggagacccucuacugcaucgacggcgcccugcugacgaagagcagcgaguacaaggggcccaucaccgacguguucuacaaggagaacuccuacaccaccacgaucaagcccgugaccuacaagcucgacggcgucgugugcaccgagaucgaccccaagcuggacaacuacuacaagaaggacaacagcuacuucaccgagcagccgaucgaccuggugcccaaccagcccuaccccaacgccuccuucgacaacuucaaguucgucugcgacaacaucaaguucgccgacgaccucaaccagcugacgggguacaagaagccggcgagccgcgagcugaaggugaccuucuuccccgaccucaacggcgacguggucgccaucgacuacaagcacuacacccccuccuucaagaagggcgccaagcugcugcacaagcccaucguguggcacgugaacaacgccaccaacaaggcgacguacaagccgaacaccuggugcauccggugccucuggagcaccaagcccgucgagaccuccaacagcuucgacgugcugaaguccgaggacgcccaggggauggacaaccuggccugcgaggaccucaagcccgugagcgaggaggucguggagaaccccacgauccagaaggacgugcuggagugcaacgucaagaccaccgagguggugggcgacaucauccugaagccggccaacaacucccucaagaucaccgaggaggucgggcacacggaccugauggccgcguacguggacaacagcucccugaccaucaagaagcccaacgagcucagccgcgugcugggccugaagacccucgccacccacgggcuggccgccgucaacuccgugcccugggacacgaucgccaacuacgcgaagccguuccugaacaagguggucagcaccaccaccaacaucgugacgcgcugccucaaccgggugugcaccaacuacaugcccuacuucuucacccugcugcuccagcugugcaccuucacccgcuccacgaacagccggaucaaggccuccaugcccaccaccaucgccaagaacaccgucaagagcgugggcaaguucugccuggaggccagcuucaacuaccucaagucccccaacuucagcaagcugaucaacaucaucaucugguuccugcuccuguccgugugccugggcagccucaucuacuccacggccgcgcuggggguccugaugagcaaccucggcaugccguccuacugcaccggguaccgcgagggcuaccugaacagcaccaacgugaccaucgccacguacugcaccggcuccauccccugcagcgugugccuguccgggcucgacagccuggacaccuaccccucccuggagaccauccagaucacgaucagcuccuucaagugggaccucaccgccuucggccuggucgccgagugguuccuggccuacauccucuucacccgguucuucuacgugcuggggcuggcggccaucaugcagcucuucuucagcuacuucgccgugcacuucaucuccaacagcuggcugauguggcugaucaucaaccugguccagauggcccccaucuccgcgauggugcgcauguacaucuucuucgccagcuucuacuacguguggaagagcuacguccacgugguggacggcugcaacuccagcaccugcaugaugugcuacaagcggaaccgcgccacgcgggucgagugcaccaccaucgugaacgggguccgccgguccuucuacguguacgccaacggcggcaagggguucugcaagcuccacaacuggaacugcgugaacugcgacaccuucugcgccggcagcacguucaucuccgacgaggucgcgcgcgaccugagccugcaguucaagcggccgaucaaccccaccgaccaguccagcuacaucguggacuccgugaccgucaagaacgggagcauccaccucuacuucgacaaggccggccagaagaccuacgagcgccacucccugagccacuucgugaaccuggacaaccuccgggccaacaacacgaaggggucccugcccaucaacgugaucgucuucgacggcaagagcaagugcgaggaguccagcgccaaguccgccagcguguacuacucccagcugaugugccagcccauccuccugcuggaccaggcgcucgugagcgacgucggcgacagcgccgagguggccgugaagauguucgacgccuacgucaacaccuucuccagcaccuucaacgugccgauggagaagcugaagacccugguggccacggcggaggccgagcucgccaagaacgucucccuggacaacgugcugagcaccuucaucuccgccgcgcgccagggguucguggacagcgacgucgagaccaaggacgugguggagugccucaagcugucccaccagagcgacaucgaggucaccggcgacuccugcaacaacuacaugcugacguacaacaagguggagaacaugaccacccgggaccucggggccugcaucgacugcagcgcccgccacaucaacgcccagguggccaagucccacaacaucgcgcugaucuggaacgucaaggacuucaugagccuguccgagcagcuccggaagcagauccgcagcgccgccaagaagaacaaccugcccuucaagcugaccugcgccacgacccgccagguggugaacgucgugaccaccaagaucgcccucaagggcggguga

SEQ ID NO: 17691 - RNA, 5841 nt, Artificial Sequence
  SARS-CoV-2__MT873064.1__non-structural protein 3 (NSP3) CDS gc
auggcccccaccaaggugaccuucggcgacgacacggucaucgaggugcagggguacaagagcgugaacaucaccuucgagcuggacgagcgcaucgacaagguccucaacgagaagugcuccgccuacaccguggagcugggcaccgaggugaacgaguucgcgugcgucguggccgacgccgugaucaagacgcugcagccggucagcgagcuccugaccccccuggggaucgaccucgacgagugguccauggccaccuacuaccuguucgacgagagcggcgaguucaagcuggccucccacauguacugcagcuucuacccccccgacgaggacgaggaggagggggacugcgaggaggaggaguucgagccguccacccaguacgaguacggcacggaggacgacuaccagggcaagccccucgaguucggggcgaccagcgccgcccugcagcccgaggaggagcaggaggaggacuggcuggacgacgacucccagcagaccgugggccagcaggacgggagcgaggacaaccagaccacgaccauccagaccaucguggagguccagccccagcucgagauggagcugaccccgguggugcagacgaucgaggucaacuccuucagcggcuaccugaagcucaccgacaacguguacaucaagaacgccgacaucguggaggaggcgaagaaggucaagcccaccgugguggucaacgccgccaacguguaccugaagcacgggggcggcguggccggggcccugaacaaggcgaccaacaacgccaugcaggucgaguccgacgacuacaucgccacgaacggcccccucaagguggggggcagcugcguccuguccggccacaaccuggccaagcacugccuccacgugguggggcccaacgucaacaagggcgaggacauccagcugcugaagagcgccuacgagaacuucaaccagcacgaggugcuccuggcgccgcugcucuccgccgggaucuucggcgccgaccccauccacagccugcgggugugcgucgacaccgugcgcaccaacguguaccuggccgucuucgacaagaaccucuacgacaagcugguguccagcuuccuggagaugaagagcgagaagcagguggagcagaagaucgccgagauccccaaggaggaggucaagcccuucaucaccgaguccaagccgagcguggagcagcggaagcaggacgacaagaagaucaaggcgugcguggaggaggucacgaccacccucgaggagaccaaguuccugacggagaaccugcuccuguacaucgacaucaacgggaaccugcaccccgacuccgccacccucgugagcgacaucgacaucaccuuccugaagaaggacgcccccuacaucgugggcgacgucgugcaggagggcgugcugaccgccgucgugauccccacgaagaaggccgggggcaccaccgagaugcucgcgaaggcccugcgcaaggugccgaccgacaacuacaucacgaccuaccccgggcagggccugaacggguacaccgucgaggaggccaagaccgugcucaagaagugcaaguccgccuucuacauccugcccagcaucaucuccaacgagaagcaggagauccugggcaccgugagcuggaaccuccgggagaugcuggcgcacgccgaggagacgcgcaagcugaugcccgucugcguggagaccaaggccaucguguccaccauccagcggaaguacaagggcaucaagauccaggagggggucguggacuacggcgcccgcuucuacuucuacaccagcaagacgaccguggccucccugaucaacacccucaacgaccugaacgagacccuggucacgaugccgcucggguacgugacccacggccugaaccuggaggaggcggcccgguacaugcgcagccucaaggugcccgccaccgucuccgugagcucccccgacgccgugaccgccuacaacggguaccugacgagcuccagcaagacccccgaggagcacuucaucgagaccaucucccuggcgggcagcuacaaggacuggagcuacuccggccagagcacccagcucgggaucgaguuccugaagcggggcgacaaguccgucuacuacacgagcaacccgaccaccuuccaccuggacggggaggugaucaccuucgacaaccucaagacgcugcugucccuccgcgaggugcggaccaucaaggucuucaccaccguggacaacaucaaccugcacacgcagguggucgacaugagcaugaccuacggccagcaguucggccccaccuaccuggacggggccgacgugaccaagaucaagccccacaacucccacgagggcaagacguucuacgugcucccgaacgacgacacccugcgcgucgaggccuucgaguacuaccacaccaccgaccccagcuuccuggggcgguacauguccgcccucaaccacacgaagaaguggaaguacccccaggugaacggccugaccagcaucaagugggccgacaacaacugcuaccuggcgaccgcccuccugacccugcagcagaucgagcucaaguucaaccccccggcccugcaggacgccuacuaccgcgcgcgggccggggaggccgccaacuucugcgcccugauccucgcguacugcaacaagacggugggcgagcugggcgacguccgcgagaccauguccuaccuguuccagcacgccaaccucgacagcugcaagcgggugcugaacgucgugugcaagaccugcgggcagcagcagaccacccugaagggcguggaggccgucauguacauggggacgcucuccuacgagcaguucaagaagggcgugcagauccccugcaccugcgggaagcaggccaccaaguaccuggugcagcaggagagccccuucgucaugauguccgcccccccggcgcaguacgagcugaagcacggcaccuucacgugcgccagcgaguacaccggcaacuaccagugcgggcacuacaagcacaucaccuccaaggagacccucuacugcaucgacggcgcccugcugacgaagagcagcgaguacaaggggcccaucaccgacguguucuacaaggagaacuccuacaccaccacgaucaagcccgugaccuacaagcucgacggcgucgugugcaccgagaucgaccccaagcuggacaacuacuacaagaaggacaacagcuacuucaccgagcagccgaucgaccuggugcccaaccagcccuaccccaacgccuccuucgacaacuucaaguucgucugcgacaacaucaaguucgccgacgaccucaaccagcugacgggguacaagaagccggcgagccgcgagcugaaggugaccuucuuccccgaccucaacggcgacguggucgccaucgacuacaagcacuacacccccuccuucaagaagggcgccaagcugcugcacaagcccaucguguggcacgugaacaacgccaccaacaaggcgacguacaagccgaacaccuggugcauccggugccucuggagcaccaagcccuucgagaccuccaacagcuucgacguccugaaguccgaggacgcccaggggauggacaaccuggccugcgaggaccucaagcccgugagcgaggagguggucgagaaccccacgauccagaaggacgugcuggagugcaacgugaagaccaccgaggucgugggcgacaucauccugaagccggccaacaacucccucaagaucaccgaggagguggggcacacggaccugauggccgcguacgucgacaacagcucccugaccaucaagaagcccaacgagcucagccgcgugcugggccugaagacccucgccacccacgggcuggccgccgugaacuccguccccugggacacgaucgccaacuacgcgaagccguuccugaacaagguggugagcaccaccaccaacaucgucacgcgcugccucaaccgggugugcaccaacuacaugcccuacuucuucacccugcugcuccagcugugcaccuucacccgcuccacgaacagccggaucaaggccuccaugcccaccaccaucgccaagaacaccgugaagagcgucggcaaguucugccuggaggccagcuucaacuaccucaagucccccaacuucagcaagcugaucaacaucaucaucugguuccugcuccuguccgugugccugggcagccucaucuacuccacggccgcgcugggggugcugaugagcaaccucggcaugccguccuacugcaccggguaccgcgagggcuaccugaacagcaccaacgucaccaucgccacguacugcaccggcuccauccccugcagcgugugccuguccgggcucgacagccuggacaccuaccccucccuggagaccauccagaucacgaucagcuccuucaagugggaccucaccgccuucggccugguggccgagugguuccuggccuacauccucuucacccgguucuucuacguccuggggcuggcggccaucaugcagcucuucuucagcuacuucgccgugcacuucaucuccaacagcuggcugauguggcugaucaucaaccuggugcagauggcccccaucuccgcgaugguccgcauguacaucuucuucgccagcuucuacuacguguggaagagcuacgugcacgucguggacggcugcaacuccagcaccugcaugaugugcuacaagcggaaccgcgccacgcggguggagugcaccaccaucgucaacggggugcgccgguccuucuacgucuacgccaacggcggcaagggguucugcaagcuccacaacuggaacugcgugaacugcgacaccuucugcgccggcagcacguucaucuccgacgagguggcgcgcgaccugagccugcaguucaagcggccgaucaaccccaccgaccaguccagcuacaucgucgacuccgugaccgugaagaacgggagcauccaccucuacuucgacaaggccggccagaagaccuacgagcgccacucccugagccacuucgucaaccuggacaaccuccgggccaacaacacgaaggggucccugcccaucaacgugaucguguucgacggcaagagcaagugcgaggaguccagcgccaaguccgccagcgucuacuacucccagcugaugugccagcccauccuccugcuggaccaggcgcucgugagcgacgugggcgacagcgccgaggucgccgugaagauguucgacgccuacgugaacaccuucuccagcaccuucaacgucccgauggagaagcugaagacccugguggccacggcggaggccgagcucgccaagaacgugucccuggacaacguccugagcaccuucaucuccgccgcgcgccagggguucguggacagcgacguggagaccaaggacgucguggagugccucaagcugucccaccagagcgacaucgaggugaccggcgacuccugcaacaacuacaugcugacguacaacaaggucgagaacaugaccccccgggaccucggggccugcaucgacugcagcgcccgccacaucaacgcccagguggccaagucccacaacaucgcgcugaucuggaacgugaaggacuucaugagccuguccgagcagcuccggaagcagauccgcagcgccgccaagaagaacaaccugcccuucaagcugaccugcgccaccacgcgccaggucgugaacguggucaccaccaagaucgcccucaagggcggguga

SEQ ID NO: 17692 - RNA, 5841 nt, Artificial Sequence
  SARS-CoV-2__MT873083.1__non-structural protein 3 (NSP3) CDS gc
auggcccccaccaaggugaccuucggcgacgacacggucaucgaggugcagggguacaagagcgugaacaucaccuucgagcuggacgagcgcaucgacaagguccucaacgagaagugcuccgccuacaccguggagcugggcaccgaggugaacgaguucgcgugcgucguggccgacgccgugaucaagacgcugcagccggucagcgagcuccugaccccccuggggaucgaccucgacgagugguccauggccaccuacuaccuguucgacgagagcggcgaguucaagcuggccucccacauguacugcagcuucuacccccccgacgaggacgaggaggagggggacugcgaggaggaggaguucgagccguccacccaguacgaguacggcacggaggacgacuaccagggcaagccccucgaguucggggcgaccagcgccgcccugcagcccgaggaggagcaggaggaggacuggcuggacgacgacucccagcagaccgugggccagcaggacgggagcgaggacaaccagaccacgaccauccagaccaucguggagguccagccccagcucgagauggagcugaccccgguggugcagacgaucgaggucaacuccuucagcggcuaccugaagcucaccgacaacguguacaucaagaacgccgacaucguggaggaggcgaagaaggucaagcccaccgugguggucaacgccgccaacguguaccugaagcacgggggcggcguggccggggcccugaacaaggcgaccaacaacgccaugcaggucgaguccgacgacuacaucgccacgaacggcccccucaagguggggggcagcugcguccuguccggccacaaccuggccaagcacugccuccacgugguggggcccaacgucaacaagggcgaggacauccagcugcugaagagcgccuacgagaacuucaaccagcacgaggugcuccuggcgccgcugcucuccgccgggaucuucggcgccgaccccauccacagccugcgggugugcgucgacaccgugcgcaccaacguguaccuggccgucuucgacaagaaccucuacgacaagcugguguccagcuuccuggagaugaagagcgagaagcagguggagcagaagaucgccgagauccccaaggaggaggucaagcccuucaucaccgaguccaagccgagcguggagcagcggaagcaggacgacaagaagaucaaggcgugcguggaggaggucacgaccacccucgaggagaccaaguuccugacggagaaccugcuccuguacaucgacaucaacgggaaccugcaccccgacuccgccacccucgugagcgacaucgacaucaccuuccugaagaaggacgcccccuacaucgugggcgacgucgugcaggagggcgugcugaccgccgucgugauccccacgaagaaggccgggggcaccaccgagaugcucgcgaaggcccugcgcaaggugccgaccgacaacuacaucacgaccuaccccgggcagggccugaacggguacaccgucgaggaggccaagaccaugcucaagaagugcaaguccgccuucuacauccugcccagcaucaucuccaacgagaagcaggagauccugggcaccgugagcuggaaccuccgggagaugcuggcgcacgccgaggagacgcgcaagcugaugcccgugugcgucgagaccaaggccaucguguccaccauccagcggaaguacaagggcaucaagauccaggaggggguggucgacuacggcgcccgcuucuacuucuacaccagcaagacgaccguggccucccugaucaacacccucaacgaccugaacgagacccuggugacgaugccgcucggguacgucacccacggccugaaccuggaggaggcggcccgguacaugcgcagccucaaggugcccgccaccguguccgucagcucccccgacgccgugaccgccuacaacggguaccugacgagcuccagcaagacccccgaggagcacuucaucgagaccaucucccuggcgggcagcuacaaggacuggagcuacuccggccagagcacccagcucgggaucgaguuccugaagcggggcgacaaguccguguacuacacgagcaacccgaccaccuuccaccuggacggggaggucaucaccuucgacaaccucaagacgcugcugucccuccgcgaggugcggaccaucaagguguucaccaccgucgacaacaucaaccugcacacgcaggugguggacaugagcaugaccuacggccagcaguucggccccaccuaccuggacggggccgacgucaccaagaucaagccccacaacucccacgagggcaagacguucuacgugcucccgaacgacgacacccugcgcguggaggccuucgaguacuaccacaccaccgaccccagcuuccuggggcgguacauguccgcccucaaccacacgaagaaguggaaguacccccaggucaacggccugaccagcaucaagugggccgacaacaacugcuaccuggcgaccgcccuccugacccugcagcagaucgagcucaaguucaaccccccggcccugcaggacgccuacuaccgcgcgcgggccggggaggccgccaacuucugcgcccugauccucgcguacugcaacaagacggugggcgagcugggcgacgugcgcgagaccauguccuaccuguuccagcacgccaaccucgacagcugcaagcggguccugaacguggucugcaagaccugcgggcagcagcagaccacccugaagggcguggaggccgugauguacauggggacgcucuccuacgagcaguucaagaagggcguccagauccccugcaccugcgggaagcaggccaccaaguaccuggugcagcaggagagccccuucgugaugauguccgcccccccggcgcaguacgagcugaagcacggcaccuucacgugcgccagcgaguacaccggcaacuaccagugcgggcacuacaagcacaucaccuccaaggagacccucuacugcaucgacggcgcccugcugacgaagagcagcgaguacaaggggcccaucaccgacgucuucuacaaggagaacuccuacaccaccacgaucaagcccgugaccuacaagcucgacggcguggucugcaccgagaucgaccccaagcuggacaacuacuacaagaaggacaacagcuacuucaccgagcagccgaucgaccuggugcccaaccagcccuaccccaacgccuccuucgacaacuucaaguucgugugcgacaacaucaaguucgccgacgaccucaaccagcugacgggguacaagaagccggcgagccgcgagcugaaggucaccuucuuccccgaccucaacggcgacgugguggccaucgacuacaagcacuacacccccuccuucaagaagggcgccaagcugcugcacaagcccaucgucuggcacgugaacaacgccaccaacaaggcgacguacaagccgaacaccuggugcauccggugccucuggagcaccaagcccguggagaccuccaacagcuucgacguccugaaguccgaggacgcccaggggauggacaaccuggccugcgaggaccucaagcccgugagcgaggagguggucgagaaccccacgauccagaaggacgugcuggagugcaacgugaagaccaccgaggucgugggcgacaucauccugaagccggccaacaacucccucaagaucaccgaggagguggggcacacggaccugauggccgcguacgucgacaacagcucccugaccaucaagaagcccaacgagcucagccgcgugcugggccugaagacccucgccacccacgggcuggccgccgugaacuccguccccugggacacgaucgccaacuacgcgaagccguuccugaacaagguggugagcaccaccaccaacaucgucacgcgcugccucaaccgggugugcaccaacuacaugcccuacuucuucacccugcugcuccagcugugcaccuucacccgcuccacgaacagccggaucaaggccuccaugcccaccaccaucgccaagaacaccgugaagagcgucggcaaguucugccuggaggccagcuucaacuaccucaagucccccaacuucagcaagcugaucaacaucaucaucugguuccugcuccuguccgugugccugggcagccucaucuacuccacggccgcgcugggggugcugaugagcaaccucggcaugccguccuacugcaccggguaccgcgagggcuaccugaacagcaccaacgucaccaucgccacguacugcaccggcuccauccccugcagcgugugccuguccgggcucgacagccuggacaccuaccccucccuggagaccauccagaucacgaucagcuccuucaagugggaccucaccgccuucggccugguggccgagugguuccuggccuacauccucuucacccgguucuucuacguccuggggcuggcggccaucaugcagcucuucuucagcuacuucgccgugcacuucaucuccaacagcuggcugauguggcugaucaucaaccuggugcagauggcccccaucuccgcgaugguccgcauguacaucuucuucgccagcuucuacuacguguggaagagcuacgugcacgucguggacggcugcaacuccagcaccugcaugaugugcuacaagcggaaccgcgccacgcggguggagugcaccaccaucgucaacggggugcgccgguccuucuacgucuacgccaacggcggcaagggguucugcaagcuccacaacuggaacugcgugaacugcgacaccuucugcgccggcagcacguucaucuccgacgagguggcgcgcgaccugagccugcaguucaagcggccgaucaaccccaccgaccaguccagcuacaucgucgacuccgugaccgugaagaacgggagcauccaccucuacuucgacaaggccggccagaagaccuacgagcgccacucccugagccacuucgucaaccuggacaaccuccgggccaacaacacgaaggggucccugcccaucaacgugaucguguucgacggcaagagcaagugcgaggaguccagcgccaaguccgccagcgucuacuacucccagcugaugugccagcccauccuccugcuggaccaggcgcucgugagcgacgugggcgacagcgccgaggucgccgugaagauguucgacgccuacgugaacaccuucuccagcaccuucaacgucccgauggagaagcugaagacccugguggccacggcggaggccgagcucgccaagaacgugucccuggacaacguccugagcaccuucaucuccgccgcgcgccagggguucguggacagcgacguggagaccaaggacgucguggagugccucaagcugucccaccagagcgacaucgaggugaccggcgacuccugcaacaacuacaugcugacguacaacaaggucgagaacaugaccccccgggaccucggggccugcaucgacugcagcgcccgccacaucaacgcccagguggccaagucccacaacaucgcgcugaucuggaacgugaaggacuucaugagccuguccgagcagcuccggaagcagauccgcagcgccgccaagaagaacaaccugcccuucaagcugaccugcgccaccacgcgccaggucgugaacguggucaccaccaagaucgcccucaagggcggguga

SEQ ID NO: 17693 - RNA, 5841 nt, Artificial Sequence
  SARS-CoV-2__MT873098.1__non-structural protein 3 (NSP3) CDS gc
auggcccccaccaaggugaccuucggcgacgacacggucaucgaggugcagggguacaagagcgugaacaucaccuucgagcuggacgagcgcaucgacaagguccucaacgagaagugcuccgccuacaccguggagcugggcaccgaggugaacgaguucgcgugcgucguggccgacgccgugaucaagacgcugcagccggucagcgagcuccugaccccccuggggaucgaccucgacgagugguccauggccaccuacuaccuguucgacgagagcggcgaguucaagcuggccucccacauguacugcagcuucuacccccccgacgaggacgaggaggagggggacugcgaggaggaggaguucgagccguccacccaguacgaguacggcacggaggacgacuaccagggcaagccccucgaguucggggcgaccagcgccgcccugcagcccgaggaggagcaggaggaggacuggcuggacgacgacucccagcagaccgugggccagcaggacgggagcgaggacaaccagaccacgaccauccagaccaucguggagguccagccccagcucgagauggagcugaccccgguggugcagacgaucgaggucaacuccuucagcggcuaccugaagcucaccgacaacguguacaucaagaacgccgacaucguggaggaggcgaagaaggucaagcccaccgugguggucaacgccgccaacguguaccugaagcacgggggcggcguggccggggcccugaacaaggcgaccaacaacgccaugcaggucgaguccgacgacuacaucgccacgaacggcccccucaagguggggggcagcugcguccuguccggccacaaccuggccaagcacugccuccacgugguggggcccaacgucaacaagggcgaggacauccagcugcugaagagcgccuacgagaacuucaaccagcacgaggugcuccuggcgccgcugcucuccgccgggaucuucggcgccgaccccauccacagccugcgggugugcgucgacaccgugcgcaccaacguguaccuggccgucuucgacaagaaccucuacgacaagcugguguccagcuuccuggagaugaagagcgagaagcagguggagcagaagaucgccgagauccccaaggaggaggucaagcccuucaucaccgaguccaagccgagcguggagcagcggaagcaggacgacaagaagaucaaggcgugcguggaggaggucacgaccacccucgaggagaccaaguuccugacggagaaccugcuccuguacaucgacaucaacgggaaccugcaccccgacuccgccacccucgugagcgacaucgacaucaccuuccugaagaaggacgcccccuacaucgugggcgacgucgugcaggagggcgugcugaccgccgucgugauccccacgaagaaggccgggggcaccaccgagaugcucgcgaaggcccugcgcaaggugccgaccgacaacuacaucacgaccuaccccgggcagggccugaacggguacaccgucgaggaggccaagaccgugcucaagaagugcaaguccgccuucuacauccugcccagcaucaucuccaacgagaagcaggagauccugggcaccgugagcuggaaccuccgggagaugcuggcgcacgccgaggagacgcgcaagcugaugcccgucugcguggagaccaaggccaucguguccaccauccagcggaaguacaagggcaucaagauccaggagggggucguggacuacggcgcccgcuucuacuucuacaccagcaagacgaccguggccucccugaucaacacccucaacgaccugaacgagacccuggucacgaugccgcucggguacgugacccacggccugaaccuggaggaggcggcccgguacaugcgcagccucaaggugcccgccaccgucuccgugagcucccccgacgccgugaccgccuacaacggguaccugacgagcuccagcaagacccccgaggagcacuucaucgagaccaucucccuggcgggcagcuacaaggacuggagcuacuccggccagagcacccagcucgggaucgaguuccugaagcggggcgacaaguccgucuacuacacgagcaacccgaccaccuuccaccuggacggggaggugaucaccuucgacaaccucaagacgcugcugucccuccgcgaggugcggaccaucaaggucuucaccaccguggacaacaucaaccugcacacgcagguggucgacaugagcaugaccuacggccagcaguucggccccaccuaccuggacggggccgacgugaccaagaucaagccccacaacucccacgagggcaagacguucuacgugcucccgaacgacgacacccugcgcgucgaggccuucgaguacuaccacaccaccgaccccagcuuccuggggcgguacauguccgcccucaaccacacgaagaaguggaaguacccccaggugaacggccugaccagcaucaagugggccgacaacaacugcuaccuggcgaccgcccuccugacccugcagcagaucgagcucaaguucaaccccccggcccugcaggacgccuacuaccgcgcgcgggccggggaggccgccaacuucugcgcccugauccucgcguacugcaacaagacggugggcgagcugggcgacguccgcgagaccauguccuaccuguuccagcacgccaaccucgacagcugcaagcgggugcugaacgucgugugcaagaccugcgggcagcagcagaccacccugaagggcguggaggccgucauguacauggggacgcucuccuacgagcaguucaagaagggcgugcagauccccugcaccugcgggaagcaggccaccaaguaccuggugcagcaggagagccccuucgucaugauguccgcccccccggcgcaguacgagcugaagcacggcaccuucacgugcgccagcgaguacaccggcaacuaccagugcgggcacuacaagcacaucaccuccaaggagacccucuacugcaucgacggcgcccugcugacgaagagcagcgaguacaaggggcccaucaccgacguguucuacaaggagaacuccuacaccaccacgaucaagcccgugaccuacaagcucgacggcgucgugugcaccgagaucgaccccaagcuggacaacuacuacaagaaggacaacagcuacuucaccgagcagccgaucgaccuggugcccaaccagcccuaccccaacgccuccuucgacaacuucaaguucgucugcgacaacaucaaguucgccgacgaccucaaccagcugacgggguacaagaagccggcgagccgcgagcugaaggugaccuucuuccccgaccucaacggcgacguggucgccaucgacuacaagcacuacacccccuccuucaagaagggcgccaagcugcugcacaagcccaucguguggcacgugaacaacgccaccaacaaggcgacguacaagccgaacaccuggugcauccggugccucuggagcaccaagcccgucgagaccuccaacagcuucgacgugcugaaguccgaggacgcccaggggauggacaaccuggccugcgaggaccucaagcccgugagcgaggaggucguggagaaccccacgauccagaaggacgugcuggagugcaacgucaagaccaccgagguggugggcgacaucauccugaagccggccaacaacucccucaagaucaccgaggaggucgggcacacggaccugauggccgcguacguggacaacagcucccugaccaucaagaagcccaacgagcucagccgcgugcugggccugaagacccucgccacccacgggcuggccgccgucaacuccgugcccugggacacgaucgccaacuacgcgaagccguuccugaacaagguggucagcaccaccaccaacaucgugacgcgcugccucaaccgggugugcaccaacuacaugcccuacuucuucacccugcugcuccagcugugcaccuucacccgcuccacgaacagccggaucaaggccuccaugcccaccaccaucgccaagaacaccgucaagagcgugggcaaguucugccuggaggccagcuucaacuaccucaagucccccaacuucagcaagcugaucaacaucaucaucugguuccugcuccuguccgugugccugggcagccucaucuacuccacggccgcgcuggggguccugaugagcaaccucggcaugccguccuacugcaccggguaccgcgagggcuaccugaacagcaccaacgugaccaucgccacguacugcaccggcuccauccccugcagcgugugccuguccgggcucgacagccuggacaccuaccccucccuggagaccauccagaucacgaucagcuccuucaagugggaccucaccgccuucggccuggucgccgagugguuccuggccuacauccucuucacccgguucuucuacgugcuggggcuggcggccaucaugcagcucuucuucagcuacuucgccgugcacuucaucuccaacagcuggcugauguggcugaucaucaaccugguccagauggcccccaucuccgcgauggugcgcauguacaucuucuucgccagcuucuacuacguguggaagagcuacguccacgugguggacggcugcaacuccagcaccugcaugaugugcuacaagcggaaccgcgccacgcgggucgagugcaccaccaucgugaacgggguccgccgguccuucuacguguacgccaacggcggcaagggguucugcaagcuccacaacuggaacugcgugaacugcgacaccuucugcgccggcagcacguucaucuccgacgaggucgcgcgcgaccugagccugcaguucaagcggccgaucaaccccaccgaccaguccagcuacaucguggacuccgugaccgucaagaacgggagcauccaccucuacuucgacaaggccggccagaagaccuacgagcgccacucccugagccacuucgugaaccuggacaaccuccgggccaacaacacgaaggggucccugcccaucaacgugaucgucuucgacggcaagagcaagugcgaggaguccagcgccaaguccgccagcguguacuacucccagcugaugugccagcccauccuccugcuggaccaggcgcucgugagcgacgucggcgacagcgccgagguggccgugaagauguucgacgccuacgucaacaccuucuccagcaccuucaacgugccgauggagaagcugaagacccugguggccacggcggaggccgagcucgccaagaacgucucccuggacaacgugcugagcaccuucaucuccgccgcgcgccagggguucguggacagcgacgucgagaccaaggacgugguggagugccucaaguucucccaccagagcgacaucgaggucaccggcgacuccugcaacaacuacaugcugacguacaacaagguggagaacaugaccccccgggaccugggggccugcaucgacugcagcgcccgccacaucaacgcccagguggccaagucccacaacaucgcgcucaucuggaacgucaaggacuucaugagccuguccgagcagcugcggaagcagauccgcagcgccgccaagaagaacaaccuccccuucaagcugaccugcgccaccacgcgccagguggugaacgucgugaccaccaagaucgcccugaagggcggguga

SEQ ID NO: 17694 - RNA, 5841 nt, Artificial Sequence
  SARS-CoV-2__MT873131.1__non-structural protein 3 (NSP3) CDS gc
auggcccccaccaaggugaccuucggcgacgacacggucaucgaggugcagggguacaagagcgugaacaucaccuucgagcuggacgagcgcaucgacaagguccucaacgagaagugcuccgccuacaccguggagcugggcaccgaggugaacgaguucgcgugcgucguggccgacgccgugaucaagacgcugcagccggucagcgagcuccugaccccccuggggaucgaccucgacgagugguccauggccaccuacuaccuguucgacgagagcggcgaguucaagcuggccucccacauguacugcagcuucuacccccccgacgaggacgaggaggagggggacugcgaggaggaggaguucgagccguccacccaguacgaguacggcacggaggacgacuaccagggcaagccccucgaguucggggcgaccagcgccgcccugcagcccgaggaggagcaggaggaggacuggcuggacgacgacucccagcagaccgugggccagcaggacgggagcgaggacaaccagaccacgaccauccagaccaucguggagguccagccccagcucgagauggagcugaccccgguggugcagacgaucgaggucaacuccuucagcggcuaccugaagcucaccgacaacguguacaucaagaacgccgacaucguggaggaggcgaagaaggucaagcccaccgugguggucaacgccgccaacguguaccugaagcacgggggcggcguggccggggcccugaacaaggcgaccaacaacgccaugcaggucgaguccgacgacuacaucgccacgaacggcccccucaagguggggggcagcugcguccuguccggccacaaccuggccaagcacugccuccacgugguggggcccaacgucaacaagggcgaggacauccagcugcugaagaucgccuacgagaacuucaaccagcacgaggugcuccuggcgccgcugcucagcgccgggaucuucggcgccgaccccauccacucccugcgggugugcgucgacaccgugcgcaccaacguguaccuggccgucuucgacaagaaccucuacgacaagcuggugagcuccuuccuggagaugaagagcgagaagcagguggagcagaagaucgccgagauccccaaggaggaggucaagcccuucaucaccgagagcaagccguccguggagcagcggaagcaggacgacaagaagaucaaggcgugcguggaggaggucacgaccacccucgaggagaccaaguuccugacggagaaccugcuccuguacaucgacaucaacgggaaccugcaccccgacagcgccacccucguguccgacaucgacaucaccuuccugaagaaggacgcccccuacaucgugggcgacgucgugcaggagggcgugcugaccgccgucgugauccccacgaagaaggccgggggcaccaccgagaugcucgcgaaggcccugcgcaaggugccgaccgacaacuacaucacgaccuaccccgggcagggccugaacggguacaccgucgaggaggccaagaccgugcucaagaagugcaagagcgccuucuacauccugcccuccaucaucagcaacgagaagcaggagauccugggcaccguguccuggaaccuccgggagaugcuggcgcacgccgaggagacgcgcaagcugaugcccgucugcguggagaccaaggccaucgugagcaccauccagcggaaguacaagggcaucaagauccaggagggggucguggacuacggcgcccgcuucuacuucuacaccuccaagacgaccguggccagccugaucaacacccucaacgaccugaacgagacccuggucacgaugccgcucggguacgugacccacggccugaaccuggaggaggcggcccgguacaugcgcucccucaaggugcccgccaccgucagcguguccagccccgacgccgugaccgccuacaacggguaccugacguccagcuccaagacccccgaggagcacuucaucgagaccaucagccuggcgggcuccuacaaggacuggagcuacagcggccaguccacccagcucgggaucgaguuccugaagcggggcgacaagagcgucuacuacacguccaacccgaccaccuuccaccuggacggggaggugaucaccuucgacaaccucaagacgcugcugagccuccgcgaggugcggaccaucaaggucuucaccaccguggacaacaucaaccugcacacgcagguggucgacauguccaugaccuacggccagcaguucggccccaccuaccuggacggggccgacgugaccaagaucaagccccacaacagccacgagggcaagacguucuacgugcucccgaacgacgacacccugcgcgucgaggccuucgaguacuaccacaccaccgaccccuccuuccuggggcgguacaugagcgcccucaaccacacgaagaaguggaaguacccccaggugaacggccugaccuccaucaagugggccgacaacaacugcuaccuggcgaccgcccuccugacccugcagcagaucgagcucaaguucaaccccccggcccugcaggacgccuacuaccgcgcgcgggccggggaggccgccaacuucugcgcccugauccucgcguacugcaacaagacggugggcgagcugggcgacguccgcgagaccaugagcuaccuguuccagcacgccaaccucgacuccugcaagcgggugcugaacgucgugugcaagaccugcgggcagcagcagaccacccugaagggcguggaggccgucauguacauggggacgcucagcuacgagcaguucaagaagggcgugcagauccccugcaccugcgggaagcaggccaccaaguaccuggugcagcaggagucccccuucgucaugaugagcgcccccccggcgcaguacgagcugaagcacggcaccuucacgugcgccuccgaguacaccggcaacuaccagugcgggcacuacaagcacaucaccagcaaggagacccucuacugcaucgacggcgcccugcugacgaaguccagcgaguacaaggggcccaucaccgacguguucuacaaggagaacagcuacaccaccacgaucaagcccgugaccuacaagcucgacggcgucgugugcaccgagaucgaccccaagcuggacaacuacuacaagaaggacaacuccuacuucaccgagcagccgaucgaccuggugcccaaccagcccuaccccaacgccagcuucgacaacuucaaguucgucugcgacaacaucaaguucgccgacgaccucaaccagcugacgggguacaagaagccggcgucccgcgagcugaaggugaccuucuuccccgaccucaacggcgacguggucgccaucgacuacaagcacuacacccccagcuucaagaagggcgccaagcugcugcacaagcccaucguguggcacgugaacaacgccaccaacaaggcgacguacaagccgaacaccuggugcauccggugccucugguccaccaagcccgucgagaccagcaacuccuucgacgugcugaagagcgaggacgcccaggggauggacaaccuggccugcgaggaccucaagcccguguccgaggaggucguggagaaccccacgauccagaaggacgugcuggagugcaacgucaagaccaccgagguggugggcgacaucauccugaagccggccaacaacagccucaagaucaccgaggaggucgggcacacggaccugauggccgcguacguggacaacuccagccugaccaucaagaagcccaacgagcucucccgcgugcugggccugaagacccucgccacccacgggcuggccgccgucaacagcgugcccugggacacgaucgccaacuacgcgaagccguuccugaacaagguggucuccaccaccaccaacaucgugacgcgcugccucaaccgggugugcaccaacuacaugcccuacuucuucacccugcugcuccagcugugcaccuucacccgcagcacgaacucccggaucaaggccagcaugcccaccaccaucgccaagaacaccgucaaguccgugggcaaguucugccuggaggccagcuucaacuaccucaagagccccaacuucuccaagcugaucaacaucaucaucugguuccugcuccugagcgugugccugggcucccucaucuacagcacggccgcgcuggggguccugauguccaaccucggcaugccgagcuacugcaccggguaccgcgagggcuaccugaacuccaccaacgugaccaucgccacguacugcaccggcagcauccccugcuccgugugccugagcgggcucgacucccuggacaccuaccccagccuggagaccauccagaucacgaucuccagcuucaagugggaccucaccgccuucggccuggucgccgagugguuccuggccuacauccucuucacccgguucuucuacgugcuggggcuggcggccaucaugcagcucuucuucuccuacuucgccgugcacuucaucagcaacuccuggcugauguggcugaucaucaaccugguccagauggcccccaucagcgcgauggugcgcauguacaucuucuucgccuccuucuacuacguguggaagagcuacguccacgugguggacggcugcaacagcuccaccugcaugaugugcuacaagcggaaccgcgccacgcgggucgagugcaccaccaucgugaacgggguccgccggagcuucuacguguacgccaacggcggcaagggguucugcaagcuccacaacuggaacugcgugaacugcgacaccuucugcgccggcuccacguucaucagcgacgaggucgcgcgcgaccugucccugcaguucaagcggccgaucaaccccaccgaccagagcuccuacaucguggacagcgugaccgucaagaacggguccauccaccucuacuucgacaaggccggccagaagaccuacgagcgccacagccugucccacuucgugaaccuggacaaccuccgggccaacaacacgaaggggagccugcccaucaacgugaucgucuucgacggcaaguccaagugcgaggagagcuccgccaagagcgccuccguguacuacagccagcugaugugccagcccauccuccugcuggaccaggcgcucguguccgacgucggcgacagcgccgagguggccgugaagauguucgacgccuacgucaacaccuucagcuccaccuucaacgugccgauggagaagcugaagacccugguggccacggcggaggccgagcucgccaagaacgucagccuggacaacgugcuguccaccuucaucagcgccgcgcgccagggguucguggacuccgacgucgagaccaaggacgugguggagugccucaagcugagccaccaguccgacaucgaggucaccggcgacagcugcaacaacuacaugcugacguacaacaagguggagaacaugaccccccgggaccucggggccugcaucgacugcuccgcccgccacaucaacgcccagguggccaagagccacaacaucgcgcugaucuggaacgucaaggacuucaugucccugagcgagcagcuccggaagcagauccgcuccgccgccaagaagaacaaccugcccuucaagcugaccugcgccaccacgcgccagguggugaacgucgugaccaccaagaucgcccucaagggcggguga

SEQ ID NO: 17695 - RNA, 5841 nt, Artificial Sequence
  SARS-CoV-2__MT873132.1__non-structural protein 3 (NSP3) CDS gc
auggcccccaccaaggugaccuucggcgacgacacggucaucgaggugcagggguacaagagcgugaacaucaccuucgagcuggacgagcgcaucgacaagguccucaacgagaagugcuccgccuacaccguggagcugggcaccgaggugaacgaguucgcgugcgucguggccgacgccgugaucaagacgcugcagccggucagcgagcuccugaccccccuggggaucgaccucgacgagugguccauggccaccuacuaccuguucgacgagagcggcgaguucaagcuggccucccacauguacugcagcuucuacccccccgacgaggacgaggaggagggggacugcgaggaggaggaguucgagccguccacccaguacgaguacggcacggaggacgacuaccagggcaagccccucgaguucggggcgaccagcgccgcccugcagcccgaggaggagcaggaggaggacuggcuggacgacgacucccagcagaccgugggccagcaggacgggagcgaggacaaccagaccacgaccauccagaccaucguggagguccagccccagcucgagauggagcugaccccgguggugcagacgaucgaggucaacuccuucagcggcuaccugaagcucaccgacaacguguacaucaagaacgccgacaucguggaggaggcgaagaaggucaagcccaccgugguggucaacgccgccaacguguaccugaagcacgggggcggcguggccggggcccugaacaaggcgaccaacaacgccaugcaggucgaguccgacgacuacaucgccacgaacggcccccucaagguggggggcagcugcguccuguccggccacaaccuggccaagcacugccuccacgugguggggcccaacgucaacaagggcgaggacauccagcugcugaagagcgccuacgagaacuucaaccagcacgaggugcuccuggcgccgcugcucuccgccgggaucuucggcgccgaccccauccacagccugcgggugugcgucgacaccgugcgcaccaacguguaccuggccgucuucgacaagaaccucuacgacaagcugguguccagcuuccuggagaugaagagcgagaagcagguggagcagaagaucgccgagauccccaaggaggaggucaagcccuucaucaccgaguccaagccgagcguggagcagcggaagcaggacgacaagaagaucaaggcgugcguggaggaggucacgaccacccucgaggagaccaaguuccugacggagaaccugcuccuguacaucgacaucaacgggaaccugcaccccgacuccgccacccucgugagcgacaucgacaucaccuuccugaagaaggacucccccuacaucgugggcgacgucgugcaggagggcgugcugaccgccgucgugauccccacgaagaaggccgggggcaccaccgagaugcucgccaaggcgcugcgcaaggugccgaccgacaacuacaucacgaccuaccccgggcagggccugaacggguacaccgucgaggaggccaagaccgugcucaagaagugcaagagcgccuucuacauccugcccuccaucaucagcaacgagaagcaggagauccugggcaccguguccuggaaccuccgggagaugcuggcccacgcggaggagacgcgcaagcugaugcccgucugcguggagaccaaggccaucgugagcaccauccagcggaaguacaagggcaucaagauccaggagggggucguggacuacggcgcccgcuucuacuucuacaccuccaagacgaccguggccagccugaucaacacccucaacgaccugaacgagacccuggucacgaugccgcucggguacgugacccacggccugaaccuggaggaggccgcgcgguacaugcgcucccucaaggugcccgccaccgucagcguguccagccccgacgccgugaccgccuacaacggguaccugacguccagcuccaagacccccgaggagcacuucaucgagaccaucagccuggccggcagcuacaaggacugguccuacagcggccaguccacccagcucgggaucgaguuccugaagcggggcgacaagagcgucuacuacacguccaacccgaccaccuuccaccuggacggggaggugaucaccuucgacaaccucaagacgcugcugagccuccgcgaggugcggaccaucaaggucuucaccaccguggacaacaucaaccugcacacgcagguggucgacauguccaugaccuacggccagcaguucggccccaccuaccuggacggggcggacgugaccaagaucaagccccacaacagccacgagggcaagacguucuacgugcucccgaacgacgacacccugcgcgucgaggccuucgaguacuaccacaccaccgaccccuccuuccuggggcgguacaugagcgcccucaaccacacgaagaaguggaaguacccccaggugaacggccugaccuccaucaagugggccgacaacaacugcuaccuggccaccgcgcuccugacccugcagcagaucgagcucaaguucaaccccccggcccugcaggacgccuacuaccgcgcccgggcgggggaggccgccaacuucugcgcccugauccucgccuacugcaacaagacggugggcgagcugggcgacguccgcgagaccaugagcuaccuguuccagcacgcgaaccucgacuccugcaagcgggugcugaacgucgugugcaagaccugcgggcagcagcagaccacccugaagggcguggaggccgucauguacauggggacgcucagcuacgagcaguucaagaagggcgugcagauccccugcaccugcgggaagcaggccaccaaguaccuggugcagcaggagucccccuucgucaugaugagcgcccccccggcccaguacgagcugaagcacggcaccuucacgugcgcguccgaguacaccggcaacuaccagugcgggcacuacaagcacaucaccagcaaggagacccucuacugcaucgacggcgcccugcugacgaagagcuccgaguacaaggggcccaucaccgacguguucuacaaggagaacagcuacaccaccacgaucaagcccgugaccuacaagcucgacggcgucgugugcaccgagaucgaccccaagcuggacaacuacuacaagaaggacaacuccuacuucaccgagcagccgaucgaccuggugcccaaccagcccuaccccaacgccagcuucgacaacuucaaguucgucugcgacaacaucaaguucgccgacgaccucaaccagcugacgggguacaagaagccggccucccgcgagcugaaggugaccuucuuccccgaccucaacggcgacguggucgcgaucgacuacaagcacuacacccccagcuucaagaagggcgccaagcugcugcacaagcccaucguguggcacgugaacaacgccaccaacaaggccacguacaagccgaacaccuggugcauccggugccucugguccaccaagcccgucgagaccagcaacuccuucgacgugcugaagagcgaggacgcgcaggggauggacaaccuggccugcgaggaccucaagcccguguccgaggaggucguggagaaccccacgauccagaaggacgugcuggagugcaacgucaagaccaccgagguggugggcgacaucauccugaagccggccaacaacagccucaagaucaccgaggaggucgggcacacggaccugauggccgccuacguggacaacuccagccugaccaucaagaagcccaacgagcucucccgcgugcugggccugaagacccucgcgacccacgggcuggccgccgucaacagcgugcccugggacacgaucgccaacuacgccaagccguuccugaacaagguggucuccaccaccaccaacaucgugacgcgcugccucaaccgggugugcaccaacuacaugcccuacuucuucacccugcugcuccagcugugcaccuucacccgcagcacgaacucccggaucaaggcgagcaugcccaccaccaucgccaagaacaccgucaagagcgugggcaaguucugccuggaggccuccuucaacuaccucaagagccccaacuucuccaagcugaucaacaucaucaucugguuccugcuccugagcgugugccugggcucccucaucuacagcacggccgcccuggggguccugauguccaaccucggcaugccgagcuacugcaccggguaccgcgagggcuaccugaacuccaccaacgugaccaucgcgacguacugcaccggcagcauccccugcuccgugugccugagcgggcucgacucccuggacaccuaccccagccuggagaccauccagaucacgaucuccagcuucaagugggaccucaccgccuucggccugaucgccgagugguuccuggccuacauccucuucacccgguucuucuacguccuggggcuggccgcgaucaugcagcucuucuucuccuacuucgccgugcacuucaucagcaacuccuggcugauguggcugaucaucaaccuggugcagauggcccccaucagcgccaugguccgcauguacaucuucuucgcgagcuucuacuacguguggaaguccuacgugcacgucguggacggcugcaacagcuccaccugcaugaugugcuacaagcggaaccgcgccacgcggguggagugcaccaccaucgucaacggggugcgccggagcuucuacgucuacgccaacggcggcaagggguucugcaagcuccacaacuggaacugcgugaacugcgacaccuucugcgccggcuccacguucaucagcgacgagguggcccgcgaccugucccugcaguucaagcggccgaucaaccccaccgaccagagcuccuacaucgucgacagcgugaccgugaagaacggguccauccaccucuacuucgacaaggcgggccagaagaccuacgagcgccacagccugucccacuucgucaaccuggacaaccuccgggccaacaacacgaaggggagccugcccaucaacgugaucguguucgacggcaaguccaagugcgaggagagcuccgccaagagcgccuccgucuacuacagccagcugaugugccagcccauccuccugcuggaccaggcccucgugagcgacgugggcgacuccgcggaggucgccgugaagauguucgacgccuacgugaacaccuucagcuccaccuucaacgucccgauggagaagcugaagacccugguggccacggccgaggcggagcucgccaagaacgugagccuggacaacguccuguccaccuucaucagcgccgcccgccagggguucguggacuccgacguggagaccaaggacgucguggagugccucaagcugagccaccaguccgacaucgaggugaccggcgacagcugcaacaacuacaugcugacguacaacaaggucgagaacaugaccccccgggaccucggggcgugcaucgacugcuccgcccgccacaucaacgcccagguggccaagagccacaacaucgcccugaucuggaacgugaaggacuucaugucccugagcgagcagcuccggaagcagauccgcuccgcggccaagaagaacaaccugcccuucaagcugaccugcgccaccacgcgccaggucgugaacguggucaccaccaagaucgcccucaagggcggguga

SEQ ID NO: 17696 - RNA, 5841 nt, Artificial Sequence
  SARS-CoV-2__MT873148.1__non-structural protein 3 (NSP3) CDS gc
auggcccccaccaaggugaccuucggcgacgacacggucaucgaggugcagggguacaagagcgugaacaucaccuucgagcuggacgagcgcaucgacaagguccucaacgagaagugcuccgccuacaccguggagcugggcaccgaggugaacgaguucgcgugcgucguggccgacgccgugaucaagacgcugcagccggucagcgagcuccugaccccccuggggaucgaccucgacgagugguccauggccaccuacuaccuguucgacgagagcggcgaguucaagcuggccucccacauguacugcagcuucuacccccccgacgaggacgaggaggagggggacugcgaggaggaggaguucgagccguccacccaguacgaguacggcacggaggacgacuaccagggcaagccccucgaguucggggcgaccagcgccgcccugcagcccgaggaggagcaggaggaggacuggcuggacgacgacucccagcagaccgugggccagcaggacgggagcgaggacaaccagaccacgaccauccagaccaucguggagguccagccccagcucgagauggagcugaccccgguggugcagacgaucgaggucaacuccuucagcggcuaccugaagcucaccgacaacguguacaucaagaacgccgacaucguggaggaggcgaagaaggucaagcccaccgugguggucaacgccgccaacguguaccugaagcacgggggcggcguggccggggcccugaacaaggcgaccaacaacgccaugcaggucgaguccgacgacuacaucgccacgaacggcccccucaagguggggggcagcugcguccuguccggccacaaccuggccaagcacugccuccacgugguggggcccaacgucaacaagggcgaggacauccagcugcugaagagcgccuacgagaacuucaaccagcacgaggugcuccuggcgccgcugcucuccgccgggaucuucggcgccgaccccauccacagccugcgggugugcgucgacaccgugcgcaccaacguguaccuggccgucuucgacaagaaccucuacgacaagcugguguccagcuuccuggagaugaagagcgagaagcagguggagcagaagaucgccgagauccccaaggaggaggucaagcccuucaucaccgaguccaagccgagcguggagcagcggaagcaggacgacaagaagaucaaggcgugcguggaggaggucacgaccacccucgaggagaccaaguuccugacggagaaccugcuccuguacaucgacaucaacgggaaccugcaccccgacuccgccacccucgugagcgacaucgacaucaccuuccugaagaaggacgcccccuacaucgugggcgacgucgugcaggagggcgugcugaccgccgucgugauccccacgaagaaggccgggggcaccaccgagaugcucgcgaaggcccugcgcaaggugccgaccgacaacuacaucacgaccuaccccgggcagggccugaacggguacaccgucgaggaggccaagaccgugcucaagaagugcaaguccgccuucuacauccugcccagcaucaucuccaacgagaagcaggagauccugggcaccgugagcuggaaccuccgggagaugcuggcgcacgccgaggagacgcgcaagcugaugcccgucugcguggagaccaaggccaucguguccaccauccagcggaaguacaagggcaucaagauccaggagggggucguggacuacggcgcccgcuucuacuucuacaccagcaagacgaccguggccucccugaucaacacccucaacgaccugaacgagacccuggucacgaugccgcucggguacgugacccacggccugaaccuggaggaggcggcccgguacaugcgcagccucaaggugcccgccaccgucuccgugagcucccccgacgccgugaccgccuacaacggguaccugacgagcuccagcaagacccccgaggagcacuucaucgagaccaucucccuggcgggcagcuacaaggacuggagcuacuccggccagagcacccagcucgggaucgaguuccugaagcggggcgacaaguccgucuacuacacgagcaacccgaccaccuuccaccuggggggcgaggugaucaccuucgacaaccucaagacgcugcugucccuccgcgaggugcggaccaucaaggucuucaccaccguggacaacaucaaccugcacacgcagguggucgacaugagcaugaccuacggccagcaguucgggcccaccuaccuggacggcgccgacgugaccaagaucaagccccacaacucccacgaggggaagacguucuacgugcucccgaacgacgacacccugcgcgucgaggccuucgaguacuaccacaccaccgaccccagcuuccugggccgguacauguccgcccucaaccacacgaagaaguggaaguacccccaggugaacgggcugaccagcaucaagugggccgacaacaacugcuaccuggcgaccgcccuccugacccugcagcagaucgagcucaaguucaaccccccggcccugcaggacgccuacuaccgcgcgcgggccggcgaggccgccaacuucugcgcccugauccucgcguacugcaacaagacggugggcgagcugggggacguccgcgagaccauguccuaccuguuccagcacgccaaccucgacagcugcaagcgggugcugaacgucgugugcaagaccugcggccagcagcagaccacccugaaggggguggaggccgucauguacaugggcacgcucuccuacgagcaguucaagaagggggugcagauccccugcaccugcggcaagcaggccaccaaguaccuggugcagcaggagagccccuucgucaugauguccgcccccccggcgcaguacgagcugaagcacggcaccuucacgugcgccagcgaguacaccgggaacuaccagugcggccacuacaagcacaucaccuccaaggagacccucuacugcaucgacggggcccugcugacgaagagcagcgaguacaagggccccaucaccgacguguucuacaaggagaacuccuacaccaccacgaucaagcccgugaccuacaagcucgacggggucgugugcaccgagaucgaccccaagcuggacaacuacuacaagaaggacaacagcuacuucaccgagcagccgaucgaccuggugcccaaccagcccuaccccaacgccuccuucgacaacuucaaguucgucugcgacaacaucaaguucgccgacgaccucaaccagcugacgggcuacaagaagccggcgagccgcgagcugaaggugaccuucuuccccgaccucaacggcgacguggucgccaucgacuacaagcacuacacccccuccuucaagaagggggccaagcugcugcacaagcccaucguguggcacgugaacaacgccaccaacaaggcgacguacaagccgaacaccuggugcauccggugccucuggagcaccaagcccgucgagaccuccaacagcuucgacgugcugaaguccgaggacgcccagggcauggacaaccuggccugcgaggaccucaagcccgugagcgaggaggucguggagaaccccacgauccagaaggacgugcuggagugcaacgucaagaccaccgagguggugggggacaucauccugaagccggccaacaacucccucaagaucaccgaggaggucggccacacggaccugauggccgcguacguggacaacagcucccugaccaucaagaagcccaacgagcucagccgcgugcuggggcugaagacccucgccacccacggccuggccgccgucaacuccgugcccugggacacgaucgccaacuacgcgaagccguuccugaacaagguggucagcaccaccaccaacaucgugacgcgcugccucaaccgggugugcaccaacuacaugcccuacuucuucacccugcugcuccagcugugcaccuucacccgcuccacgaacagccggaucaaggccuccaugcccaccaccaucgccaagaacaccgucaagagcgugggcaaguucugccuggaggccagcuucaacuaccucaagucccccaacuucagcaagcugaucaacaucaucaucugguuccugcuccuguccgugugccuggggagccucaucuacuccacggccgcgcugggcguccugaugagcaaccucgggaugccguccuacugcaccggcuaccgcgagggcuaccugaacagcaccaacgugaccaucgccacguacugcaccggguccauccccugcagcgugugccuguccggccucgacagccuggacaccuaccccucccuggagaccauccagaucacgaucagcuccuucaagugggaccucaccgccuucgggcuggucgccgagugguuccuggccuacauccucuucacccgguucuucuacgugcugggccuggcggccaucaugcagcucuucuucagcuacuucgccgugcacuucaucuccaacagcuggcugauguggcugaucaucaaccugguccagauggcccccaucuccgcgauggugcgcauguacaucuucuucgccagcuucuacuacguguggaagagcuacguccacgugguggacgggugcaacuccagcaccugcaugaugugcuacaagcggaaccgcgccacgcgggucgagugcaccaccaucgugaacggcguccgccgguccuucuacguguacgccaacggcgggaagggcuucugcaagcuccacaacuggaacugcgugaacugcgacaccuucugcgccgggagcacguucaucuccgacgaggucgcgcgcgaccugagccugcaguucaagcggccgaucaaccccaccgaccaguccagcuacaucguggacuccgugaccgucaagaacggcagcauccaccucuacuucgacaaggccgggcagaagaccuacgagcgccacucccugagccacuucgugaaccuggacaaccuccgggccaacaacacgaagggcucccugcccaucaacgugaucgucuucgacggcaagagcaagugcgaggaguccagcgccaaguccgccagcguguacuacucccagcugaugugccagcccauccuccugcuggaccaggcgcucgugagcgacgucggggacagcgccgagguggccgugaagauguucgacgccuacgucaacaccuucuccagcaccuucaacgugccgauggagaagcugaagacccugguggccacggcggaggccgagcucgccaagaacgucucccuggacaacgugcugagcaccuucaucuccgccgcgcgccagggcuucguggacagcgacgucgagaccaaggacgugguggagugccucaagcugucccaccagagcgacaucgaggucaccggggacuccugcaacaacuacaugcugacguacaacaagguggagaacaugaccccccgggaccucggcgccugcaucgacugcagcgcccgccacaucaacgcccagguggccaagucccacaacaucgcgcugaucuggaacgucaaggacuucaugagccuguccgagcagcuccggaagcagauccgcagcgccgccaagaagaacaaccugcccuucaagcugaccugcgccaccacgcgccagguggugaacgucgugaccaccaagaucgcccucaaggggggcuga

SEQ ID NO: 17697 - RNA, 5841 nt, Artificial Sequence
  SARS-CoV-2__MT873152.1__non-structural protein 3 (NSP3) CDS gc
auggcccccaccaaggugaccuucggcgacgacacggucaucgaggugcagggguacaagagcgugaacaucaccuucgagcuggacgagcgcaucgacaagguccucaacgagaagugcuccgccuacaccguggagcugggcaccgaggugaacgaguucgcgugcgucguggccgacgccgugaucaagacgcugcagccggucagcgagcuccugaccccccuggggaucgaccucgacgagugguccauggccaccuacuaccuguucgacgagagcggcgaguucaagcuggccucccacauguacugcagcuucuacccccccgacgaggacgaggaggagggggacugcgaggaggaggaguucgagccguccacccaguacgaguacggcacggaggacgacuaccagggcaagccccucgaguucggggcgaccagcgccgcccugcagcccgaggaggagcaggaggaggacuggcuggacgacgacucccagcagaccgugggccagcaggacgggagcgaggacaaccagaccacgaccauccagaccaucguggagguccagccccagcucgagauggagcugaccccgguggugcagacgaucgaggucaacuccuucagcggcuaccugaagcucaccgacaacguguacaucaagaacgccgacaucguggaggaggcgaagaaggucaagcccaccgugguggucaacgccgccaacguguaccugaagcacgggggcggcguggccggggcccugaacaaggcgaccaacaacgccaugcaggucgaguccgacgacuacaucgccacgaacggcccccucaagguggggggcagcugcguccuguccggccacaaccuggccaagcacugccuccacgugguggggcccaacgucaacaagggcgaggacauccagcugcugaagagcgccuacgagaacuucaaccagcacgaggugcuccuggcgccgcugcucuccgccgggaucuucggcgccgaccccauccacagccugcgggugugcgucgacaccgugcgcaccaacguguaccuggccgucuucgacaagaaccucuacgacaagcugguguccagcuuccuggagaugaagagcgagaagcagguggagcagaagaucgccgagauccucaaggaggaggucaagcccuucaucaccgaguccaagcccagcguggagcagcggaagcaggacgacaagaagaucaaggcgugcguggaggaggucacgaccacccuggaggagaccaaguuccugacggagaaccuccugcuguacaucgacaucaacgggaaccuccacccggacuccgccacccuggugagcgacaucgacaucaccuuccugaagaaggacgcccccuacaucgugggcgacgucgugcaggagggcgugcucaccgccgucgugauccccacgaagaaggccgggggcaccaccgagaugcuggcgaaggcccugcgcaaggugcccaccgacaacuacaucacgaccuacccggggcagggccucaacggguacaccgucgaggaggccaagaccgugcugaagaagugcaaguccgccuucuacauccugcccagcaucaucuccaacgagaagcaggagauccucggcaccgugagcuggaaccugcgggagaugcuggcgcacgccgaggagacgcgcaagcugaugcccgucugcguggagaccaaggccaucguguccaccauccagcggaaguacaagggcaucaagauccaggagggggucguggacuacggcgcccgcuucuacuucuacaccagcaagacgaccguggccucccucaucaacacccugaacgaccugaacgagacccucgucacgaugccccugggguacgugacccacggccugaaccucgaggaggcggcccgguacaugcgcagccugaaggugccggccaccgucuccgugagcucccccgacgccgugaccgccuacaacggguaccugacgagcuccagcaagacccccgaggagcacuucaucgagaccaucucccucgcgggcagcuacaaggacuggagcuacuccggccagagcacccagcuggggaucgaguuccugaagcggggcgacaaguccgucuacuacacgagcaaccccaccaccuuccaccucgacggggaggugaucaccuucgacaaccugaagacgcugcucucccugcgcgaggugcggaccaucaaggucuucaccaccguggacaacaucaaccugcacacgcagguggucgacaugagcaugaccuacggccagcaguucggcccgaccuaccucgacggggccgacgugaccaagaucaagccccacaacucccacgagggcaagacguucuacgugcugcccaacgacgacacccugcgcgucgaggccuucgaguacuaccacaccaccgacccgagcuuccucgggcgguacauguccgcccugaaccacacgaagaaguggaaguacccccaggugaacggccugaccagcaucaagugggccgacaacaacugcuaccucgcgaccgcccugcugacccuccagcagaucgagcugaaguucaacccccccgcccugcaggacgccuacuaccgcgcgcgggccggggaggccgccaacuucugcgcccucauccuggcguacugcaacaagacggugggcgagcugggcgacguccgcgagaccauguccuaccucuuccagcacgccaaccuggacagcugcaagcgggugcugaacgucgugugcaagaccugcgggcagcagcagaccacccucaagggcguggaggccgucauguacauggggacgcuguccuacgagcaguucaagaagggcgugcagaucccgugcaccugcgggaagcaggccaccaaguaccuggugcagcaggagagccccuucgucaugauguccgccccccccgcgcaguacgagcucaagcacggcaccuucacgugcgccagcgaguacaccggcaacuaccagugcgggcacuacaagcacaucaccuccaaggagacccuguacugcaucgacggcgcccugcucacgaagagcagcgaguacaaggggccgaucaccgacguguucuacaaggagaacuccuacaccaccacgaucaagcccgugaccuacaagcuggacggcgucgugugcaccgagaucgaccccaagcuggacaacuacuacaagaaggacaacagcuacuucaccgagcagcccaucgaccucgugccgaaccagcccuaccccaacgccuccuucgacaacuucaaguucgucugcgacaacaucaaguucgccgacgaccugaaccagcugacgggguacaagaagcccgcgagccgcgagcucaaggugaccuucuucccggaccugaacggcgacguggucgccaucgacuacaagcacuacacccccuccuucaagaagggcgccaagcugcuccacaagcccaucguguggcacgugaacaacgccaccaacaaggcgacguacaagcccaacaccuggugcauccggugccuguggagcaccaagccggucgagaccuccaacagcuucgacgugcugaaguccgaggacgcccaggggauggacaaccucgccugcgaggaccugaagcccgugagcgaggaggucguggagaaccccacgauccagaaggacgugcuggagugcaacgucaagaccaccgagguggugggcgacaucauccucaagcccgccaacaacucccugaagaucaccgaggaggucgggcacacggaccugauggccgcguacguggacaacagcucccucaccaucaagaagccgaacgagcugagccgcgugcugggccucaagacccuggccacccacgggcuggccgccgucaacuccgugcccugggacacgguggccaacuacgcgaagcccuuccucaacaaggucgugagcaccaccaccaacaucgugacgcgcugccugaaccgggucugcaccaacuacaugccguacuucuucacccugcuccugcagcugugcaccuucacccgcuccacgaacagccggaucaaggccuccaugcccaccaccaucgccaagaacaccgugaagagcgugggcaaguucugccucgaggccagcuucaacuaccugaagucccccaacuucagcaagcugaucaacaucaucaucugguuccuccugcuguccgucugccucggcagccugaucuacuccacggccgcgcugggggugcucaugagcaaccugggcaugcccuccuacugcaccggguaccgcgagggcuaccugaacagcaccaacgugaccaucgccacguacugcaccggcuccaucccgugcagcgucugccucuccgggcuggacagccuggacaccuaccccucccucgagaccauccagaucacgaucagcuccuucaagugggaccugaccgccuucggccugguggccgagugguuccucgccuacauccuguucacccgguucuucuacgugcuggggcucgcggccaucaugcagcuguucuucagcuacuucgccguccacuucaucuccaacagcuggcugauguggcugaucaucaaccucgugcagauggcccccaucuccgcgauggugcgcauguacaucuucuucgccagcuucuacuacgucuggaagagcuacgugcacguggucgacggcugcaacuccagcaccugcaugaugugcuacaagcggaaccgcgccacgcggguggagugcaccaccaucgucaacggggugcgccgguccuucuacguguacgccaacggcggcaagggguucugcaagcugcacaacuggaacugcgucaacugcgacaccuucugcgccggcagcacguucaucuccgacgagguggcgcgcgaccugagccuccaguucaagcggcccaucaacccgaccgaccaguccagcuacaucguggacuccgucaccgugaagaacgggagcauccaccuguacuucgacaaggccggccagaagaccuacgagcgccacucccugagccacuucgugaaccucgacaaccugcgggccaacaacacgaaggggucccugcccaucaacgucaucguguucgacggcaagagcaagugcgaggaguccagcgccaaguccgccagcguguacuacucccagcucaugugccagcccauccugcugcucgaccaggcgcuggucagcgacgugggcgacagcgccgagguggccgucaagauguucgacgccuacgugaacaccuucuccagcaccuucaacgugcccauggagaagcugaagacccucgucgccacggcggaggccgagcuggccaagaacgugucccuggacaacgugcucagcaccuucaucuccgccgcgcgccagggguucgucgacagcgacguggagaccaaggacguggucgagugccugaagcugucccaccagagcgacaucgaggugaccggcgacuccugcaacaacuacaugcucacguacaacaagguggagaacaugaccccgcgggaccugggggccugcaucgacugcagcgcccgccacaucaacgcccaggucgccaagucccacaacaucgcgcugaucuggaacgugaaggacuucaugagccucuccgagcagcugcggaagcagauccgcagcgccgccaagaagaacaaccugcccuucaagcucaccugcgccaccacgcgccagguggucaacguggugaccaccaagaucgcccugaagggcggguga

SEQ ID NO: 17698 - RNA, 5841 nt, Artificial Sequence
  SARS-CoV-2__MT873163.1__non-structural protein 3 (NSP3) CDS gc
auggcccccaccaaggugaccuucggcgacgacacggucaucgaggugcagggguacaagagcgugaacaucaccuucgagcuggacgagcgcaucgacaagguccucaacgagaagugcuccgccuacaccguggagcugggcaccgaggugaacgaguucgcgugcgucguggccgacgccgugaucaagacgcugcagccggucagcgagcuccugaccccccuggggaucgaccucgacgagugguccauggccaccuacuaccuguucgacgagagcggcgaguucaagcuggccucccacauguacugcagcuucuacccccccgacgaggacgaggaggagggggacugcgaggaggaggaguucgagccguccacccaguacgaguacggcacggaggacgacuaccagggcaagccccucgaguucggggcgaccagcgccgcccugcagcccgaggaggagcaggaggaggacuggcuggacgacgacucccagcagaccgugggccagcaggacgggagcgaggacaaccagaccacgaccauccagaccaucguggagguccagccccagcucgagauggagcugaccccgguggugcagacgaucgaggucaacuccuucagcggcuaccugaagcucaccgacaacguguacaucaagaacgccgacaucguggaggaggcgaagaaggucaagcccaccgugguggucaacgccgccaacguguaccugaagcacgggggcggcguggccggggcccugaacaaggcgaccaacaacgccaugcaggucgaguccgacgacuacaucgccacgaacggcccccucaagguggggggcagcugcguccuguccggccacaaccuggccaagcacugccuccacgugguggggcccaacgucaacaagggcgaggacauccagcugcugaagagcgccuacgagaacuucaaccagcacgaggugcuccuggcgccgcugcucuccgccgggaucuucggcgccgaccccauccacagccugcgggugugcgucgacaccgugcgcaccaacguguaccuggccgucuucgacaagaaccucuacgacaagcugguguccagcuuccuggagaugaagagcgagaagcagguggagcagaagaucgccgagauccccaaggaggaggucaagcccuucaucaccgaguccaagccgagcguggagcagcggaagcaggacgacaagaagaucaaggcgugcguggaggaggucacgaccacccucgaggagaccaaguuccugacggagaaccugcuccuguacaucgacaucaacgggaaccugcaccccgacuccgccacccucgugagcgacaucgacaucaccuuccugaagaaggacgcccccuacaucgugggcgacgucgugcaggagggcgugcugaccgccgucgugauccccacgaagaaggccgggggcaccaccgagaugcucgcgaaggcccugcgcaaggugccgaccgacaacuacaucacgaccuaccccgggcagggccugaacggguacaccgucgaggaggccaagaccgugcucaagaagugcaaguccgccuucuacauccugcccagcaucaucuccaacgagaagcaggagauccugggcaccgugagcuggaaccuccgggagaugcuggcgcacgccgaggagacgcgcaagcugaugcccgucugcguggagaccaaggccaucguguccaccauccagcggaaguacaagggcaucaagauccaggagggggucguggacuacggcgcccgcuucuacuucuacaccagcaagacgaccguggccucccugaucaacacccucaacgaccugaacgagacccuggucacgaugccgcucggguacgugacccacggccugaaccuggaggaggcggcccgguacaugcgcagccucaaggugcccgccaccgucuccgugagcucccccgacgccgugaccgccuacaacggguaccugacgagcuccagcaagacccccgaggagcacuucaucgagaccaucucccuggcgggcagcuacaaggacuggagcuacuccggccagagcacccagcucgggaucgaguuccugaagcggggcgacaaguccgucuacuacacgagcaacccgaccaccuuccaccuggacggggaggugaucaccuucgacaaccucaagacgcugcugucccuccgcgaggugcggaccaucaaggucuucaccaccguggacaacaucaaccugcacacgcagguggucgacaugagcaugaccuacggccagcaguucggccccaccuaccuggacggggccgacgugaccaagaucaagccccacaacucccacgagggcaagacguucuacgugcucccgaacgacgacacccugcgcgucgaggccuucgaguacuaccacaccaccgaccccagcuuccuggggcgguacauguccgcccucaaccacacgaagaaguggaaguacccccaggugaacggccugaccagcaucaagugggccgacaacaacugcuaccuggcgaccgcccuccugacccugcagcagaucgagcucaaguucaaccccccggcccugcaggacgccuacuaccgcgcgcgggccggggaggccgccaacuucugcgcccugauccucgcguacugcaacaagacggugggcgagcugggcgacguccgcgagaccauguccuaccuguuccagcacgccaaccucgacagcugcaagcgggugcugaacgucgugugcaagaccugcgggcagcagcagaccacccugaagggcguggaggccgucauguacauggggacgcucuccuacgagcaguucaagaagggcgugcagauccccugcaccugcgggaagcaggccaccaaguaccuggugcagcaggagagccccuucgucaugauguccgcccccccggcgcaguacgagcugaagcacggcaccuucacgugcgccagcgaguacaccggcaacuaccagugcgggcacuacaagcacaucaccuccaaggagacccucuacugcaucgacggcgcccugcugacgaagagcagcgaguacaaggggcccaucaccgacguguucuacaaggagaacuccuacaccaccacgaucaagcccgugaccuacaagcucgacggcgucgugugcaccgagaucgaccccaagcuggacaacuacuacaagaaggacaacagcuacuucaccgagcagccgaucgaccuggugcccaaccagcccuaccccaacgccuccuucgacaacuucaaguucgucugcgacaacaucaaguucgccgacgaccucaaccagcugacgggguacaagaagccggcgagccgcgagcugaaggugaccuucuuccccgaccucaacggcgacguggucgccaucgacuacaagcacuacacccccuccuucaagaagggcgccaagcugcugcacaagcccaucguguggcacgugaacaacgccaccaacaaggcgacguacaagccgaacaccuggugcauccggugccucuggagcaccaagcccgucgagaccuccaacagcuucgacgugcugaaguccgaggacgcccaggggauggacaaccuggccugcgaggagcucaagcccgugagcgaggaggucguggagaaccccacgauccagaaggacgugcuggagugcaacgucaagaccaccgagguggugggcgacaucauccugaagccggccaacaacucccucaagaucaccgaggaggucgggcacacggaccugauggccgcguacguggacaacagcucccugaccaucaagaagcccaacgagcucagccgcgugcugggccugaagacccucgccacccacgggcuggccgccgucaacuccgugcccugggacacgaucgccaacuacgcgaagccguuccugaacaagguggucagcaccaccaccaacaucgugacgcgcugccucaaccgggugugcaccaacuacaugcccuacuucuucacccugcugcuccagcugugcaccuucacccgcuccacgaacagccggaucaaggccuccaugcccaccaccaucgccaagaacaccgucaagagcgugggcaaguucugccuggaggccagcuucaacuaccucaagucccccaacuucagcaagcugaucaacaucaucaucugguuccugcuccuguccgugugccugggcagccucaucuacuccacggccgcgcuggggguccugaugagcaaccucggcaugccguccuacugcaccggguaccgcgagggcuaccugaacagcaccaacgugaccaucgccacguacugcaccggcuccauccccugcagcgugugccuguccgggcucgacagccuggacaccuaccccucccuggagaccauccagaucacgaucagcuccuucaagugggaccucaccgccuucggccuggucgccgagugguuccuggccuacauccucuucacccgguucuucuacgugcuggggcuggcggccaucaugcagcucuucuucagcuacuucgccgugcacuucaucuccaacagcuggcugauguggcugaucaucaaccugguccagauggcccccaucuccgcgauggugcgcauguacaucuucuucgccagcuucuacuacguguggaagagcuacguccacgugguggacggcugcaacuccagcaccugcaugaugugcuacaagcggaaccgcgccacgcgggucgagugcaccaccaucgugaacgggguccgccgguccuucuacguguacgccaacggcggcaagggguucugcaagcuccacaacuggaacugcgugaacugcgacaccuucugcgccggcagcacguucaucuccgacgaggucgcgcgcgaccugagccugcaguucaagcggccgaucaaccccaccgaccaguccagcuacaucguggacuccgugaccgucaagaacgggagcauccaccucuacuucgacaaggccggccagaagaccuacgagcgccacucccugagccacuucgugaaccuggacaaccuccgggccaacaacacgaaggggucccugcccaucaacgugaucgucuucgacggcaagagcaagugcgaggaguccagcgccaaguccgccagcguguacuacucccagcugaugugccagcccauccuccugcuggaccaggcgcucgugagcgacgucggcgacagcgccgagguggccgugaagauguucgacgccuacgucaacaccuucuccagcaccuucaacgugccgauggagaagcugaagacccugguggccacggcggaggccgagcucgccaagaacgucucccuggacaacgugcugagcaccuucaucuccgccgcgcgccagggguucguggacagcgacgucgagaccaaggacgugguggagugccucaagcugucccaccagagcgacaucgaggucaccggcgacuccugcaacaacuacaugcugacguacaacaagguggagaacaugaccccccgggaccucggggccugcaucgacugcagcgcccgccacaucaacgcccagguggccaagucccacaacaucgcgcugaucuggaacgucaaggacuucaugagccuguccgagcagcuccggaagcagauccgcagcgccgccaagaagaacaaccugcccuucaagcugaccugcgccaccacgcgccagguggugaacgucgugaccaccaagaucgcccucaagggcggguga

SEQ ID NO: 17699 - RNA, 5841 nt, Artificial Sequence
  SARS-CoV-2__MT873201.1__non-structural protein 3 (NSP3) CDS gc
auggcccccaccaaggugaccuucggcgacgacacggucaucgaggugcagggguacaagagcgugaacaucaccuucgagcuggacgagcgcaucgacaagguccucaacgagaagugcuccgccuacaccguggagcugggcaccgaggugaacgaguucgcgugcgucguggccgacgccgugaucaagacgcugcagccggucagcgagcuccugaccccccuggggaucgaccucgacgagugguccauggccaccuacuaccuguucgacgagagcggcgaguucaagcuggccucccacauguacugcagcuucuacccccccgacgaggacgaggaggagggggacugcgaggaggaggaguucgagccguccacccaguacgaguacggcacggaggacgacuaccagggcaagccccucgaguucggggcgaccagcgccgcccugcagcccgaggaggagcaggaggaggacuggcuggacgacgacucccagcagaccgugggccagcaggacgggagcgaggacaaccagaccacgaccauccagaccaucguggagguccagccccagcucgagauggagcugaccccgguggugcagacgaucgaggucaacuccuucagcggcuaccugaagcucaccgacaacguguacaucaagaacgccgacaucguggaggaggcgaagaaggucaagcccaccgugguggucaacgccgccaacguguaccugaagcacgggggcggcguggccggggcccugaacaaggcgaccaacaacgccaugcaggucgaguccgacgacuacaucgccacgaacggcccccucaagguggggggcagcugcguccuguccggccacaaccuggccaagcacugccuccacgugguggggcccaacgucaacaagggcgaggacauccagcugcugaagagcgccuacgagaacuucaaccagcacgaggugcuccuggcgccgcugcucuccgccgggaucuucggcgccgaccccauccacagccugcgggugugcgucgacaccgugcgcaccaacguguaccuggccgucuucgacaagaaccucuacgacaagcugguguccagcuuccuggagaugaagagcgagaagcagguggagcagaagaucgccgagauccccaaggaggaggucaagcccuucaucaccgaguccaagccgagcguggagcagcggaagcaggacgacaagaagaucaaggcgugcguggaggaggucacgaccacccucgaggagaccaaguuccugacggagaaccugcuccuguacaucgacaucaacgggaaccugcaccccgacuccgccacccucgugagcgacaucgacaucaccuuccugaagaaggacgcccccuacaucgugggcgacgucgugcaggagggcgugcugaccgccgucgugauccccacgaagaaggccgggggcaccaccgagaugcucgcgaaggcccugcgcaaggugccgaccgacaacuacaucacgaccuaccccgggcagggccugaacggguacaccgucgaggaggccaagaccgugcucaagaagugcaaguccgccuucuacauccugcccagcaucaucuccaacgagaagcaggagauccugggcaccgugagcuggaaccuccgggagaugcuggcgcacgccgaggagacgcgcaagcugaugcccgucugcguggagaccaaggccaucguguccaccauccagcggaaguacaagggcaucaagauccaggagggggucguggacuacggcgcccgcuucuacuucuacaccagcaagacgaccguggccucccugaucaacacccucaacgaccugaacgagacccuggucacgaugccgcucggguacgugacccacggccugaaccuggaggaggcggcccgguacaugcgcagccucaaggugcccgccaccgucuccgugagcucccccgacgccgugaccgccuacaacggguaccugacgagcuccagcaagacccccgaggagcacuucaucgagaccaucucccuggcgggcagcuacaaggacuggagcuacuccggccagagcacccagcucgggaucgaguuccugaagcggggcgacaaguccgucuacuacacgagcaacccgaccaccuuccaccuggacggggaggugaucaccuucgacaaccucaagacgcugcugucccuccgcgaggugcggaccaucaaggucuucaccaccguggacaacaucaaccugcacacgcagguggucgacaugagcaugaccuacggccagcaguucggccccaccuaccuggacggggccgacgugaccaagaucaagccccacaacucccacgagggcaagacguucuacgugcucccgaacgacgacacccugcgcgucgaggccuucgaguacuaccacaccaccgaccccagcuuccuggggcgguacauguccgcccucaaccacacgaagaaguggaaguacccccaggugaacggccugaccagcaucaagugggccgacaacaacugcuaccuggcgaccgcccuccugacccugcagcagaucgagcucaaguucaaccccccggcccugcaggacgccuacuaccgcgcgcgggccggggaggccgccaacuucugcgcccugauccucgcguacugcaacaagacggugggcgagcugggcgacguccgcgagaccauguccuaccuguuccagcacgccaaccucgacagcugcaagcgggugcugaacgucgugugcaagaccugcgggcagcagcagaccacccugaagggcguggaggccgucauguacauggggacgcucuccuacgagcaguucaagaagggcgugcagauccccugcaccugcgggaagcaggccaccaaguaccuggugcagcaggagagccccuucgucaugauguccgcccccccggcgcaguacgagcugaagcacggcaccuucacgugcgccagcgaguacaccggcaacuaccagugcgggcacuacaagcacaucaccuccaaggagacccucuacugcaucgacggcgcccugcugacgaagagcagcgaguacaagggguccaucaccgacguguucuacaaggagaacagcuacaccaccacgaucaagcccgugaccuacaagcucgacggcgucgugugcaccgagaucgaccccaagcuggacaacuacuacaagaaggacaacuccuacuucaccgagcagcccaucgaccuggugccgaaccagcccuaccccaacgccagcuucgacaacuucaaguucgucugcgacaacaucaaguucgccgacgaccucaaccagcugacgggguacaagaagcccgcgucccgcgagcugaaggugaccuucuucccggaccucaacggcgacguggucgccaucgacuacaagcacuacacccccagcuucaagaagggcgccaagcugcugcacaagcccaucguguggcacgugaacaacgccaccaacaaggcgacguacaagcccaacaccuggugcauccggugccucugguccaccaagccggucgagaccagcaacuccuucgacgugcugaagagcgaggacgcccaggggauggacaaccuggccugcgaggaccucaagcccguguccgaggaggucguggagaaccccacgauccagaaggacgugcuggagugcaacgucaagaccaccgagguggugggcgacaucauccugaagcccgccaacaacagccucaagaucaccgaggaggucgggcacacggaccugauggccgcguacguggacaacuccagccugaccaucaagaagccgaacgagcucucccgcgugcugggccugaagacccucgccacccacgggcuggccgccgucaacagcgugcccugggacacgaucgccaacuacgcgaagcccuuccugaacaagguggucuccaccaccaccaacaucgugacgcgcugccucaaccgggugugcaccaacuacaugccguacuucuucacccugcugcuccagcugugcaccuucacccgcagcacgaacucccggaucaaggccagcaugcccaccaccaucgccaagaacaccgucaagagcgugggcaaguucugccuggaggccuccuucaacuaccucaagagccccaacuucuccaagcugaucaacaucaucaucugguuccugcuccugagcgugugccugggcucccucaucuacagcacggccgcgcuggggguccugauguccaaccucggcaugcccagcuacugcaccggguaccgcgagggcuaccugaacuccaccaacgugaccaucgccacguacugcaccggcagcaucccgugcuccgugugccugagcgggcucgacucccuggacaccuaccccagccuggagaccauccagaucacgaucuccagcuucaagugggaccucaccgccuucggccuggucgccgagugguuccuggccuacauccucuucacccgguucuucuacgugcuggggcuggcggccaucaugcagcucuucuucuccuacuucgccgugcacuucaucagcaacuccuggcugauguggcugaucaucaaccugguccagauggcccccaucagcgcgauggugcgcauguacaucuucuucgccagcuucuacuacguguggaaguccuacguccacgugguggacggcugcaacagcuccaccugcaugaugugcuacaagcggaaccgcgccacgcgggucgagugcaccaccaucgugaacgggguccgccggagcuucuacguguacgccaacggcggcaagggguucugcaagcuccacaacuggaacugcgugaacugcgacaccuucugcgccggcuccacguucaucagcgacgaggucgcgcgcgaccugucccugcaguucaagcggcccaucaacccgaccgaccagagcuccuacaucguggacagcgugaccgucaagaacggguccauccaccucuacuucgacaaggccggccagaagaccuacgagcgccacagccugucccacuucgugaaccuggacaaccuccgggccaacaacacgaaggggagccugcccaucaacgugaucgucuucgacggcaaguccaagugcgaggagagcuccgccaagagcgccuccguguacuacagccagcugaugugccagcccauccuccugcuggaccaggcgcucgugagcgacgucggcgacuccgccgagguggccgugaagauguucgacgccuacgucaacaccuucagcuccaccuucaacgugcccauggagaagcugaagacccugguggccacggcggaggccgagcucgccaagaacgucagccuggacaacgugcuguccaccuucaucagcgccgcgcgccagggguucguggacuccgacgucgagaccaaggacgugguggagugccucaagcugagccaccaguccgacaucgaggucaccggcgacagcugcaacaacuacaugcugacguacaacaagguggagaacaugaccccgcgggaccucggggccugcaucgacugcuccgcccgccacaucaacgcccagguggccaagagccacaacaucgcgcugaucuggaacgucaaggacuucaugucccugagcgagcagcuccggaagcagauccgcuccgccgccaagaagaacaaccugcccuucaagcugaccugcgccaccacgcgccagguggugaacgucgugaccaccaagaucgcccucaagggcggguga

SEQ ID NO: 17700 - RNA, 5841 nt, Artificial Sequence
  SARS-CoV-2__MT873208.1__non-structural protein 3 (NSP3) CDS gc
auggcccccaccaaggugaccuucggcgacgacacggucaucgaggugcagggguacaagagcgugaacaucaccuucgagcuggacgagcgcaucgacaagguccucaacgagaagugcuccgccuacaccguggagcugggcaccgaggugaacgaguucgcgugcgucguggccgacgccgugaucaagacgcugcagccggucagcgagcuccugaccccccuggggaucgaccucgacgagugguccauggccaccuacuaccuguucgacgagagcggcgaguucaagcuggccucccacauguacugcagcuucuacccccccgacgaggacgaggaggagggggacugcgaggaggaggaguucgagccguccacccaguacgaguacggcacggaggacgacuaccagggcaagccccucgaguucggggcgaccagcgccgcccugcagcccgaggaggagcaggaggaggacuggcuggacgacgacucccagcagaccgugggccagcaggacgggagcgaggacaaccagaccacgaccauccagaccaucgccgaggugcagccccagcucgagauggagcugaccccggucgugcagacgaucgaggugaacuccuucagcggcuaccugaagcucaccgacaacgucuacaucaagaacgcggacaucguggaggaggccaagaaggugaagcccaccgucguggugaacgccgccaacgucuaccugaagcacgggggcggcguggccggggcgcugaacaaggccaccaacaacgccaugcagguggaguccgacgacuacaucgccacgaacggcccccucaaggucgggggcagcugcgugcuguccggccacaaccuggccaagcacugccuccacgucguggggcccaacgugaacaagggcgaggacauccagcugcugaagagcgcguacgagaacuucaaccagcacgagguccuccuggccccgcugcucuccgccgggaucuucggcgccgaccccauccacagccugcgggugugcguggacaccguccgcaccaacguguaccuggccguguucgacaagaaccucuacgacaagcuggucuccagcuuccuggagaugaagagcgagaagcagguggagcagaagaucgcggagauccccaaggaggaggugaagcccuucaucaccgaguccaagccgagcgucgagcagcggaagcaggacgacaagaagaucaaggccugcguggaggaggugacgaccacccucgaggagaccaaguuccugacggagaaccugcuccuguacaucgacaucaacgggaaccugcaccccgacuccgccacccucgucagcgacaucgacaucaccuuccugaagaaggacgcccccuacaucgugggcgacgugguccaggagggcgugcugaccgccguggucauccccacgaagaaggcggggggcaccaccgagaugcucgccaaggcccugcgcaaggugccgaccgacaacuacaucacgaccuaccccgggcagggccugaacggguacaccguggaggaggccaagaccguccucaagaagugcaaguccgcguucuacauccugcccagcaucaucuccaacgagaagcaggagauccugggcaccgugagcuggaaccuccgggagaugcuggcccacgccgaggagacgcgcaagcugaugcccgugugcgucgagaccaaggccaucguguccaccauccagcggaaguacaagggcaucaagauccaggaggggguggucgacuacggcgcccgcuucuacuucuacaccagcaagacgaccguggcgucccugaucaacacccucaacgaccugaacgagacccuggugacgaugccgcucggguacgucacccacggccugaaccuggaggaggccgcccgguacaugcgcagccucaaggugcccgccaccguguccgucagcucccccgacgccgugaccgcguacaacggguaccugacgagcuccagcaagacccccgaggagcacuucaucgagaccaucucccuggccggcagcuacaaggacuggagcuacuccggccagagcacccagcucgggaucgaguuccugaagcggggcgacaaguccguguacuacacgagcaacccgaccaccuuccaccuggacggggaggucaucaccuucgacaaccucaagacgcugcugucccuccgcgaggugcggaccaucaagguguucaccaccgucgacaacaucaaccugcacacgcaggugguggacaugagcaugaccuacggccagcaguucggccccaccuaccuggacggggccgacgucaccaagaucaagccccacaacucccacgagggcaagacguucuacgugcucccgaacgacgacacccugcgcguggaggccuucgaguacuaccacaccaccgaccccagcuuccuggggcgguacauguccgcccucaaccacacgaagaaguggaaguacccccaggucaacggccugaccagcaucaagugggcggacaacaacugcuaccuggccaccgcccuccugacccugcagcagaucgagcucaaguucaaccccccggcccugcaggacgcguacuaccgcgcccgggccggggaggccgccaacuucugcgcgcugauccucgccuacugcaacaagacggugggcgagcugggcgacgugcgcgagaccauguccuaccuguuccagcacgccaaccucgacagcugcaagcggguccugaacguggucugcaagaccugcgggcagcagcagaccacccugaagggcguggaggccgugauguacauggggacgcucuccuacgagcaguucaagaagggcguccagauccccugcaccugcgggaagcaggccaccaaguaccuggugcagcaggagagccccuucgugaugauguccgcgcccccggcccaguacgagcugaagcacggcaccuucacgugcgccagcgaguacaccggcaacuaccagugcgggcacuacaagcacaucaccuccaaggagacccucuacugcaucgacggcgcccugcugacgaagagcagcgaguacaaggggcccaucaccgacgucuucuacaaggagaacuccuacaccaccacgaucaagcccgugaccuacaagcucgacggcguggucugcaccgagaucgaccccaagcuggacaacuacuacaagaaggacaacagcuacuucaccgagcagccgaucgaccuggugcccaaccagcccuaccccaacgccuccuucgacaacuucaaguucgugugcgacaacaucaaguucgcggacgaccucaaccagcugacgggguacaagaagccggccagccgcgagcugaaggucaccuucuuccccgaccucaacggcgacgugguggccaucgacuacaagcacuacacccccuccuucaagaagggcgccaagcugcugcacaagcccaucgucuggcacgugaacaacgcgaccaacaaggccacguacaagccgaacaccuggugcauccggugccucuggagcaccaagcccguggagaccuccaacagcuucgacguccugaaguccgaggacgcccaggggauggacaaccuggccugcgaggaccucaagcccgugagcgaggagguggucgagaaccccacgauccagaaggacgugcuggagugcaacgugaagaccaccgaggucgugggcgacaucauccugaagccggccaacaacucccucaagaucaccgaggagguggggcacacggaccugauggcggccuacgucgacaacagcucccugaccaucaagaagcccaacgagcucagccgcgugcugggccugaagacccucgccacccacgggcuggccgccgugaacuccguccccugggacacgaucgcgaacuacgccaagccguuccugaacaagguggugagcaccaccaccaacaucgucacgcgcugccucaaccgggugugcaccaacuacaugcccuacuucuucacccugcugcuccagcugugcaccuucacccgcuccacgaacagccggaucaaggccuccaugcccaccaccaucgccaagaacaccgugaagagcgucggcaaguucugccuggaggccagcuucaacuaccucaagucccccaacuucagcaagcugaucaacaucaucaucugguuccugcuccuguccgugugccugggcagccucaucuacuccacggcggcccugggggugcugaugagcaaccucggcaugccguccuacugcaccggguaccgcgagggcuaccugaacagcaccaacgucaccaucgccacguacugcaccggcuccauccccugcagcgugugccuguccgggcucgacagccuggacaccuaccccucccuggagaccauccagaucacgaucagcuccuucaagugggaccucaccgccuucggccugguggccgagugguuccuggcguacauccucuucacccgguucuucuacguccuggggcuggccgccaucaugcagcucuucuucagcuacuucgccgugcacuucaucuccaacagcuggcugauguggcugaucaucaaccuggugcagauggcgcccaucuccgccaugguccgcauguacaucuucuucgccagcuucuacuacguguggaagagcuacgugcacgucguggacggcugcaacuccagcaccugcaugaugugcuacaagcggaaccgcgccacgcggguggagugcaccaccaucgucaacggggugcgccgguccuucuacgucuacgccaacggcggcaagggguucugcaagcuccacaacuggaacugcgugaacugcgacaccuucugcgcgggcagcacguucaucuccgacgagguggcccgcgaccugagccugcaguucaagcggccgaucaaccccaccgaccaguccagcuacaucgucgacuccgugaccgugaagaacgggagcauccaccucuacuucgacaaggccggccagaagaccuacgagcgccacucccugagccacuucgucaaccuggacaaccuccgggccaacaacacgaaggggucccugcccaucaacgugaucguguucgacggcaagagcaagugcgaggaguccagcgccaaguccgcgagcgucuacuacucccagcugaugugccagcccauccuccugcuggaccaggcccucgugagcgacgugggcgacagcgccgaggucgccgugaagauguucgacgccuacgugaacaccuucuccagcaccuucaacgucccgauggagaagcugaagacccugguggcgacggccgaggccgagcucgccaagaacgugucccuggacaacguccugagcaccuucaucuccgcggcccgccagggguucguggacagcgacguggagaccaaggacgucguggagugccucaagcugucccaccagagcgacaucgaggugaccggcgacuccugcaacaacuacaugcugacguacaacaaggucgagaacaugaccccccgggaccucggggccugcaucgacugcagcgcccgccacaucaacgcccagguggcgaagucccacaacaucgcccugaucuggaacgugaaggacuucaugagccuguccgagcagcuccggaagcagauccgcagcgccgccaagaagaacaaccugcccuucaagcugaccugcgccaccacgcgccaggucgugaacguggucaccaccaagaucgcgcucaagggcggguga

SEQ ID NO: 17701 - RNA, 5841 nt, Artificial Sequence
  SARS-CoV-2__MT873210.1__non-structural protein 3 (NSP3) CDS gc
auggcccccaccaaggugaccuucggcgacgacacggucaucgaggugcagggguacaagagcgugaacaucaccuucgagcuggacgagcgcaucgacaagguccucaacgagaagugcuccgccuacaccguggagcugggcaccgaggugaacgaguucgcgugcgucguggccgacgccgugaucaagacgcugcagccggucagcgagcuccugaccccccuggggaucgaccucgacgagugguccauggccaccuacuaccuguucgacgagagcggcgaguucaagcuggccucccacauguacugcagcuucuacccccccgacgaggacgaggaggagggggacugcgaggaggaggaguucgagccguccacccaguacgaguacggcacggaggacgacuaccagggcaagccccucgaguucggggcgaccagcgccgcccugcagcccgaggaggagcaggaggaggacuggcuggacgacgacucccagcagaccgugggccagcaggacgggagcgaggacaaccagaccacgaccauccagaccaucguggagguccagccccagcucgagauggagcugaccccgguggugcagacgaucgaggucaacuccuucagcggcuaccugaagcucaccgacaacguguacaucaagaacgccgacaucguggaggaggcgaagaaggucaagcccaccgugguggucaacgccgccaacguguaccugaagcacgggggcggcguggccggggcccugaacaaggcgaccaacaacgccaugcaggucgaguccgacgacuacaucgccacgaacggcccccucaagguggggggcagcugcguccuguccggccacaaccuggccaagcacugccuccacgugguggggcccaacgucaacaagggcgaggacauccagcugcugaagagcgccuacgagaacuucaaccagcacgaggugcuccuggcgccgcugcucuccgccgggaucuucggcgccgaccccauccacagccugcgggugugcgucgacaccgugcgcaccaacguguaccuggccgucuucgacaagaaccucuacgacaagcugguguccagcuuccuggagaugaagagcgagaagcagguggagcagaagaucgccgagauccccaaggacgaggucaagcccuucaucaccgaguccaagccgagcguggagcagcggaagcaggacgacaagaagaucaaggcgugcguggaggaggucacgaccacccucgaggagaccaaguuccugacggagaaccugcuccuguacaucgacaucaacgggaaccugcaccccgacuccgccacccucgugagcgacaucgacaucaccuuccugaagaaggacgcccccuacaucgugggcgacgucgugcaggagggcgugcugaccgccgucgugauccccacgaagaaggccgggggcaccaccgagaugcucgcgaaggcccugcgcaaggugccgaccgacaacuacaucacgaccuaccccgggcagggccugaacggguacaccgucgaggaggccaagaccgugcucaagaagugcaaguccgccuucuacauccugcccagcaucaucuccaacgagaagcaggagauccugggcaccgugagcuggaaccuccgggagaugcuggcgcacgccgaggagacgcgcaagcugaugcccgucugcguggagaccaaggccaucguguccaccauccagcggaaguacaagggcaucaagauccaggagggggucguggacuacggcgcccgcuucuacuucuacaccagcaagacgaccguggccucccugaucaacacccucaacgaccugaacgagacccuggucacgaugccgcucggguacgugacccacggccugaaccuggaggaggcggcccgguacaugcgcagccucaaggugcccgccaccgucuccgugagcucccccgacgccgugaccgccuacaacggguaccugacgagcuccagcaagacccccgaggagcacuucaucgagaccaucucccuggcgggcagcuacaaggacuggagcuacuccggccagagcacccagcucgggaucgaguuccugaagcggggcgacaaguccgucuacuacacgagcaacccgaccaccuuccaccuggacggggaggugaucaccuucgacaaccucaagacgcugcugucccuccgcgaggugcggaccaucaaggucuucaccaccguggacaacaucaaccugcacacgcagguggucgacaugagcaugaccuacggccagcaguucggccccaccuaccuggacggggccgacgugaccaagaucaagccccacaacucccacgagggcaagacguucuacgugcucccgaacgacgacacccugcgcgucgaggccuucgaguacuaccacaccaccgaccccagcuuccuggggcgguacauguccgcccucaaccacacgaagaaguggaaguacccccaggugaacggccugaccagcaucaagugggccgacaacaacugcuaccuggcgaccgcccuccugacccugcagcagaucgagcucaaguucaaccccccggcccugcaggacgccuacuaccgcgcgcgggccggggaggccgccaacuucugcgcccugauccucgcguacugcaacaagacggugggcgagcugggcgacguccgcgagaccauguccuaccuguuccagcacgccaaccucgacagcugcaagcgggugcugaacgucgugugcaagaccugcgggcagcagcagaccacccugaagggcguggaggccgucauguacauggggacgcucuccuacgagcaguucaagaagggcgugcagauccccugcaccugcgggaagcaggccaccaaguaccuggugcagcaggagagccccuucgucaugauguccgcccccccggcgcaguacgagcugaagcacggcaccuucacgugcgccagcgaguacaccggcaacuaccagugcgggcacuacaagcacaucaccuccaaggagacccucuacugcaucgacggcgcccugcugacgaagagcagcgaguacaaggggcccaucaccgacguguucuacaaggagaacuccuacaccaccacgaucaagcccgugaccuacaagcucgacggcgucgugugcaccgagaucgaccccaagcuggacaacuacuacaagaaggacaacagcuacuucaccgagcagccgaucgaccuggugcccaaccagcccuaccccaacgccuccuucgacaacuucaaguucgucugcgacaacaucaaguucgccgacgaccucaaccagcugacgggguacaagaagccggcgagccgcgagcugaaggugaccuucuuccccgaccucaacggcgacguggucgccaucgacuacaagcacuacacccccuccuucaagaagggcgccaagcugcugcacaagcccaucguguggcacgugaacaacgccaccaacaaggcgacguacaagccgaacaccuggugcauccggugccucuggagcaccaagcccgucgagaccuccaacagcuucgacgugcugaaguccgaggacgcccaggggauggacaaccuggccugcgaggaccucaagcccgugagcgaggaggucguggagaaccccacgauccagaaggacgugcuggagugcaacgucaagaccaccgagguggugggcgacaucauccugaagccggccaacaacucccucaagaucaccgaggaggucgggcacacggaccugauggccgcguacguggacaacagcucccugaccaucaagaagcccaacgagcucagccgcgugcugggccugaagacccucgccacccacgggcuggccgccgucaacuccgugcccugggacacgaucgccaacuacgcgaagccguuccugaacaagguggucagcaccaccaccaacaucgugacgcgcugccucaaccgggugugcaccaacuacaugcccuacuucuucacccugcugcuccagcugugcaccuucacccgcuccacgaacagccggaucaaggccuccaugcccaccaccaucgccaagaacaccgucaagagcgugggcaaguucugccuggaggccagcuucaacuaccucaagucccccaacuucagcaagcugaucaacaucaucaucugguuccugcuccuguccgugugccugggcagccucaucuacuccacggccgcgcuggggguccugaugagcaaccucggcaugccguccuacugcaccggguaccgcgagggcuaccugaacagcaccaacgugaccaucgccacguacugcaccggcuccauccccugcagcgugugccuguccgggcucgacagccuggacaccuaccccucccuggagaccauccagaucacgaucagcuccuucaagugggaccucaccgccuucggccuggucgccgagugguuccuggccuacauccucuucacccgguucuucuacgugcuggggcuggcggccaucaugcagcucuucuucagcuacuucgccgugcacuucaucuccaacagcuggcugauguggcugaucaucaaccugguccagauggcccccaucuccgcgauggugcgcauguacaucuucuucgccagcuucuacuacguguggaagagcuacguccacgugguggacggcugcaacuccagcaccugcaugaugugcuacaagcggaaccgcgccacgcgggucgagugcaccaccaucgugaacgggguccgccgguccuucuacguguacgccaacggcggcaagggguucugcaagcuccacaacuggaacugcgugaacugcgacaccuucugcgccggcagcacguucaucuccgacgaggucgcgcgcgaccugagccugcaguucaagcggccgaucaaccccaccgaccaguccagcuacaucguggacuccgugaccgucaagaacgggagcauccaccucuacuucgacaaggccggccagaagaccuacgagcgccacucccugagccacuucgugaaccuggacaaccuccgggccaacaacacgaaggggucccugcccaucaacgugaucgucuucgacggcaagagcaagugcgaggaguccagcgccaaguccgccagcguguacuacucccagcugaugugccagcccauccuccugcuggaccaggcgcucgugagcgacgucggcgacagcgccgagguggccgugaagauguucgacgccuacgucaacaccuucuccagcaccuucaacgugccgauggagaagcugaagacccugguggccacggcggaggccgagcucgccaagaacgucucccuggacaacgugcugagcaccuucaucuccgccgcgcgccagggguucguggacagcgacgucgagaccaaggacgugguggagugccucaagcugucccaccagagcgacaucgaggucaccggcgacuccugcaacaacuacaugcugacguacaacaagguggagaacaugaccccccgggaccucggggccugcaucgacugcagcgcccgccacaucaacgcccagguggccaagucccacaacaucgcgcugaucuggaacgucaaggacuucaugagccuguccgagcagcuccggaagcagauccgcagcgccgccaagaagaacaaccugcccuucaagcugaccugcgccaccacgcgccagguggugaacgucgugaccaccaagaucgcccucaagggcggguga

SEQ ID NO: 17702 - RNA, 5841 nt, Artificial Sequence
  SARS-CoV-2__MT873211.1__non-structural protein 3 (NSP3) CDS gc
auggcccccaccaaggugaccuucggcgacgacacggucaucgaggugcagggguacaagagcgugaacaucaccuucgagcuggacgagcgcaucgacaagguccucaacgagaagugcuccgccuacaccguggagcugggcaccgaggugaacgaguucgcgugcgucguggccgacgccgugaucaagacgcugcagccggucagcgagcuccugaccccccuggggaucgaccucgacgagugguccauggccaccuacuaccuguucgacgagagcggcgaguucaagcuggccucccacauguacugcagcuucuacccccccgacgaggacgaggaggagggggacugcgaggaggaggaguucgagccguccacccaguacgaguacggcacggaggacgacuaccagggcaagccccucgaguucggggcgaccagcgccgcccugcagcccgaggaggagcaggaggaggacuggcuggacgacgacucccagcagaccgugggccagcaggacgggagcgaggacaaccagaccaucacgauccagaccaucguggagguccagccccagcucgagauggagcugaccccgguggugcagaccaucgaggucaacuccuucagcggcuaccugaagcucacggacaacguguacaucaagaacgccgacaucguggaggaggcgaagaaggucaagcccaccgugguggucaacgccgccaacguguaccugaagcacgggggcggcguggccggggcccugaacaaggcgaccaacaacgccaugcaggucgaguccgacgacuacaucgccaccaacggcccccucaagguggggggcagcugcguccuguccggccacaaccuggccaagcacugccuccacgugguggggcccaacgucaacaagggcgaggacauccagcugcugaagagcgccuacgagaacuucaaccagcacgaggugcuccuggcgccgcugcucuccgccgggaucuucggcgccgaccccauccacagccugcgggugugcgucgacacggugcgcaccaacguguaccuggccgucuucgacaagaaccucuacgacaagcugguguccagcuuccuggagaugaagagcgagaagcagguggagcagaagaucgccgagauccccaaggaggaggucaagcccuucaucaccgaguccaagccgagcguggagcagcggaagcaggacgacaagaagaucaaggcgugcguggaggaggucaccacgacccucgaggagaccaaguuccugaccgagaaccugcuccuguacaucgacaucaacgggaaccugcaccccgacuccgccacgcucgugagcgacaucgacaucaccuuccugaagaaggacgcccccuacaucgugggcgacgucgugcaggagggcgugcugaccgccgucgugauccccaccaagaaggccgggggcacgaccgagaugcucgcgaaggcccugcgcaaggugccgaccgacaacuacaucaccacguaccccgggcagggccugaacggguacaccgucgaggaggccaagaccgugcucaagaagugcaaguccgccuucuacauccugcccagcaucaucuccaacgagaagcaggagauccugggcaccgugagcuggaaccuccgggagaugcuggcgcacgccgaggagacccgcaagcugaugcccgucugcguggagacgaaggccaucguguccaccauccagcggaaguacaagggcaucaagauccaggagggggucguggacuacggcgcccgcuucuacuucuacaccagcaagaccacgguggccucccugaucaacacccucaacgaccugaacgagacccuggucaccaugccgcucggguacgugacgcacggccugaaccuggaggaggcggcccgguacaugcgcagccucaaggugcccgccaccgucuccgugagcucccccgacgccgugaccgccuacaacggguaccugaccagcuccagcaagacgcccgaggagcacuucaucgagaccaucucccuggcgggcagcuacaaggacuggagcuacuccggccagagcacccagcucgggaucgaguuccugaagcggggcgacaaguccgucuacuacaccagcaacccgacgaccuuccaccuggacggggaggugaucaccuucgacaaccucaagacccugcugucccuccgcgaggugcggacgaucaaggucuucaccaccguggacaacaucaaccugcacacccagguggucgacaugagcaugacguacggccagcaguucggccccaccuaccuggacggggccgacgugaccaagaucaagccccacaacucccacgagggcaagaccuucuacgugcucccgaacgacgacacgcugcgcgucgaggccuucgaguacuaccacaccaccgaccccagcuuccuggggcgguacauguccgcccucaaccacaccaagaaguggaaguacccccaggugaacggccugacgagcaucaagugggccgacaacaacugcuaccuggcgaccgcccuccugacccugcagcagaucgagcucaaguucaaccccccggcccugcaggacgccuacuaccgcgcgcgggccggggaggccgccaacuucugcgcccugauccucgcguacugcaacaagaccgugggcgagcugggcgacguccgcgagacgauguccuaccuguuccagcacgccaaccucgacagcugcaagcgggugcugaacgucgugugcaagaccugcgggcagcagcagaccacccugaagggcguggaggccgucauguacauggggacccucuccuacgagcaguucaagaagggcgugcagauccccugcacgugcgggaagcaggccaccaaguaccuggugcagcaggagagccccuucgucaugauguccgcccccccggcgcaguacgagcugaagcacggcaccuucaccugcgccagcgaguacacgggcaacuaccagugcgggcacuacaagcacaucaccuccaaggagacccucuacugcaucgacggcgcccugcugaccaagagcagcgaguacaaggggcccaucacggacguguucuacaaggagaacuccuacaccaccaccaucaagcccgugacguacaagcucgacggcgucgugugcaccgagaucgaccccaagcuggacaacuacuacaagaaggacaacagcuacuucaccgagcagccgaucgaccuggugcccaaccagcccuaccccaacgccuccuucgacaacuucaaguucgucugcgacaacaucaaguucgccgacgaccucaaccagcugaccggguacaagaagccggcgagccgcgagcugaaggugacguucuuccccgaccucaacggcgacguggucgccaucgacuacaagcacuacacccccuccuucaagaagggcgccaagcugcugcacaagcccaucguguggcacgugaacaacgccaccaacaaggcgaccuacaagccgaacacguggugcauccggugccucuggagcaccaagcccgucgagaccuccaacagcuucgacgugcugaaguccgaggacgcccaggggauggacaaccuggccugcgaggaccucaagcccgugagcgaggaggucguggagaaccccaccauccagaaggacgugcuggagugcaacgucaagacgaccgagguggugggcgacaucauccugaagccggccaacaacucccucaagaucaccgaggaggucgggcacaccgaccugauggccgcguacguggacaacagcucccugacgaucaagaagcccaacgagcucagccgcgugcugggccugaagacccucgccacccacgggcuggccgccgucaacuccgugcccugggacaccaucgccaacuacgcgaagccguuccugaacaagguggucagcacgaccaccaacaucgugacccgcugccucaaccgggugugcacgaacuacaugcccuacuucuucacccugcugcuccagcugugcaccuucacccgcuccaccaacagccggaucaaggccuccaugcccacgaccaucgccaagaacaccgucaagagcgugggcaaguucugccuggaggccagcuucaacuaccucaagucccccaacuucagcaagcugaucaacaucaucaucugguuccugcuccuguccgugugccugggcagccucaucuacuccaccgccgcgcuggggguccugaugagcaaccucggcaugccguccuacugcacgggguaccgcgagggcuaccugaacagcaccaacgugaccaucgccaccuacugcacgggcuccauccccugcagcgugugccuguccgggcucgacagccuggacaccuaccccucccuggagaccauccagaucaccaucagcuccuucaagugggaccucacggccuucggccuggucgccgagugguuccuggccuacauccucuucacccgguucuucuacgugcuggggcuggcggccaucaugcagcucuucuucagcuacuucgccgugcacuucaucuccaacagcuggcugauguggcugaucaucaaccugguccagauggcccccaucuccgcgauggugcgcauguacaucuucuucgccagcuucuacuacguguggaagagcuacguccacgugguggacggcugcaacuccagcaccugcaugaugugcuacaagcggaaccgcgccacccgggucgagugcacgaccaucgugaacgggguccgccgguccuucuacguguacgccaacggcggcaagggguucugcaagcuccacaacuggaacugcgugaacugcgacaccuucugcgccggcagcaccuucaucuccgacgaggucgcgcgcgaccugagccugcaguucaagcggccgaucaaccccacggaccaguccagcuacaucguggacuccgugaccgucaagaacgggagcauccaccucuacuucgacaaggccggccagaagaccuacgagcgccacucccugagccacuucgugaaccuggacaaccuccgggccaacaacaccaaggggucccugcccaucaacgugaucgucuucgacggcaagagcaagugcgaggaguccagcgccaaguccgccagcguguacuacucccagcugaugugccagcccauccuccugcuggaccaggcgcucgugagcgacgucggcgacagcgccgagguggccgugaagauguucgacgccuacgucaacacguucuccagcaccuucaacgugccgauggagaagcugaagacccugguggccaccgcggaggccgagcucgccaagaacgucucccuggacaacgugcugagcacguucaucuccgccgcgcgccagggguucguggacagcgacgucgagaccaaggacgugguggagugccucaagcugucccaccagagcgacaucgaggucaccggcgacuccugcaacaacuacaugcugaccuacaacaagguggagaacaugacgccccgggaccucggggccugcaucgacugcagcgcccgccacaucaacgcccagguggccaagucccacaacaucgcgcugaucuggaacgucaaggacuucaugagccuguccgagcagcuccggaagcagauccgcagcgccgccaagaagaacaaccugcccuucaagcugaccugcgccaccacccgccagguggugaacgucgugacgaccaagaucgcccucaagggcggguga

SEQ ID NO: 17703 - RNA, 5841 nt, Artificial Sequence
  SARS-CoV-2__MT873238.1__non-structural protein 3 (NSP3) CDS gc
auggcccccaccaaggugaccuucggcgacgacacggucaucgaggugcagggguacaagagcgugaacaucaccuucgagcuggacgagcgcaucgacaagguccucaacgagaagugcuccgccuacaccguggagcugggcaccgaggugaacgaguucgcgugcgucguggccgacgccgugaucaagacgcugcagccggucagcgagcuccugaccccccuggggaucgaccucgacgagugguccauggccaccuacuaccuguucgacgagagcggcgaguucaagcuggccucccacauguacugcagcuucuacccccccgacgaggacgaggaggagggggacugcgaggaggaggaguucgagccguccacccaguacgaguacggcacggaggacgacuaccagggcaagccccucgaguucggggcgaccagcgccgcccugcagcccgaggaggagcaggaggaggacuggcuggacgacgacucccagcagaccgugggccagcaggacgggagcgaggacaaccagaccacgaccauccagaccaucguggagguccagccccagcucgagauggagcugaccccgguggugcagacgaucgaggucaacuccuucagcggcuaccugaagcucaccgacaacguguacaucaagaacguggacaucgucgaggaggccaagaaggugaagcccaccguggucgugaacgcggccaacguguaccugaagcacgggggcggcgucgccggggcccugaacaaggccaccaacaacgcgaugcagguggaguccgacgacuacaucgccacgaacggcccccucaaggucgggggcagcugcgugcuguccggccacaaccuggccaagcacugccuccacguggucgggcccaacgugaacaagggcgaggacauccagcugcugaagagcgccuacgagaacuucaaccagcacgaggugcuccuggccccgcugcucuccgcggggaucuucggcgccgaccccauccacagccugcgggucugcguggacaccgugcgcaccaacgucuaccuggccguguucgacaagaaccucuacgacaagcugguguccagcuuccuggagaugaagagcgagaagcaggucgagcagaagaucgccgagauccccaaggaggaggugaagcccuucaucaccgaguccaagccgagcguggagcagcggaagcaggacgacaagaagaucaaggccugcgucgaggaggugacgaccacccucgaggagaccaaguuccugacggagaaccugcuccuguacaucgacaucaacgggaaccugcaccccgacuccgcgacccucgugagcgacaucgacaucaccuuccugaagaaggacgcccccuacaucgucggcgacguggugcaggagggcguccugaccgccguggugauccccacgaagaaggccgggggcaccaccgagaugcucgccaaggcgcugcgcaaggucccgaccgacaacuacaucacgaccuaccccgggcagggccugaacggguacaccguggaggaggccaagaccgugcucaagaagugcaaguccgccuucuacauccugcccagcaucaucuccaacgagaagcaggagauccugggcaccgucagcuggaaccuccgggagaugcuggcccacgcggaggagacgcgcaagcugaugcccgugugcguggagaccaaggccaucgucuccaccauccagcggaaguacaagggcaucaagauccaggagggggugguggacuacggcgcccgcuucuacuucuacaccagcaagacgaccgucgccucccugaucaacacccucaacgaccugaacgagacccuggugacgaugccgcucggguacgugacccacggccugaaccuggaggaggccgcgcgguacaugcgcagccucaagguccccgccaccguguccgugagcucccccgacgccgucaccgccuacaacggguaccugacgagcuccagcaagacccccgaggagcacuucaucgagaccaucucccuggccggcagcuacaaggacuggagcuacuccggccagagcacccagcucgggaucgaguuccugaagcggggcgacaaguccguguacuacacgagcaacccgaccaccuuccaccuggacggggaggugaucaccuucgacaaccucaagacgcugcugucccuccgcgagguccggaccaucaagguguucaccaccguggacaacaucaaccugcacacgcaggucguggacaugagcaugaccuacggccagcaguucggccccaccuaccuggacggggcggacgugaccaagaucaagccccacaacucccacgagggcaagacguucuacguccucccgaacgacgacacccugcgcguggaggccuucgaguacuaccacaccaccgaccccagcuuccuggggcgguacauguccgcccucaaccacacgaagaaguggaaguacccccaggugaacggccugaccagcaucaagugggccgacaacaacugcuaccuggccaccgcgcuccugacccugcagcagaucgagcucaaguucaaccccccggcccugcaggacgccuacuaccgcgcccgggcgggggaggccgccaacuucugcgcccugauccucgccuacugcaacaagacggucggcgagcugggcgacgugcgcgagaccauguccuaccuguuccagcacgcgaaccucgacagcugcaagcggguccugaacguggugugcaagaccugcgggcagcagcagaccacccugaagggcgucgaggccgugauguacauggggacgcucuccuacgagcaguucaagaagggcgugcagauccccugcaccugcgggaagcaggccaccaaguaccugguccagcaggagagccccuucgugaugauguccgcccccccggcccaguacgagcugaagcacggcaccuucacgugcgcgagcgaguacaccggcaacuaccagugcgggcacuacaagcacaucaccuccaaggagacccucuacugcaucgacggcgcccugcugacgaagagcagcgaguacaaggggcccaucaccgacguguucuacaaggagaacuccuacaccaccacgaucaagcccgucaccuacaagcucgacggcguggugugcaccgagaucgaccccaagcuggacaacuacuacaagaaggacaacagcuacuucaccgagcagccgaucgaccugguccccaaccagcccuaccccaacgccuccuucgacaacuucaaguucgugugcgacaacaucaaguucgccgacgaccucaaccagcugacgggguacaagaagccggccagccgcgagcugaaggugaccuucuuccccgaccucaacggcgacgucguggcgaucgacuacaagcacuacacccccuccuucaagaagggcgccaagcugcugcacaagcccaucguguggcacgucaacaacgccaccaacaaggccacguacaagccgaacaccuggugcauccggugccucuggagcaccaagcccguggagaccuccaacagcuucgacgugcugaaguccgaggacgcgcaggggauggacaaccuggccugcgaggaccucaagcccgucagcgaggaggugguggagaaccccacgauccagaaggacguccuggagugcaacgugaagaccaccgagguggucggcgacaucauccugaagccggccaacaacucccucaagaucaccgaggagguggggcacacggaccugauggccgccuacguggacaacagcucccugaccaucaagaagcccaacgagcucagccgcguccugggccugaagacccucgcgacccacgggcuggccgccgugaacuccgugcccugggacacgaucgccaacuacgccaagccguuccugaacaaggucgugagcaccaccaccaacaucgugacgcgcugccucaaccgggucugcaccaacuacaugcccuacuucuucacccugcugcuccagcugugcaccuucacccgcuccacgaacagccggaucaaggcguccaugcccaccaccaucgccaagaacaccgugaagagcgugggcaaguucugccuggaggccagcuucaacuaccucaagucccccaacuucagcaagcugaucaacaucaucaucugguuccugcuccuguccgucugccugggcagccucaucuacuccacggccgcccugggggugcugaugagcaaccucggcaugccguccuacugcaccggguaccgcgagggcuaccugaacagcaccaacgugaccaucgcgacguacugcaccggcuccauccccugcagcgucugccuguccgggcucgacagccuggacaccuaccccucccuggagaccauccagaucacgaucagcuccuucaagugggaccucaccgccuucggccugguggccgagugguuccuggccuacauccucuucacccgguucuucuacgugcuggggcuggccgcgaucaugcagcucuucuucagcuacuucgccguccacuucaucuccaacagcuggcugauguggcugaucaucaaccuggugcagauggcccccaucuccgccauggugcgcauguacaucuucuucgcgagcuucuacuacgucuggaagagcuacgugcacguggucgacggcugcaacuccagcaccugcaugaugugcuacaagcggaaccgcgccacgcggguggagugcaccaccaucgucaacggggugcgccgguccuucuacguguacgccaacggcggcaagggguucugcaagcuccacaacuggaacugcgucaacugcgacaccuucugcgccggcagcacguucaucuccgacgagguggcccgcgaccugagccugcaguucaagcggccgaucaaccccaccgaccaguccagcuacaucguggacuccgucaccgugaagaacgggagcauccaccucuacuucgacaaggcgggccagaagaccuacgagcgccacucccugagccacuucgugaaccuggacaaccuccgggccaacaacacgaaggggucccugcccaucaacgucaucguguucgacggcaagagcaagugcgaggaguccagcgccaaguccgccagcguguacuacucccagcugaugugccagcccauccuccugcuggaccaggcccucgucagcgacgugggcgacagcgcggagguggccgucaagauguucgacgccuacgugaacaccuucuccagcaccuucaacgugccgauggagaagcugaagacccuggucgccacggccgaggcggagcucgccaagaacgugucccuggacaacgugcugagcaccuucaucuccgccgcccgccagggguucgucgacagcgacguggagaccaaggacguggucgagugccucaagcugucccaccagagcgacaucgaggugaccggcgacuccugcaacaacuacaugcugacguacaacaagguggagaacaugaccccccgggaccucggggcgugcaucgacugcagcgcccgccacaucaacgcccaggucgccaagucccacaacaucgcccugaucuggaacgugaaggacuucaugagccuguccgagcagcuccggaagcagauccgcagcgcggccaagaagaacaaccugcccuucaagcugaccugcgccaccacgcgccagguggucaacguggugaccaccaagaucgcccucaagggcggguga

SEQ ID NO: 17704 - RNA, 5841 nt, Artificial Sequence
  SARS-CoV-2__MT873239.1__non-structural protein 3 (NSP3) CDS gc
auggcccccaccaaggugaccuucggcgacgacacggucaucgaggugcagggguacaagagcgugaacaucaccuucgagcuggacgagcgcaucgacaagguccucaacgagaagugcuccgccuacaccguggagcugggcaccgaggugaacgaguucgcgugcgucguggccgacgccgugaucaagacgcugcagccggucagcgagcuccugaccccccuggggaucgaccucgacgagugguccauggccaccuacuaccuguucgacgagagcggcgaguucaagcuggccucccacauguacugcagcuucuacccccccgacgaggacgaggaggagggggacugcgaggaggaggaguucgagccguccacccaguacgaguacggcacggaggacgacuaccagggcaagccccucgaguucggggcgaccagcgccgcccugcagcccgaggaggagcaggaggaggacuggcuggacgacgacucccagcagaccgugggccagcaggacgggagcgaggacaaccagaccacgaccauccagaccaucguggagguccagccccagcucgagauggagcugaccccgguggugcagacgaucgaggucaacuccuucagcggcuaccugaagcucaccgacaacguguacaucaagaacgccgacaucguggaggaggcgaagaaggucaagcccaccgugguggucaacgccgccaacguguaccugaagcacgggggcggcguggccggggcccugaacaaggcgaccaacaacgccaugcaggucgaguccgacgacuacaucgccacgaacggcccccucaagguggggggcagcugcguccuguccggccacaaccuggccaagcacugccuccacgugguggggcccaacgucaacaagggcgaggacauccagcugcugaagagcgccuacgagaacuucaaccagcacgaggugcuccuggcgccgcugcucuccgccgggaucuucggcgccgaccccauccacagccugcgggugugcgucgacaccgugcgcaccaacguguaccuggccgucuucgacaagaaccucuacgacaagcugguguccagcuuccuggagaugaagagcgagaagcagguggagcagaagaucgccgagauccccaaggaggaggucaagcccuucaucaccgaguccaagccgagcguggagcagcggaagcaggacgacaagaagaucaaggcgugcguggaggaggucacgaccacccucgaggagaccaaguuccugacggagaaccugcuccuguacaucgacaucaacgggaaccugcaccccgacuccgccacccucgugagcgacaucgacaucaccuuccugaagaaggacgcccccuacaucgugggcgacgucgugcaggagggcgugcugaccgccgucgugauccccacgaagaaggccgggggcaccaccgagaugcucgcgaaggcccugcgcaaggugccgaccgacaacuacaucacgaccuaccccgggcagggccugaacggguacaccgucgaggaggccaagaccgugcucaagaagugcaaguccgccuucuacauccugcccagcaucaucuccaacgagaagcaggagauccugggcaccgugagcuggaaccuccgggagaugcuggcgcacgccgaggagacgcgcaagcugaugcccgucugcguggagaccaaggccaucguguccaccauccagcggaaguacaagggcaucaagauccaggagggggucguggacuacggcgcccgcuucuacuucuacaccagcaagacgaccguggccucccugaucaacacccucaacgaccugaacgagacccuggucacgaugccgcucggguacgugacccacggccugaaccuggaggaggcggcccgguacaugcgcagccucaaggugcccgccaccgucuccgugagcucccccgacgccgugaccgccuacaacggguaccugacgagcuccagcaagacccccgaggagcacuucaucgagaccaucucccuggcgggcagcuacaaggacuggagcuacuccggccagagcacccagcucgggaucgaguuccugaagcggggcgacaaguccgucuacuacacgagcaacccgaccaccuuccaccuggacggggaggugaucaccuucgacaaccucaagacgcugcugucccuccgcgaggugcggaccaucaaggucuucaccaccguggacaacaucaaccugcacacgcagguggucgacaugagcaugaccuacggccagcaguucggccccaccuaccuggacggggccgacgugaccaagaucaagccccacaacucccacgagggcaagacguucuacgugcucccgaacgacgacacccugcgcgucgaggccuucgaguacuaccacaccaccgaccccagcuuccuggggcgguacauguccgcccucaaccacacgaagaaguggaaguacccccaggugaacggccugaccagcaucaagugggccgacaacaacugcuaccuggcgaccgcccuccugacccugcagcagaucgagcucaaguucaaccccccggcccugcaggacgccuacuaccgcgcgcgggccggggaggccgccaacuucugcgcccugauccucgcguacugcaacaagacggugggcgagcugggcgacguccgcgagaccauguccuaccuguuccagcacgccaaccucgacagcugcaagcgggugcugaacgucgugugcaagaccugcgggcagcagcagaccacccugaagggcguggaggccgucauguacauggggacgcucuccuacgagcaguucaagaagggcgugcagauccccugcaccugcgggaagcaggccaccaaguaccuggugcagcaggagagccccuucgucaugauguccgcccccccggcgcaguacgagcugaagcacggcaccuucacgugcgccagcgaguacaccggcaacuaccagugcgggcacuacaagcacaucaccuccaaggagacccucuacugcaucgacggcgcccugcugacgaagagcagcgaguacaaggggcccaucaccgacguguucuacaaggagaacuccuacaccaccacgaucaagcccgugaccuacaagcucgacggcgucgugugcaccgagaucgaccccaagcuggacaacuacuacaagaaggacaacagcuacuucaccgagcagccgaucgaccuggugcccaaccagcccuaccccaacgccuccuucgacaacuucaaguucgucugcgacaacaucaaguucgccgacgaccucaaccagcugacgggguacaagaagccggcgagccgcgagcugaaggugaccuucuuccccgaccucaacggcgacguggucgccaucgacuacaagcacuacacccccuccuucaagaagggcgccaagcugcugcacaagcccaucguguggcacgugaacaacgccaccaacaaggcgacguacaagccgaacaccuggugcauccggugccucuggagcaccaagcccgucgagaccuccaacagcuucgacgugcugaaguccgaggacgcccaggggauggacaaccuggccugcgaggaccucaagcccgugagcgaggaggucguggagaaccccacgauccagaaggacgugcuggagugcaacgucaagaccaccgagguggugggcgacaucauccugaagccggccaacaacucccucaagaucaccgaggaggucgggcacacggaccugauggccgcguacguggacaacagcucccugaccaucaagaagcccaacgagcucagccgcgugcugggccugaagacccucgccacccacgggcuggccgccgucaacuccgugcccugggacacgaucgccaacuacgcgaagccguuccugaacaagguggucagcaccaccaccaacaucgugacgcgcugccucaaccgggugugcaccaacuacaugcccuacuucuucacccugcugcuccagcugugcaccuucacccgcuccacgaacagccggaucaaggccuccaugcccaccaccaucgccaagaacaccgucaagagcgugggcaaguucugccuggaggccagcuucaacuaccucaagucccccaacuucagcaagcugaucaacaucaucaucugguuccugcuccuguccgugugccugggcagccucaucuacuccacggccgcgcuggggguccugaugagcaaccucggcaugccguccuacugcaccggguaccgcgagggcuaccugaacagcaccaacgugaccaucgccacguacugcaccggcuccauccccugcagcgugugccuguccgggcucgacagccuggacaccuaccccucccuggagaccauccagaucacgaucagcuccuucaagugggaccucaccgccuucggccuggucgccgagugguuccuggccuacauccucuucacccgguucuucuacgugcuggggcuggcggccaucaugcagcucuucuucagcuacuucgccgugcacuucaucuccaacagcuggcugauguggcugaucaucaaccugguccagauggcccccaucuccgcgauggugcgcauguacaucuucuucgccagcuucuacuacguguggaagagcuacguccacgugguggacggcugcaacuccagcaccugcaugaugugcuacaagcggaaccgcgccacgcgggucgagugcaccaccaucgugaacgggguccgccgguccuucuacguguacgccaacggcggcaagggguucugcaagcuccacaacuggaacugcgugaacugcgacaccuucugcgccggcagcacguucaucuccgacgaggucgcgcgcgaccugagccugcaguucaagcggccgaucaaccccaccgaccaguccagcuacaucguggacuccgugaccgucaagaacgggagcauccaccucuacuucgacaaggccggccagaagaccuacgagcgccacucccugagccacuucgugaaccuggacaaccuccgggccaacaacacgaaggggucccugcccaucaacgugaucgucuucgacggcaagagcaagugcgaggaguccagcgccaaguccgccagcguguacuacucccagcugaugugccagcccauccuccugcuggaccaggcgcucgugagcgacgucggcgacagcgccgagguggccgugaagauguucgacgccuacgucaacaccuucuccagcaccuucaacgugccgauggagaagcugaagacccugguggccacggcggaggccgagcucgccaagaacgucucccuggacaacgugcugagcaccuucaucuccgccgcgcgccagggguucguggacagcgacgucgagaccaaggacgugguggagugccucaagcugucccaccagagcgacaucgaggucaccggcgacuccugcaacaacuacaugcugacguacaacaagguggagaacaugaccccccgggaccucggggccugcaucgacugcagcgcccgccacaucaacgcccagguggccaagucccacaacaucguccugaucuggaacgugaaggacuucaugagccuguccgagcagcuccggaagcagauccgcagcgcggccaagaagaacaaccugcccuucaagcugaccugcgccaccacgcgccagguggucaacguggugaccaccaagaucgcccucaagggcggguga

SEQ ID NO: 17705 - RNA, 5841 nt, Artificial Sequence
  SARS-CoV-2__MT873278.1__non-structural protein 3 (NSP3) CDS gc
auggcccccaccaaggugaccuucggcgacgacacggucaucgaggugcagggguacaagagcgugaacaucaccuucgagcuggacgagcgcaucgacaagguccucaacgagaagugcuccgccuacaccguggagcugggcaccgaggugaacgaguucgcgugcgucguggccgacgccgugaucaagacgcugcagccggucagcgagcuccugaccccccuggggaucgaccucgacgagugguccauggccaccuacuaccuguucgacgagagcggcgaguucaagcuggccucccacauguacugcagcuucuacccccccgacgaggacgaggaggagggggacugcgaggaggaggaguucgagccguccacccaguacgaguacggcacggaggacgacuaccagggcaagccccucgaguucggggcgaccagcgccgcccugcagcccgaggaggagcaggaggaggacuggcuggacgacgacucccagcagaccgugggccagcaggacgggagcgaggacaaccagaccacgaccauccagaccaucguggagguccagccccagcucgagauggagcugaccccgguggugcagacgaucgaggucaacuccuucagcggcuaccugaagcucaccgacaacguguacaucaagaacgccgacaucguggaggaggcgaagaaggucaagcccaccgugguggucaacgccgccaacguguaccugaagcacgggggcggcguggccggggcccugaacaaggcgaccaacaacgccaugcaggucgaguccgacgacuacaucgccacgaacggcccccucaagguggggggcagcugcguccuguccggccacaaccuggccaagcacugccuccacgugguggggcccaacgucaacaagggcgaggacauccagcugcugaagagcgccuacgagaacuucaaccagcacgaggugcuccuggcgccgcugcucuccgccgggaucuucggcgccgaccccauccacagccugcgggugugcgucgacaccgugcgcaccaacguguaccuggccgucuucgacaagaaccucuacgacaagcugguguccagcuuccuggagaugaagagcgagaagcagguggagcagaagaucgccgagauccccaaggaggaggucaagcccuucaucaccgaguccaagccgagcguggagcagcggaagcaggacgacaagaagaucaaggcgugcguggaggaggucacgaccacccucgaggagaccaaguuccugacggagaaccugcuccuguacaucgacaucaacgggaaccugcaccccgacuccgccacccucgugagcgacaucgacaucaccuuccugaagaaggacgcccccuacaucgugggcgacgucgugcaggagggcgugcugaccgccgucgugauccccacgaagaaggccgggggcaccaccgagaugcucgcgaaggcccugcgcaaggugccgaccgacaacuacaucacgaccuaccccgggcagggccugaacggguacaccgucgaggaggccaagaccgugcucaagaagugcaaguccgccuucuacauccugcccagcaucaucuccaacgagaagcaggagauccugggcaccgugagcuggaaccuccgggagaugcuggcgcacgccgaggagacgcgcaagcugaugcccgucugcguggagaccaaggccaucguguccaccauccagcggaaguacaagggcaucaagauccaggagggggucguggacuacggcgcccgcuucuacuucuacaccagcaagacgaccguggccucccugaucaacacccucaacgaccugaacgagacccuggucacgaugccgcucggguacgugacccacggccugaaccuggaggaggcggcccgguacaugcgcagccucaaggugcccgccaccgucuccgugagcucccccgacgccgugaccgccuacaacggguaccugacgagcuccagcaagacccccgaggagcacuucaucgagaccaucucccuggcgggcagcuacaaggacuggagcuacuccggccagagcacccagcucgggaucgaguuccugaagcggggcgacaaguccgucuacuacacgagcaacccgaccaccuuccaccuggacggggaggugaucaccuucgacaaccucaagacgcugcugucccuccgcgaggugcggaccaucaaggucuucaccaccguggacaacaucaaccugcacacgcagguggucgacaugagcaugaccuacggccagcaguucggccccaccuaccuggacggggccgacgugaccaagaucaagccccacaacucccacgagggcaagacguucuacgugcucccgaacgacgacacccugcgcgucgaggccuucgaguacuaccacaccaccgaccccagcuuccuggggcgguacauguccgcccucaaccacacgaagaaguggaaguacccccaggugaacggccugaccagcaucaagugggccgacaacaacugcuaccuggcgaccgcccuccugacccugcagcagaucgagcucaaguucaaccccccggcccugcaggacgccuacuaccgcgcgcgggccggggaggccgccaacuucugcgcccugauccucgcguacugcaacaagacggugggcgagcugggcgacguccgcgagaccauguccuaccuguuccagcacgccaaccucgacagcugcaagcgggugcugaacgucgugugcaagaccugcgggcagcagcagaccacccugaagggcguggaggccgucauguacauggggacgcucuccuacgagcaguucaagaagggcgugcagauccccugcaccugcgggaagcaggccaccaaguaccuggugcagcaggagagccccuucgucaugauguccgcccccccggcgcaguacgagcugaagcacggcaccuucacgugcgccagcgaguacaccggcaacuaccagugcgggcacuacaagcacaucaccuccaaggagacccucuacugcaucgacggcgcccugcugacgaagagcagcgaguacaaggggcccaucaccgacguguucuacaaggagaacuccuacaccaccacgaucaagcccgugaccuacaagcucgacggcgucgugugcaccgagaucgaccccaagcuggacaacuacuacaagaaggacaacagcuacuucaccgagcagccgaucgaccuggugcccaaccagcccuaccccaacgccuccuucgacaacuucaaguucgucugcgacaacaucaaguucgccgacgaccucaaccagcugacgggguacaagaagccggcgagccgcgagcugaaggugaccuucuuccccgaccucaacggcgacguggucgccaucgacuacaagcacuacacccccuccuucaagaagggcgccaagcugcugcacaagcccaucguguggcacgugaacaacgccaccaacaaggcgacguacaagccgaacaccuggugcauccggugccucuggagcaccaagcccgucgagaccuccaacagcuucgacgugcugaaguccgaggacgcccaggggauggacaaccuggccugcgaggaccucaagcccgugagcgaggaggucguggagaaccccacgauccagaaggacgugcuggagugcaacgucaagaccaccgagguggugggcgacaucauccugaagccggccaacaacucccucaagaucaccgaggaggucgggcacacggaccugauggccgcguacguggacaacagcucccugaccaucaagaagcccaacgagcucagccgcgugcugggccugaagacccucgccacccacgggcuggccgccgucaacuccgugcccugggacacgaucgccaacuacgcgaagccguuccugaacaagguggucagcaccaccaccaacaucgugacgcgcugccucaaccgggugugcaccaacuacaugcccuacuucuucacccugcugcuccagcugugcaccuucacccgcuccacgaacagccggaucaaggccuccaugcccaccaccaucgccaagaacaccgucaagagcgugggcaaguucugccuggaggccagcuucaacuaccucaagucccccaacuucagcaagcugaucaacaucaucaucugguuccugcuccuguccgugugccugggcagccucaucuacuccacggccgcgcuggggguccugaugagcaaccucggcaugccguccuacugcaccggguaccgcgagggcuaccugaacagcaccaacgugaccaucgccacguacugcaccggcuccauccccugcagcgugugccuguccgggcucgacagccuggacaccuaccccucccuggagaccauccagaucacgaucagcuccuucaagugggaccucaccgccuucggccuggucgccgagugguuccuggccuacauccucuucacccgguucuucuacgugcuggggcuggcggugaucaugcagcucuucuucagcuacuucgccguccacuucaucuccaacagcuggcugauguggcugaucaucaaccuggugcagauggcccccaucuccgccauggugcgcauguacaucuucuucgcgagcuucuacuacgucuggaagagcuacgugcacguggucgacggcugcaacuccagcaccugcaugaugugcuacaagcggaaccgcgccacgcggguggagugcaccaccaucgucaacggggugcgccgguccuucuacguguacgccaacggcggcaagggguucugcaagcuccacaacuggaacugcgucaacugcgacaccuucugcgccggcagcacguucaucuccgacgagguggcccgcgaccugagccugcaguucaagcggccgaucaaccccaccgaccaguccagcuacaucguggacuccgucaccgugaagaacgggagcauccaccucuacuucgacaaggcgggccagaagaccuacgagcgccacucccugagccacuucgugaaccuggacaaccuccgggccaacaacacgaaggggucccugcccaucaacgucaucguguucgacggcaagagcaagugcgaggaguccagcgccaaguccgccagcguguacuacucccagcugaugugccagcccauccuccugcuggaccaggcccucgucagcgacgugggcgacagcgcggagguggccgucaagauguucgacgccuacgugaacaccuucuccagcaccuucaacgugccgauggagaagcugaagacccuggucgccacggccgaggcggagcucgccaagaacgugucccuggacaacgugcugagcaccuucaucuccgccgcccgccagggguucgucgacagcgacguggagaccaaggacguggucgagugccucaagcugucccaccagagcgacaucgaggugaccggcgacuccugcaacaacuacaugcugacguacaacaagguggagaacaugaccccccgggaccucggggcgugcaucgacugcagcgcccgccacaucaacgcccaggucgccaagucccacaacaucgcccugaucuggaacgugaaggacuucaugagccuguccgagcagcuccggaagcagauccgcagcgcggccaagaagaacaaccugcccuucaagcugaccugcgccaccacgcgccagguggucaacguggugaccaccaagaucgcccucaagggcggguga

SEQ ID NO: 17706 - RNA, 5841 nt, Artificial Sequence
  SARS-CoV-2__MT873350.1__non-structural protein 3 (NSP3) CDS gc
auggcccccaccaaggugaccuucggcgacgacacggucaucgaggugcagggguacaagagcgugaacaucaccuucgagcuggacgagcgcaucgacaagguccucaacgagaagugcuccgccuacaccguggagcugggcaccgaggugaacgaguucgcgugcgucguggccgacgccgugaucaagacgcugcagccggucagcgagcuccugaccccccuggggaucgaccucgacgagugguccauggccaccuacuaccuguucgacgagagcggcgaguucaagcuggccucccacauguacugcagcuucuacccccccgacgaggacgaggaggagggggacugcgaggaggaggaguucgagccguccacccaguacgaguacggcaucgaggacgacuaccagggcaagccccucgaguucggggcgacgagcgccgcccugcagcccgaggaggagcaggaggaggacuggcuggacgacgacucccagcagaccgugggccagcaggacgggagcgaggacaaccagaccaccacgauccagaccaucguggagguccagccccagcucgagauggagcugaccccgguggugcagaccaucgaggucaacuccuucagcggcuaccugaagcucacggacaacguguacaucaagaacgccgacaucguggaggaggcgaagaaggucaagcccaccgugguggucaacgccgccaacguguaccugaagcacgggggcggcguggccggggcccugaacaaggcgaccaacaacgccaugcaggucgaguccgacgacuacaucgccaccaacggcccccucaagguggggggcagcugcguccuguccggccacaaccuggccaagcacugccuccacgugguggggcccaacgucaacaagggcgaggacauccagcugcugaagagcgccuacgagaacuucaaccagcacgaggugcuccuggcgccgcugcucuccgccgggaucuucggcgccgaccccauccacagccugcgggugugcgucgacacggugcgcaccaacguguaccuggccgucuucgacaagaaccucuacgacaagcugguguccagcuuccuggagaugaagagcgagaagcagguggagcagaagaucgccgagauccccaaggaggaggucaagcccuucaucaccgaguccaagccgagcguggagcagcggaagcaggacgacaagaagaucaaggcgugcguggaggaggucaccacgacccucgaggagaccaaguuccugaccgagaaccugcuccuguacaucgacaucaacgggaaccugcaccccgacuccgccacgcucgugagcgacaucgacaucaccuuccugaagaaggacgcccccuacaucgugggcgacgucgugcaggagggcgugcugaccgccgucgugauccccaccaagaaggccgggggcacgaccgagaugcucgcgaaggcccugcgcaaggugccgaccgacaacuacaucaccacguaccccgggcagggccugaacggguacaccgucgaggaggccaagaccgugcucaagaagugcaaguccgccuucuacauccugcccagcaucaucuccaacgagaagcaggagauccugggcaccgugagcuggaaccuccgggagaugcuggcgcacgccgaggagacccgcaagcugaugcccgucugcguggagacgaaggccaucguguccaccauccagcggaaguacaagggcaucaagauccaggagggggucguggacuacggcgcccgcuucuacuucuacaccagcaagaccacgguggccucccugaucaacacccucaacgaccugaacgagacccuggucaccaugccgcucggguacgugacgcacggccugaaccuggaggaggcggcccgguacaugcgcagccucaaggugcccgccaccgucuccgugagcucccccgacgccgugaccgccuacaacggguaccugaccagcuccagcaagacgcccgaggagcacuucaucgagaccaucucccuggcgggcagcuacaaggacuggagcuacuccggccagagcacccagcucgggaucgaguuccugaagcggggcgacaaguccgucuacuacaccagcaacccgacgaccuuccaccuggacggggaggugaucaccuucgacaaccucaagacccugcugucccuccgcgaggugcggacgaucaaggucuucaccaccguggacaacaucaaccugcacacccagguggucgacaugagcaugacguacggccagcaguucggccccaccuaccuggacggggccgacgugaccaagaucaagccccacaacucccacgagggcaagaccuucuacgugcucccgaacgacgacacgcugcgcgucgaggccuucgaguacuaccacaccaccgaccccagcuuccuggggcgguacauguccgcccucaaccacaccaagaaguggaaguacccccaggugaacggccugacgagcaucaagugggccgacaacaacugcuaccuggcgaccgcccuccugacccugcagcagaucgagcucaaguucaaccccccggcccugcaggacgccuacuaccgcgcgcgggccggggaggccgccaacuucugcgcccugauccucgcguacugcaacaagaccgugggcgagcugggcgacguccgcgagacgauguccuaccuguuccagcacgccaaccucgacagcugcaagcgggugcugaacgucgugugcaagaccugcgggcagcagcagaccacccugaagggcguggaggccgucauguacauggggacccucuccuacgagcaguucaagaagggcgugcagauccccugcacgugcgggaagcaggccaccaaguaccuggugcagcaggagagccccuucgucaugauguccgcccccccggcgcaguacgagcugaagcacggcaccuucaccugcgccagcgaguacacgggcaacuaccagugcgggcacuacaagcacaucaccuccaaggagacccucuacugcaucgacggcgcccugcugaccaagagcagcgaguacaaggggcccaucacggacguguucuacaaggagaacuccuacaccaccaccaucaagcccgugacguacaagcucgacggcgucgugugcaccgagaucgaccccaagcuggacaacuacuacaagaaggacaacagcuacuucaccgagcagccgaucgaccuggugcccaaccagcccuaccccaacgccuccuucgacaacuucaaguucgucugcgacaacaucaaguucgccgacgaccucaaccagcugaccggguacaagaagccggcgagccgcgagcugaaggugacguucuuccccgaccucaacggcgacguggucgccaucgacuacaagcacuacacccccuccuucaagaagggcgccaagcugcugcacaagcccaucguguggcacgugaacaacgccaccaacaaggcgaccuacaagccgaacacguggugcauccggugccucuggagcaccaagcccgucgagaccuccaacagcuucgacgugcugaaguccgaggacgcccaggggauggacaaccuggccugcgaggaccucaagcccgugagcgaggaggucguggagaaccccaccauccagaaggacgugcuggagugcaacgucaagacgaccgagguggugggcgacaucauccugaagccggccaacaacucccucaagaucaccgaggaggucgggcacaccgaccugauggccgcguacguggacaacagcucccugacgaucaagaagcccaacgagcucagccgcgugcugggccugaagacccucgccacccacgggcuggccgccgucaacuccgugcccugggacaccaucgccaacuacgcgaagccguuccugaacaagguggucagcacgaccaccaacaucgugacccgcugccucaaccgggugugcacgaacuacaugcccuacuucuucacccugcugcuccagcugugcaccuucacccgcuccaccaacagccggaucaaggccuccaugcccacgaccaucgccaagaacaccgucaagagcgugggcaaguucugccuggaggccagcuucaacuaccucaagucccccaacuucagcaagcugaucaacaucaucaucugguuccugcuccuguccgugugccugggcagccucaucuacuccaccgccgcgcuggggguccugaugagcaaccucggcaugccguccuacugcacgggguaccgcgagggcuaccugaacagcaccaacgugaccaucgccaccuacugcacgggcuccauccccugcagcgugugccuguccgggcucgacagccuggacaccuaccccucccuggagaccauccagaucaccaucagcuccuucaagugggaccucacggccuucggccuggucgccgagugguuccuggccuacauccucuucacccgguucuucuacgugcuggggcuggcggccaucaugcagcucuucuucagcuacuucgccgugcacuucaucuccaacagcuggcugauguggcugaucaucaaccugguccagauggcccccaucuccgcgauggugcgcauguacaucuucuucgccagcuucuacuacguguggaagagcuacguccacgugguggacggcugcaacuccagcaccugcaugaugugcuacaagcggaaccgcgccacccgggucgagugcacgaccaucgugaacgggguccgccgguccuucuacguguacgccaacggcggcaagggguucugcaagcuccacaacuggaacugcgugaacugcgacaccuucugcgccggcagcaccuucaucuccgacgaggucgcgcgcgaccugagccugcaguucaagcggccgaucaaccccacggaccaguccagcuacaucguggacuccgugaccgucaagaacgggagcauccaccucuacuucgacaaggccggccagaagaccuacgagcgccacucccugagccacuucgugaaccuggacaaccuccgggccaacaacaccaaggggucccugcccaucaacgugaucgucuucgacggcaagagcaagugcgaggaguccagcgccaaguccgccagcguguacuacucccagcugaugugccagcccauccuccugcuggaccaggcgcucgugagcgacgucggcgacagcgccgagguggccgugaagauguucgacgccuacgucaacacguucuccagcaccuucaacgugccgauggagaagcugaagacccugguggccaccgcggaggccgagcucgccaagaacgucucccuggacaacgugcugagcacguucaucuccgccgcgcgccagggguucguggacagcgacgucgagaccaaggacgugguggagugccucaagcugucccaccagagcgacaucgaggucaccggcgacuccugcaacaacuacaugcugaccuacaacaagguggagaacaugacgccccgggaccucggggccugcaucgacugcagcgcccgccacaucaacgcccagguggccaagucccacaacaucgcgcugaucuggaacgucaaggacuucaugagccuguccgagcagcuccggaagcagauccgcagcgccgccaagaagaacaaccugcccuucaagcugaccugcgccaccacccgccagguggugaacgucgugacgaccaagaucgcccucaagggcggguga

SEQ ID NO: 17707 - RNA, 5841 nt, Artificial Sequence
  SARS-CoV-2__MT873444.1__non-structural protein 3 (NSP3) CDS gc
auggcccccaccaaggugaccuucggcgacgacacggucaucgaggugcagggguacaagagcgugaacaucaccuucgagcuggacgagcgcaucgacaagguccucaacgagaagugcuccgccuacaccguggagcugggcaccgaggugaacgaguucgcgugcgucguggccgacgccgugaucaagacgcugcagccggucagcgagcuccugaccccccuggggaucgaccucgacgagugguccauggccaccuacuaccuguucgacgagagcggcgaguucaagcuggccucccacauguacugcagcuucuacccccccgacgaggacgaggaggagggggacugcgaggaggaggaguucgagccguccacccaguacgaguacggcacggaggacgacuaccagggcaagccccucgaguucggggcgaccagcgccgcccugcagcccgaggaggagcaggaggaggacuggcuggacgacgacucccagcagaccgugggccagcaggacgggagcgaggacaaccagaccacgaccauccagaccaucguggagguccagccccagcucgagauggagcugaccccgguggugcagacgaucgaggucaacuccuucagcggcuaccugaagcucaccgacaacguguacaucaagaacgccgacaucguggaggaggcgaagaaggucaagcccaccgugguggucaacgccgccaacguguaccugaagcacgggggcggcguggccggggcccugaacaaggcgaccaacaacgccaugcaggucgaguccgacgacuacaucgccacgaacggcccccucaagguggggggcagcugcguccuguccggccacaaccuggccaagcacugccuccacgugguggggcccaacgucaacaagggcgaggacauccagcugcugaagagcgccuacgagaacuucaaccagcacgaggugcuccuggcgccgcugcucuccgccgggaucuucggcgccgaccccauccacagccugcgggugugcgucgacaccgugcgcaccaacguguaccuggccgucuucgacaagaaccucuacgacaagcugguguccagcuuccuggagaugaagagcgagaagcagguggagcagaagaucgccgagauccccaaggaggaggucaagcccuucaucaccgaguccaagccgagcguggagcagcggaagcaggacgacaagaagaucaaggcgugcguggaggaggucacgaccacccucgaggagaccaaguuccugacggagaaccugcuccuguacaucgacaucaacgggaaccugcaccccgacuccgccacccucgugagcgacaucgacaucaccuuccugaagaaggacgcccccuacaucgugggcgacgucgugcaggagggcgugcugaccgccgucgugauccccacgaagaaggccgggggcaccaccgagaugcucgcgaaggcccugcgcaaggugccgaccgacaacuacaucacgaccuaccccgggcagggccugaacggguacaccgucgaggaggccaagaccgugcucaagaagugcaaguccgccuucuacauccugcccagcaucaucuccaacgagaagcaggagauccugggcaccgugagcuggaaccuccgggagaugcuggcgcacgccgaggagacgcgcaagcugaugcccgucugcguggagaccaaggccaucguguccaccauccagcggaaguacaagggcaucaagauccaggagggggucguggacuacggcgcccgcuucuacuucuacaccagcaagacgaccguggccucccugaucaacacccucaacgaccugaacgagacccuggucacgaugccgcucggguacgugacccacggccugaaccuggaggaggcggcccgguacaugcgcagccucaaggugcccgccaccgucuccgugagcucccccgacgccgugaccgccuacaacggguaccugacgagcuccagcaagacccccgaggagcacuucaucgagaccaucucccuggcgggcagcuacaaggacuggagcuacuccggccagagcacccagcucgggaucgaguuccugaagcggggcgacaaguccgucuacuacacgagcaacccgaccaccuuccaccuggacggggaggugaucaccuucgacaaccucaagacgcugcugucccuccgcgaggugcggaccaucaaggucuucaccaccguggacaacaucaaccugcacacgcagguggucgacaugagcaugaccuacggccagcaguucggccccaccuaccuggacggggccgacgugaccaagaucaagccccacaacucccacgagggcaagacguucuacgugcucccgaacgacgacacccugcgcgucgaggccuucgaguacuaccacaccaccgaccccagcuuccuggggcgguacauguccgcccucaaccacacgaagaaguggaaguacccccaggugaacggccugaccagcaucaagugggccgacaacaacugcuaccuggcgaccgcccuccugacccugcagcagaucgagcucaaguucaaccccccggcccugcaggacgccuacuaccgcgcgcgggccggggaggccgccaacuucugcgcccugauccucgcguacugcaacaagacggugggcgagcugggcgacguccgcgagaccauguccuaccuguuccagcacgccaaccucgacagcugcaagcgggugcugaacgucgugugcaagaccugcgggcagcagcagaccacccugaagggcguggaggccgucauguacauggggacgcucuccuacgagcaguucaagaagggcgugcagauccccugcaccugcgggaagcaggccaccaaguaccuggugcagcaggagagccccuucgucaugauguccgcccccccggcgcaguacgagcugaagcacggcaccuucacgugcgccagcgaguacaccggcaacuaccagugcgggcacuacaagcacaucaccuccaaggagacccucuacugcaucgacggcgcccugcugacgaagagcagcgaguacaaggggcccaucaccgacguguucuacaaggagaacuccuacaccaccacgaucaagcccgugaccuacaagcucgacggcgucgugugcaccgagaucgaccccaagcuggacaacuacuacaagaaggacaacagcuacuucaccgagcagccgaucgaccuggugcccaaccagcccuaccccaacgccuccuucgacaacuucaaguucgucugcgacaacaucaaguucgccgacgaccucaaccagcugacgggguacaagaagccggcgagccgcgagcugaaggugaccuucuuccccgaccucaacggcgacguggucgccaucgacuacaagcacuacacccccuccuucaagaagggcgccaagcugcugcacaagcccaucguguggcacgugaacaacgccaccaacaaggcgacguacaagccgaacaccuggugcauccggugccucuggagcaccaagcccgucgagaccuccaacagcuucgacgugcugaaguccgaggacgcccaggggauggacaaccuggccugcgaggaccucaagcccgugagcgaggaggucguggagaaccccacgauccagaaggacgugcuggagugcaacgucaagaccaccgagguggugggcgacaucauccugaagccggccaacaacucccucaagaucaccgaggaggucgggcacacggaccugauggccgcguacguggacaacagcucccugaccaucaagaagcccaacgagcucagccgcgugcugggccugaagacccucgccacccacgggcuggccgccgucaacuccgugcccugggacacgaucgccaacuacgcgaagccguuccugaacaagguggucagcaccaccaccaacaucgugacgcgcugccucaaccgggugugcaccaacuacaugcccuacuucuucacccugcugcuccagcugugcaccuucacccgcuccacgaacagccggaucaaggccuccaugcccaccaccaucgccaagaacaccgucaagagcgugggcaaguucugccuggaggccagcuucaacuaccucaagucccccaacuucagcaagcugaucaacaucaucaucugguuccugcuccuguccgugugccugggcagccucaucuacuccacggccgcgcuggggguccugaugagcaaccucggcaugccguccuacugcaccggguaccgcgagggcuaccugaacagcaccaacgugaccaucgccacguacugcaccggcuccauccccugcagcgugugccuguccgggcucgacagccuggacaccuaccccucccuggagaccauccagaucacgaucagcuccuucaagugggaccucaccgccuucggccuggucgccgagugguuccuggccuacauccucuucacccgguucuucuacgugcuggggcuggcggccaucaugcagcucuucuucagcuacuucgccgugcacuucaucuccaacagcuggcugauguggcugaucaucaaccugguccagauggcccccaucuccgcgauggugcgcauguacaucuucuucgccagcuucuacuacguguggaagagcuacguccacgugguggacggcugcaacuccagcaccugcaugaugugcuacaagcggaaccgcgccacgcgggucgagugcaccaccaucgugaacgggguccgccgguccuucuacguguacgccaacggcggcaagggguucugcaagcuccacaacuggaacugcgugaacugcgacaccuucugcgccggcagcacguucaucuccgacgaggucgcgcgcgaccugagccugcaguucaagcggccgaucaaccccaccgaccaguccagcuacaucguggacaucgugaccgucaagaacggguccauccaccucuacuucgacaaggccggccagaagaccuacgagcgccacagccugucccacuucgugaaccuggacaaccuccgggccaacaacacgaaggggagccugcccaucaacgugaucgucuucgacggcaaguccaagugcgaggagagcuccgccaagagcgccuccguguacuacagccagcugaugugccagcccauccuccugcuggaccaggcgcucguguccgacgucggcgacagcgccgagguggccgugaagauguucgacgccuacgucaacaccuucagcuccaccuucaacgugccgauggagaagcugaagacccugguggccacggcggaggccgagcucgccaagaacgucagccuggacaacgugcuguccaccuucaucagcgccgcgcgccagggguucguggacuccgacgucgagaccaaggacgugguggagugccucaagcugagccaccaguccgacaucgaggucaccggcgacagcugcaacaacuacaugcugacguacaacaagguggagaacaugaccccccgggaccucggggccugcaucgacugcuccgcccgccacaucaacgcccagguggccaagagccacaacaucgcgcugaucuggaacgucaaggacuucaugucccugagcgagcagcuccggaagcagauccgcuccgccgccaagaagaacaaccugcccuucaagcugaccugcgccaccacgcgccagguggugaacgucgugaccaccaagaucgcccucaagggcggguga

SEQ ID NO: 17708 - RNA, 5841 nt, Artificial Sequence
  SARS-CoV-2__MT873462.1__non-structural protein 3 (NSP3) CDS gc
auggcccccaccaaggugaccuucggcgacgacacggucaucgaggugcagggguacaagagcgugaacaucaccuucgagcuggacgagcgcaucgacaagguccucaacgagaagugcuccgccuacaccguggagcugggcaccgaggugaacgaguucgcgugcgucguggccgacgccgugaucaagacgcugcagccggucagcgagcuccugaccccccuggggaucgaccucgacgagugguccauggccaccuacuaccuguucgacgagagcggcgaguucaagcuggccucccacauguacugcagcuucuacccccccgacgaggacgaggaggagggggacugcgaggaggaggaguucgagccguccacccaguacgaguacggcacggaggacgacuaccagggcaagccccucgaguucggggcgaccagcgccgcccugcagcccgaggaggagcaggaggaggacuggcuggacgacgacucccagcagaccgugggccagcaggacgggagcgaggacaaccagaccacgaccauccagaccaucguggagguccagccccagcucgagauggagcugaccccgguggugcagacgaucgaggucaacuccuucagcggcuaccugaagcucaccgacaacguguacaucaagaacgccgacaucguggaggaggcgaagaaggucaagcccaccgugguggucaacgccgccaacguguaccugaagcacgggggcggcguggccggggcccugaacaaggcgaccaacaacgccaugcaggucgaguccgacgacuacaucgccacgaacggcccccucaagguggggggcagcugcguccuguccggccacaaccuggccaagcacugccuccacgugguggggcccaacgucaacaagggcgaggacauccagcugcugaagagcgccuacgagaacuucaaccagcacgaggugcuccuggcgccgcugcucuccgccgggaucuucggcgccgaccccauccacagccugcgggugugcgucgacaccgugcgcaccaacguguaccuggccgucuucgacaagaaccucuacgacaagcugguguccagcuuccuggagaugaagagcgagaagcagguggagcagaagaucgccgagauccccaaggaggaggucaagcccuucaucaccgaguccaagccgagcguggagcagcggaagcaggacgacaagaagaucaaggcgugcguggaggaggucacgaccacccucgaggagaccaaguuccugacggagaaccugcuccuguacaucgacaucaacgggaaccugcaccccgacuccgccacccucgugagcgacaucgacaucaccuuccugaagaaggacgcccccuacaucgugggcgacgucgugcaggagggcgugcugaccgccgucgugauccccacgaagaaggccgggggcaccaccgagaugcucgcgaaggcccugcgcaaggugccgaccgacaacuacaucacgaccuaccccgggcagggccugaacggguacaccgucgaggaggccaagaccgugcucaagaagugcaaguccgccuucuacauccugcccagcaucaucuccaacgagaagcaggagauccugggcaccgugagcuggaaccuccgggagaugcuggcgcacgccgaggagacgcgcaagcugaugcccgucugcguggagaccaaggccaucguguccaccauccagcggaaguacaagggcaucaagauccaggagggggucguggacuacggcgcccgcuucuacuucuacaccagcaagacgaccguggccucccugaucaacacccucaacgaccugaacgagacccuggucacgaugccgcucggguacgugacccacggccugaaccuggaggaggcggcccgguacaugcgcagccucaaggugcccgccaccgucuccgugagcucccccgacgccgugaccgccuacaacggguaccugacgagcuccagcaagacccccgaggagcacuucaucgagaccaucucccuggcgggcagcuacaaggacuggagcuacuccggccagagcacccagcucgggaucgaguuccugaagcggggcgacaaguccgucuacuacacgagcaacccgaccaccuuccaccuggacggggaggugaucaccuucgacaaccucaagacgcugcugucccuccgcgaggugcggaccaucaaggucuucaccaccguggacaacaucaaccugcacacgcagguggucgacaugagcaugaccuacggccagcaguucugccccaccuaccuggacggcgccgacgugaccaagaucaagccccacaacucccacgaggggaagacguucuacgugcucccgaacgacgacacccugcgcgucgaggccuucgaguacuaccacaccaccgaccccagcuuccugggccgguacauguccgcccucaaccacacgaagaaguggaaguacccccaggugaacgggcugaccagcaucaagugggccgacaacaacugcuaccuggcgaccgcccuccugacccugcagcagaucgagcucaaguucaaccccccggcccugcaggacgccuacuaccgcgcgcgggccggcgaggccgccaacuucugcgcccugauccucgcguacugcaacaagacggugggggagcugggcgacguccgcgagaccauguccuaccuguuccagcacgccaaccucgacagcugcaagcgggugcugaacgucgugugcaagaccugcggccagcagcagaccacccugaaggggguggaggccgucauguacaugggcacgcucuccuacgagcaguucaagaagggggugcagauccccugcaccugcggcaagcaggccaccaaguaccuggugcagcaggagagccccuucgucaugauguccgcccccccggcgcaguacgagcugaagcacgggaccuucacgugcgccagcgaguacaccggcaacuaccagugcggccacuacaagcacaucaccuccaaggagacccucuacugcaucgacggggcccugcugacgaagagcagcgaguacaagggccccaucaccgacguguucuacaaggagaacuccuacaccaccacgaucaagcccgugaccuacaagcucgacggggucgugugcaccgagaucgaccccaagcuggacaacuacuacaagaaggacaacagcuacuucaccgagcagccgaucgaccuggugcccaaccagcccuaccccaacgccuccuucgacaacuucaaguucgucugcgacaacaucaaguucgccgacgaccucaaccagcugacgggcuacaagaagccggcgagccgcgagcugaaggugaccuucuuccccgaccucaacggggacguggucgccaucgacuacaagcacuacacccccuccuucaagaagggcgccaagcugcugcacaagcccaucguguggcacgugaacaacgccaccaacaaggcgacguacaagccgaacaccuggugcauccggugccucuggagcaccaagcccgucgagaccuccaacagcuucgacgugcugaaguccgaggacgcccagggcauggacaaccuggccugcgaggaccucaagcccgugagcgaggaggucguggagaaccccacgauccagaaggacgugcuggagugcaacgucaagaccaccgagguggugggggacaucauccugaagccggccaacaacucccucaagaucaccgaggaggucggccacacggaccugauggccgcguacguggacaacagcucccugaccaucaagaagcccaacgagcucagccgcgugcuggggcugaagacccucgccacccacggccuggccgccgucaacuccgugcccugggacacgaucgccaacuacgcgaagccguuccugaacaagguggucagcaccaccaccaacaucgugacgcgcugccucaaccgggugugcaccaacuacaugcccuacuucuucacccugcugcuccagcugugcaccuucacccgcuccacgaacagccggaucaaggccuccaugcccaccaccaucgccaagaacaccgucaagagcguggggaaguucugccuggaggccagcuucaacuaccucaagucccccaacuucagcaagcugaucaacaucaucaucugguuccugcuccuguccgugugccugggcagccucaucuacuccacggccgcgcugggcguccugaugagcaaccucgggaugccguccuacugcaccggcuaccgcgagggguaccugaacagcaccaacgugaccaucgccacguacugcaccggcuccauccccugcagcgugugccuguccggccucgacagccuggacaccuaccccucccuggagaccauccagaucacgaucagcuccuucaagugggaccucaccgccuucgggcuggucgccgagugguuccuggccuacauccucuucacccgguucuucuacgugcugggccuggcggccaucaugcagcucuucuucagcuacuucgccgugcacuucaucuccaacagcuggcugauguggcugaucaucaaccugguccagauggcccccaucuccgcgauggugcgcauguacaucuucuucgccagcuucuacuacguguggaagagcuacguccacgugguggacgggugcaacuccagcaccugcaugaugugcuacaagcggaaccgcgccacgcgggucgagugcaccaccaucgugaacggcguccgccgguccuucuacguguacgccaacgggggcaagggcuucugcaagcuccacaacuggaacugcgugaacugcgacaccuucugcgccgggagcacguucaucuccgacgaggucgcgcgcgaccugagccugcaguucaagcggccgaucaaccccaccgaccaguccagcuacaucguggacuccgugaccgucaagaacggcagcauccaccucuacuucgacaaggccgggcagaagaccuacgagcgccacucccugagccacuucgugaaccuggacaaccuccgggccaacaacacgaagggcucccugcccaucaacgugaucgucuucgacgggaagagcaagugcgaggaguccagcgccaaguccgccagcguguacuacucccagcugaugugccagcccauccuccugcuggaccaggcgcucgugagcgacgucggcgacagcgccgagguggccgugaagauguucgacgccuacgucaacaccuucuccagcaccuucaacgugccgauggagaagcugaagacccugguggccacggcggaggccgagcucgccaagaacgucucccuggacaacgugcugagcaccuucaucuccgccgcgcgccagggcuucguggacagcgacgucgagaccaaggacgugguggagugccucaagcugucccaccagagcgacaucgaggucaccggggacuccugcaacaacuacaugcugacguacaacaagguggagaacaugaccccccgggaccucggcgccugcaucgacugcagcgcccgccacaucaacgcccagguggccaagucccacaacaucgcgcugaucuggaacgucaaggacuucaugagccuguccgagcagcuccggaagcagauccgcagcgccgccaagaagaacaaccugcccuucaagcugaccugcgccaccacgcgccagguggugaacgucgugaccaccaagaucgcccucaaggggggcuga

SEQ ID NO: 17709 - RNA, 5841 nt, Artificial Sequence
  SARS-CoV-2__MT873500.1__non-structural protein 3 (NSP3) CDS gc
auggcccccaccaaggugaccuucggcgacgacacggucaucgaggugcagggguacaagagcgugaacaucaccuucgagcuggacgagcgcaucgacaagguccucaacgagaagugcuccgccuacaccguggagcugggcaccgaggugaacgaguucgcgugcgucguggccgacgccgugaucaagacgcugcagccggucagcgagcuccugaccccccuggggaucgaccucgacgagugguccauggccaccuacuaccuguucgacgagagcggcgaguucaagcuggccucccacauguacugcagcuucuacccccccgacgaggacgaggaggagggggacugcgaggaggaggaguucgagccguccacccaguacgaguacggcacggaggacgacuaccagggcaagccccucgaguucggggcgaccagcgccgcccugcagcccgaggaggagcaggaggaggacuggcuggacgacgacucccagcagaccgugggccagcaggacgggagcgaggacaaccagaccacgaccauccagaccaucguggagguccagccccagcucgagauggagcugaccccgguggugcagacgaucgaggucaacuccuucagcggcuaccugaagcucaccgacaacguguacaucaagaacgccgacaucguggaggaggcgaagaaggucaagcccaccgugguggucaacgccgccaacguguaccugaagcacgggggcggcguggccggggcccugaacaaggcgaccaacaacgccaugcaggucgaguccgacgacuacaucgccacgaacggcccccucaagguggggggcagcugcguccuguccggccacaaccuggccaagcacugccuccacgugguggggcccaacgucaacaagggcgaggacauccagcugcugaagagcgccuacgagaacuucaaccagcacgaggugcuccuggcgccgcugcucuccgccgggaucuucggcgccgaccccauccacagccugcgggugugcgucgacaccgugcgcaccaacguguaccuggccgucuucgacaagaaccucuacgacaagcugguguccagcuuccuggagaugaagagcgagaagcagguggagcagaagaucgccgagauccccaaggaggaggucaagcccuucaucaccgaguccaagccgagcguggagcagcggaagcaggacgacaagaagaucaaggcgugcguggaggaggucacgaccacccucgaggagaccaaguuccugacggagaaccugcuccuguacaucgacaucaacgggaaccugcaccccgacuccgccacccucgugagcgacaucgacaucaccuuccugaagaaggacgcccccuacaucgugggcgacgucgugcaggagggcgugcugaccgccgucgugauccccacgaagaaggccgggggcaccaccgagaugcucgcgaaggcccugcgcaaggugccgaccgacaacuacaucacgaccuaccccgggcagggccugaacggguacaccgucgaggaggccaagaccgugcucaagaagugcaaguccgccuucuacauccugcccagcaucaucuccaacgagaagcaggagauccugggcaccgugagcuggaaccuccgggagaugcuggcgcacgccgaggagacgcgcaagcugaugcccgucugcguggagaccaaggccaucguguccaccauccagcggaaguacaagggcaucaagauccaggagggggucguggacuacggcgcccgcuucuacuucuacaccagcaagacgaccguggccucccugaucaacacccucaacgaccugaacgagacccuggucacgaugccgcucggguacgugacccacggccugaaccuggaggaggcggcccgguacaugcgcagccucaaggugcccgccaccgucuccgugagcucccccgacgccgugaccgccuacaacggguaccugacgagcuccagcaagacccccgaggagcacuucaucgagaccaucucccuggcgggcagcuacaaggacuggagcuacuccggccagagcacccagcucgggaucgaguuccugaagcggggcgacaaguccgucuacuacacgagcaacccgaccaccuuccaccuggacggggaggugaucaccuucgacaaccucaagacgcugcugucccuccgcgaggugcggaccaucaaggucuucaccaccguggacaacaucaaccugcacacgcagguggucgacaugagcaugaccuacggccagcaguucggccccaccuaccuggacggggccgacgugaccaagaucaagccccacaacucccacgagggcaagacguucuacgugcucccgaacgacgacacccugcgcgucgaggccuucgaguacuaccacaccaccgaccccagcuuccuggggcgguacauguccgcccucaaccacacgaagaaguggaaguacccccaggugaacggccugaccagcaucaagugggccgacaacaacugcuaccuggcgaccgcccuccugacccugcagcagaucgagcucaaguucaaccccccggcccugcaggacgccuacuaccgcgcgcgggccggggaggccgccaacuucugcgcccugauccucgcguacugcaacaagacggugggcgagcugggcgacguccgcgagaccauguccuaccuguuccagcacgccaaccucgacagcugcaagcgggugcugaacgucgugugcaagaccugcgggcagcagcagaccacccugaagggcguggaggccgucauguacauggggacgcucuccuacgagcaguucaagaagggcgugcagauccccugcaccugcgggaagcaggccaccaaguaccuggugcagcaggagagccccuucgucaugauguccgcccccccggcgcaguacgagcugaagcacggcaccuucacgugcgccagcgaguacaccggcaacuaccagugcgggcacuacaagcacaucaccuccaaggagacccucuacugcaucgacggcgcccugcugacgaagagcagcgaguacaaggggcccaucaccgacguguucuacaaggagaacuccuacaccaccacgaucaagcccgugaccuacaagcucgacggcgucgugugcaccgagaucgaccccaagcuggacaacuacuacaagaaggacaacagcuacuucaccgagcagccgaucgaccuggugcccaaccagcccuaccccaacgccuccuucgacaacuucaaguucgucugcgacaacaucaaguucgccgacgaccucaaccagcugacgggguacaagaagccggcgagccgcgagcugaaggugaccuucuuccccgaccucaacggcgacguggucgccaucgacuacaagcacuacacccccuccuucaagaagggcgccaagcugcugcacaagcccaucguguggcacgugaacaacgccaccaacaaggcgacguacaagccgaacaccuggugcauccggugccucuggagcaccaagcccgucgagaccuccaacagcuucgacgugcugaaguccgaggacgcccaggggauggacaaccuggccugcgaggaccucaagcccgugagcgaggaggucguggagaaccccacgauccagaaggacgugcuggagugcaacgucaagaccaccgagguggugggcgacaucauccugaagccggccaacaacucccucaagaucaccgaggaggucgggcacacggaccugauggccgcguacguggacaacagcucccugaccaucaagaagcccaacgagcucagccgcgugcugggccugaagacccucgccacccacgggcuggccgucgugaacuccgugcccugggacacgaucgccaacuacgccaagccguuccugaacaaggucgugagcaccaccaccaacaucgugacgcgcugccucaaccgggucugcaccaacuacaugcccuacuucuucacccugcugcuccagcugugcaccuucacccgcuccacgaacagccggaucaaggcguccaugcccaccaccaucgccaagaacaccgugaagagcgugggcaaguucugccuggaggccagcuucaacuaccucaagucccccaacuucagcaagcugaucaacaucaucaucugguuccugcuccuguccgucugccugggcagccucaucuacuccacggccgcccugggggugcugaugagcaaccucggcaugccguccuacugcaccggguaccgcgagggcuaccugaacagcaccaacgugaccaucgcgacguacugcaccggcuccauccccugcagcgucugccuguccgggcucgacagccuggacaccuaccccucccuggagaccauccagaucacgaucagcuccuucaagugggaccucaccgccuucggccugguggccgagugguuccuggccuacauccucuucacccgguucuucuacgugcuggggcuggccgcgaucaugcagcucuucuucagcuacuucgccguccacuucaucuccaacagcuggcugauguggcugaucaucaaccuggugcagauggcccccaucuccgccauggugcgcauguacaucuucuucgcgagcuucuacuacgucuggaagagcuacgugcacguggucgacggcugcaacuccagcaccugcaugaugugcuacaagcggaaccgcgccacgcggguggagugcaccaccaucgucaacggggugcgccgguccuucuacguguacgccaacggcggcaagggguucugcaagcuccacaacuggaacugcgucaacugcgacaccuucugcgccggcagcacguucaucuccgacgagguggcccgcgaccugagccugcaguucaagcggccgaucaaccccaccgaccaguccagcuacaucguggacuccgucaccgugaagaacgggagcauccaccucuacuucgacaaggcgggccagaagaccuacgagcgccacucccugagccacuucgugaaccuggacaaccuccgggccaacaacacgaaggggucccugcccaucaacgucaucguguucgacggcaagagcaagugcgaggaguccagcgccaaguccgccagcguguacuacucccagcugaugugccagcccauccuccugcuggaccaggcccucgucagcgacgugggcgacagcgcggagguggccgucaagauguucgacgccuacgugaacaccuucuccagcaccuucaacgugccgauggagaagcugaagacccuggucgccacggccgaggcggagcucgccaagaacgugucccuggacaacgugcugagcaccuucaucuccgccgcccgccagggguucgucgacagcgacguggagaccaaggacguggucgagugccucaagcugucccaccagagcgacaucgaggugaccggcgacuccugcaacaacuacaugcugacguacaacaagguggagaacaugaccccccgggaccucggggcgugcaucgacugcagcgcccgccacaucaacgcccaggucgccaagucccacaacaucgcccugaucuggaacgugaaggacuucaugagccuguccgagcagcuccggaagcagauccgcagcgcggccaagaagaacaaccugcccuucaagcugaccugcgccaccacgcgccagguggucaacguggugaccaccaagaucgcccucaagggcggguga

SEQ ID NO: 17710 - RNA, 5841 nt, Artificial Sequence
  SARS-CoV-2__MT873506.1__non-structural protein 3 (NSP3) CDS gc
auggcccccaccaaggugaccuucggcgacgacacggucaucgaggugcagggguacaagagcgugaacaucaccuucgagcuggacgagcgcaucgacaagguccucaacgagaagugcuccgccuacaccguggagcugggcaccgaggugaacgaguucgcgugcgucguggccgacgccgugaucaagacgcugcagccggucagcgagcuccugaccccccuggggaucgaccucgacgagugguccauggccaccuacuaccuguucgacgagagcggcgaguucaagcuggccucccacauguacugcagcuucuacccccccgacgaggacgaggaggagggggacugcgaggaggaggaguucgagccguccacccaguacgaguacggcacggaggacgacuaccagggcaagccccucgaguucggggcgaccagcgccgcccugcagcccgaggaggagcaggaggaggacuggcuggacgacgacucccagcagaccgugggccagcaggacgggagcgaggacaaccagaccacgaccauccagaccaucguggagguccagccccagcucgagauggagcugaccccgguggugcagacgaucgaggucaacuccuucagcggcuaccugaagcucaccgacaacguguacaucaagaacgccgacaucguggaggaggcgaagaaggucaagcccaccgugguggucaacgccgccaacguguaccugaagcacgggggcggcguggccggggcccugaacaaggcgaccaacaacgccaugcaggucgaguccgacgacuacaucgccacgaacggcccccucaagguggggggcagcugcguccuguccggccacaaccuggccaagcacugccuccacgugguggggcccaacgucaacaagggcgaggacauccagcugcugaagagcgccuacgagaacuucaaccagcacgaggugcuccuggcgccgcugcucuccgccgggaucuucggcgccgaccccauccacagccugcgggugugcgucgacaccgugcgcaccaacguguaccuggccgucuucgacaagaaccucuacgacaagcugguguccagcuuccuggagaugaagagcgagaagcagguggagcagaagaucgccgagauccccaaggaggaggucaagcccuucaucaccgaguccaagccgagcguggagcagcggaagcaggacgacaagaagaucaaggcgugcguggaggaggucacgaccacccucgaggagaccaaguuccugacggagaaccugcuccuguacaucgacaucaacgggaaccugcaccccgacuccgccacccucgugagcgacaucgacaucaccuuccugaagaaggacgcccccuacaucgugggcgacgucgugcaggagggcgugcugaccgccgucgugauccccacgaagaaggccgggggcaccaccgagaugcucgcgaaggcccugcgcaaggugccgaccgacaacuacaucacgaccuaccccgggcagggccugaacggguacaccgucgaggaggccaagaccgugcucaagaagugcaaguccgccuucuacauccugcccagcaucaucuccaacgagaagcaggagauccugggcaccgugagcuggaaccuccgggagaugcuggcgcacgccgaggagacgcgcaagcugaugcccgucugcguggagaccaaggccaucguguccaccauccagcggaaguacaagggcaucaagauccaggagggggucguggacuacggcgcccgcuucuacuucuacaccagcaagacgaccguggccucccugaucaacacccucaacgaccugaacgagacccuggucacgaugccgcucggguacgugacccacggccugaaccuggaggaggcggcccgguacaugcgcagccucaaggugcccgccaccgucuccgugagcucccccgacgccgugaccgccuacaacggguaccugacgagcuccagcaagacccccgaggagcacuucaucgagaccaucucccuggcgggcagcuacaaggacuggagcuacuccggccagagcacccagcucgggaucgaguuccugaagcggggcgacaaguccgucuacuacacgagcaacccgaccaccuuccaccuggacggggaggugaucaccuucgacaaccucaagacgcugcugucccuccgcgaggugcggaccaucaaggucuucaccaccguggacaacaucaaccugcacacgcagguggucgacaugagcaugaccuacggccagcaguucggccccaccuaccuggacggggccgacgugaccaagaucaagccccacaacucccacgagggcaagacguucuacgugcucccgaacgacgacacccugcgcgucgaggccuucgaguacuaccacaccaccgaccccagcuuccuggggcgguacauguccgcccucaaccacacgaagaaguggaaguacccccaggugaacggccugaccagcaucaagugggccgacaacaacugcuaccuggcgaccgcccuccugacccugcagcagaucgagcucaaguucaaccccccggcccugcaggacgccuacuaccgcgcgcgggccggggaggccgccaacuucugcgcccugauccucgcguacugcaacaagacggugggcgagcugggcgacguccgcgagaccauguccuaccuguuccagcacgccaaccucgacagcugcaagcgggugcugaacgucgugugcaagaccugcgggcagcagcagaccacccugaagggcguggaggccgucauguacauggggacgcucuccuacgagcaguucaagaagggcgugcagauccccugcaccugcgggaagcaggccaccaaguaccuggugcagcaggagagccccuucgucaugauguccgcccccccggcgcaguacgagcugaagcacggcaccuucacgugcgccagcgaguacaccggcaacuaccagugcgggcacuacaagcacaucaccuccaaggagacccucuacugcaucgacggcgcccugcugacgaagagcagcgaguacaaggggcccaucaccgacguguucuacaaggagaacuccuacaccaccacgaucaagcccgugaccuacaagcucgacggcgucgugugcaccgagaucgaccccaagcuggacaacuacuacaagaaggacaacagcuacuucaccgagcagccgaucgaccuggugcccaaccagcccuaccccaacgccuccuucgacaacuucaaguucgucugcgacaacaucaaguucgccgacgaccucaaccagcugacgggguacaagaagccggcgagccgcgagcugaaggugaccuucuuccccgaccucaacggcgacguggucgccaucgacuacaagcacuacacccccuccuucaagaagggcgccaagcugcugcacaagcccaucguguggcacgugaacaacgccaccaacaaggcgacguacaagccgaacaccuggugcauccggugccucuggagcaccaagcccgucgagaccuccaacagcuucgacgugcugaaguccgaggacgcccaggggauggacaaccuggccugcgaggaccucaagcccgugagcgaggaggucguggagaaccccacgauccagaaggacgugcuggagugcaacgucaagaccaccgagguggugggcgacaucauccugaagccggccaacaacucccucaagaucaccgaggaggucgggcacacggaccugauggccgcguacguggacaacagcucccugaccaucaagaagcccaacgagcucagccgcgugcugggccugaagacccucgccacccacgggcuggccgccgucaacuccgugcccugggacacgaucgccaacuacgcgaagccguuccugaacaagguggucagcaccaccaccaacaucgugacgcgcugccucaaccgggugugcaccaacuacaugcccuacuucuucacccugcugcuccagcugugcaccuucacccgcuccacgaacagccggaucaaggccuccaugcccaccaccaucgccaagaacaccgucaagagcgugggcaaguucugccuggaggccagcuucaacuaccucaagucccccaacuucagcaagcugaucaacaucaucaucugguuccugcuccuguccgugugccugggcagccucaucuacuccacggccgcgcuggggguccugaugagcaaccucggcaugccguccuacugcaccggguaccgcgagggcuaccugaacagcaccaacgugaccaucgccacguacugcaccggcuccauccccugcagcgugugccuguccgggcucgacagccuggacaccuaccccucccuggagaccauccagaucacgaucagcuccuucaagugggaccucaccgccuucggccuggucgccgagugguuccuggccuacauccucuucacccgguucuucuacgugcuggggcuggcggccaucaugcagcucuucuucagcuacuucgccgugcacuucaucuccaacagcuggcugauguggcugaucaucaaccugguccagauggcccccaucuccgcgauggugcgcauguacaucuucuucgccagcuucuacuacguguggaagagcuacguccacgugguggacggcugcaacuccagcaccugcaugaugugcuacaagcggaaccgcgccacgcgggucgagugcaccaccaucgugaacgggguccgccgguccuucuacguguacgccaacggcggcaagggguucugcaagcuccacaacuggaacugcgugaacugcgacaccuucugcgccggcagcacguucaucuccgacgaggucgcgcgcgaccugagccugcaguucaagcggccgaucaaccccaccgaccaguccagcuacaucguggacuccgugaccgucaagaacgggagcauccaccucuacuucgacaaggccggccagaagaccuacgagcgccacucccugagccacuucgugaaccuggacaaccuccgggccaacaacacgaaggggucccugcccaucaacgugaucgucuucgacggcaagagcaagugcgaggaguccagcgccaaguccgccagcguguacuacucccaccugaugugccagcccauccuccugcuggaccaggcgcucgugagcgacgucggcgacagcgccgagguggccgugaagauguucgacgccuacgucaacaccuucuccagcaccuucaacgugccgauggagaagcugaagacccugguggccacggcggaggccgagcucgccaagaacgucucccuggacaacgugcugagcaccuucaucuccgccgcgcgccagggguucguggacagcgacgucgagaccaaggacgugguggagugccucaagcugucccaccagagcgacaucgaggucaccggcgacuccugcaacaacuacaugcugacguacaacaagguggagaacaugaccccccgggaccucggggccugcaucgacugcagcgcccgccacaucaacgcccagguggccaagucccacaacaucgcgcugaucuggaacgucaaggacuucaugagccuguccgagcagcuccggaagcagauccgcagcgccgccaagaagaacaaccugcccuucaagcugaccugcgccaccacgcgccagguggugaacgucgugaccaccaagaucgcccucaagggcggguga

SEQ ID NO: 17711 - RNA, 5841 nt, Artificial Sequence
  SARS-CoV-2__MT876527.1__non-structural protein 3 (NSP3) CDS gc
auggcccccaccaaggugaccuucggcgacgacacggucaucgaggugcagggguacaagagcgugaacaucaccuucgagcuggacgagcgcaucgacaagguccucaacgagaagugcuccgccuacaccguggagcugggcaccgaggugaacgaguucgcgugcgucguggccgacgccgugaucaagacgcugcagccggucagcgagcuccugaccccccuggggaucgaccucgacgagugguccauggccaccuacuaccuguucgacgagagcggcgaguucaagcuggccucccacauguacugcagcuucuacccccccgacgaggacgaggaggagggggacugcgaggaggaggaguucgagccguccacccaguacgaguacggcacggaggacgacuaccagggcaagccccucgaguucggggcgaccagcgccgcccugcagcccgaggaggagcaggaggaggacuggcuggacgacgacucccagcagaccgugggccagcaggacgggagcgaggacaaccagaccacgaccauccagaccaucguggagguccagccccagcucgagauggagcugaccccgguggugcagacgaucgaggucaacuccuucagcggcuaccugaagcucaccgacaacguguacaucaagaacgccgacaucguggaggaggcgaagaaggucaagcccaccgugguggucaacgccgccaacguguaccugaagcacgggggcggcguggccggggcccugaacaaggcgaccaacaacgccaugcaggucgaguccgacgacuacaucgccacgaacggcccccucaagguggggggcagcugcguccuguccggccacaaccuggccaagcacugccuccacgugguggggcccaacgucaacaagggcgaggacauccagcugcugaagagcgccuacgagaacuucaaccagcacgaggugcuccuggcgccgcugcucuccgccgggaucuucggcgccgaccccauccacagccugcgggugugcgucgacaccgugcgcaccaacguguaccuggccgucuucgacaagaaccucuacgacaagcugguguccagcuuccuggagaugaagagcgagaagcagguggagcagaagaucgccgagauccccaaggaggaggucaagcccuucaucaccgaguccaagccgagcguggagcagcggaagcaggacgacaagaagaucaaggcgugcguggaggaggucacgaccacccucgaggagaccaaguuccugacggagaaccugcuccuguacaucgacaucaacgggaaccugcaccccgacuccgccacccucgugagcgacaucgacaucaccuuccugaagaaggacgcccccuacaucgugggcgacgucgugcaggagggcgugcugaccgccgucgugauccccacgaagaaggccgggggcaccaccgagaugcucgcgaaggcccugcgcaaggugccgaccgacaacuacaucacgaccuaccccgggcagggccugaacggguacaccgucgaggaggccaagaccgugcucaagaagugcaaguccgccuucuacauccugcccagcaucaucuccaacgagaagcaggagauccugggcaccgugagcuggaaccuccgggagaugcuggcgcacgccgaggagacgcgcaagcugaugcccgucugcguggagaccaaggccaucguguccaccauccagcggaaguacaagggcaucaagauccaggagggggucguggacuacggcgcccgcuucuacuucuacaccagcaagacgaccguggccucccugaucaacacccucaacgaccugaacgagacccuggucacgaugccgcucggguacgugacccacggccugaaccuggaggaggcggcccgguacaugcgcagccucaaggugcccgccaccgucuccgugagcucccccgacgccgugaccgccuacaacggguaccugacgagcuccagcaagacccccgaggagcacuucaucgagaccaucucccuggcgggcagcuacaaggacuggagcuacuccggccagagcacccagcucgggaucgaguuccugaagcggggcgacaaguccgucuacuacacgagcaacccgaccaccuuccaccuggacggggaggugaucaccuucgacaaccucaagacgcugcugucccuccgcgaggugcggaccaucaaggucuucaccaccguggacaacaucaaccugcacacgcagguggucgacaugagcaugaccuacggccagcaguucggccccaccuaccuggacggggccgacgugaccaagaucaagccccacaacucccacgagggcaagacguucuacgugcucccgaacgacgacacccugcgcgucgaggccuucgaguacuaccacaccaccgaccccagcuuccuggggcgguacauguccgcccucaaccacacgaagaaguggaaguacccccaggugaacggccugaccagcaucaagugggccgacaacaacugcuaccuggcgaccgcccuccugacccugcagcagaucgagcucaaguucaaccccccggcccugcaggacgccuacuaccgcgcgcgggccggggaggccgccaacuucugcgcccugauccucgcguacugcaacaagacggugggcgagcugggcgacguccgcgagaccauguccuaccuguuccagcacgccaaccucgacagcugcaagcgggugcugaacgucgugugcaagaccugcgggcagcagcagaccacccugaagggcguggaggccgucauguacauggggacgcucuccuacgagcaguucaagaagggcgugcagauccccugcaccugcgggaagcaggccaccaaguaccuggugcagcaggagagccccuucgucaugauguccgcccccccggcgcaguacgagcugaagcacggcaccuucacgugcgccagcgaguacaccggcaacuaccagugcgggcacuacaagcacaucaccuccaaggagacccucuacugcaucgacggcgcccugcugacgaagagcagcgaguacaaggggcccaucaccgacguguucuacaaggagaacuccuacaccaccacgaucaagcccgugaccuacaagcucgacggcgucgugugcaccgagaucgaccccaagcuggacaacuacuacaagaaggacaacagcuacuucaccgagcagccgaucgaccuggugcccaaccagcccuaccccaacgccuccuucgacaacuucaaguucgucugcgacaacaucaaguucgccgacgaccucaaccagcugacgggguacaagaagccggcgagccgcgagcugaaggugaccuucuuccccgaccucaacggcgacguggucgccaucgacuacaagcacuacacccccuccuucaagaagggcgccaagcugcugcacaagcccaucguguggcacgugaacaacgccaccaacaaggcgacguacaagccgaacaccuggugcauccggugccucuggagcaccaagcccgucgagaccuccaacagcuucgacgugcugaaguccgaggacgcccaggggauggacaaccuggccugcgaggaccucaagcccgugagcgaggaggucguggagaaccccacgauccagaaggacgugcuggagugcaacgucaagaccaccgagguggugggcgacaucauccugaagccggccaacaacucccucaagaucaccgaggaggucgggcacacggaccugauggccgcguacguggacaacagcucccugaccaucaagaagcccaacgagcucagccgcgugcugggccugaagacccucgccacccacgggcuggccgccgucaacuccgugcccugggacacgaucgccaacuacgcgaagccguuccugaacaagguggucagcaccaccaccaacaucgugacgcgcugccucaaccgggugugcaccaacuacaugcccuacuucuucacccugcugcuccagcugugcaccuucacccgcuccacgaacagccggaucaaggccuccaugcccaccaccaucgccaagaacaccgucaagagcgugggcaaguucugccuggaggccagcuucaacuaccucaagucccccaacuucagcaagcugaucaacaucaucaucugguuccugcuccuguccgugugccugggcagccucaucuacuccacggccgcgcuggggguccugaugagcaaccucggcaugccguccuacugcaccggguaccgcgagggcuaccugaacagcaccaacgugaccaucgccacguacugcaucggcuccauccccugcagcgugugccuguccgggcucgacagccuggacaccuaccccucccuggagaccauccagaucaccaucagcuccuucaagugggaccucacggccuucggccuggucgccgagugguuccuggccuacauccucuucacccgguucuucuacgugcuggggcuggcggccaucaugcagcucuucuucagcuacuucgccgugcacuucaucuccaacagcuggcugauguggcugaucaucaaccugguccagauggcccccaucuccgcgauggugcgcauguacaucuucuucgccagcuucuacuacguguggaagagcuacguccacgugguggacggcugcaacuccagcaccugcaugaugugcuacaagcggaaccgcgccacccgggucgagugcacgaccaucgugaacgggguccgccgguccuucuacguguacgccaacggcggcaagggguucugcaagcuccacaacuggaacugcgugaacugcgacaccuucugcgccggcagcaccuucaucuccgacgaggucgcgcgcgaccugagccugcaguucaagcggccgaucaaccccacggaccaguccagcuacaucguggacuccgugaccgucaagaacgggagcauccaccucuacuucgacaaggccggccagaagaccuacgagcgccacucccugagccacuucgugaaccuggacaaccuccgggccaacaacaccaaggggucccugcccaucaacgugaucgucuucgacggcaagagcaagugcgaggaguccagcgccaaguccgccagcguguacuacucccagcugaugugccagcccauccuccugcuggaccaggcgcucgugagcgacgucggcgacagcgccgagguggccgugaagauguucgacgccuacgucaacacguucuccagcaccuucaacgugccgauggagaagcugaagacccugguggccaccgcggaggccgagcucgccaagaacgucucccuggacaacgugcugagcacguucaucuccgccgcgcgccagggguucguggacagcgacgucgagaccaaggacgugguggagugccucaagcugucccaccagagcgacaucgaggucaccggcgacuccugcaacaacuacaugcugaccuacaacaagguggagaacaugacgccccgggaccucggggccugcaucgacugcagcgcccgccacaucaacgcccagguggccaagucccacaacaucgcgcugaucuggaacgucaaggacuucaugagccuguccgagcagcuccggaagcagauccgcagcgccgccaagaagaacaaccugcccuucaagcugaccugcgccaccacccgccagguggugaacgucgugacgaccaagaucgcccucaagggcggguga

SEQ ID NO: 17712 - RNA, 5841 nt, Artificial Sequence
  SARS-CoV-2__MT876547.1__non-structural protein 3 (NSP3) CDS gc
auggcccccaccaaggugaccuucggcgacgacacggucaucgaggugcagggguacaagagcgugaacaucaccuucgagcuggacgagcgcaucgacaagguccucaacgagaagugcuccgccuacaccguggagcugggcaccgaggugaacgaguucgcgugcgucguggccgacgccgugaucaagacgcugcagccggucagcgagcuccugaccccccuggggaucgaccucgacgagugguccauggccaccuacuaccuguucgacgagagcggcgaguucaagcuggccucccacauguacugcagcuucuacccccccgacgaggacgaggaggagggggacugcgaggaggaggaguucgagccguccacccaguacgaguacggcacggaggacgacuaccagggcaagccccucgaguucggggcgaccagcgccgcccugcagcccgaggaggagcaggaggaggacuggcuggacgacgacucccagcagaccgugggccagcaggacgggagcgaggacaaccagaccacgaccauccagaccaucguggagguccagccccagcucgagauggagcugaccccgguggugcagacgaucgaggucaacuccuucagcggcuaccugaagcucaccgacaacguguacaucaagaacgccgacaucguggaggaggcgaagaaggucaagcccaccgugguggucaacgccgccaacguguaccugaagcacgggggcggcguggccggggcccugaacaaggcgaccaacaacgccaugcaggucgaguccgacgacuacaucgccacgaacggcccccucaagguggggggcagcugcguccuguccggccacaaccuggccaagcacugccuccacgugguggggcccaacgucaacaagggcgaggacauccagcugcugaagagcgccuacgagaacuucaaccagcacgaggugcuccuggcgccgcugcucuccgccgggaucuucggcgccgaccccauccacagccugcgggugugcgucgacaccgugcgcaccaacguguaccuggccgucuucgacaagaaccucuacgacaagcugguguccagcuuccuggagaugaagagcgagaagcagguggagcagaagaucgccgagauccccaaggaggaggucaagcccuucaucaccgaguccaagccgagcguggagcagcggaagcaggacgacaagaagaucaaggcgugcguggaggaggucacgaccacccucgaggagaccaaguuccugacggagaaccugcuccuguacaucgacaucaacgggaaccugcaccccgacuccgccacccucgugagcgacaucgacaucaccuuccugaagaaggacgcccccuacaucgugggcgacgucgugcaggagggcgugcugaccgccgucgugauccccacgaagaaggccgggggcaccaccgagaugcucgcgaaggcccugcgcaaggugccgaccgacaacuacaucacgaccuaccccgggcagggccugaacggguacaccgucgaggaggccaagaccgugcucaagaagugcaaguccgccuucuacauccugcccagcaucaucuccaacgagaagcaggagauccugggcaccgugagcuggaaccuccgggagaugcuggcgcacgccgaggagacgcgcaagcugaugcccgucugcguggagaccaaggccaucguguccaccauccagcggaaguacaagggcaucaagauccaggagggggucguggacuacggcgcccgcuucuacuucuacaccagcaagacgaccguggccucccugaucaacacccucaacgaccugaacgagacccuggucacgaugccgcucggguacgugacccacggccugaaccuggaggaggcggcccgguacaugcgcagccucaaggugcccgccaccgucuccgugagcucccccgacgccgugaccgccuacaacggguaccugacgagcuccagcaagacccccgaggagcacuucaucgagaccaucucccuggcgggcagcuacaaggacuggagcuacuccggccagagcacccagcucgggaucgaguuccugaagcggggcgacaaguccgucuacuacacgagcaacccgaccaccuuccaccuggacggggaggugaucaccuucgacaaccucaagacgcugcugucccuccgcgaggugcggaccaucaaggucuucaccaccguggacaacaucaaccugcacacgcagguggucgacaugagcaugaccuacggccagcaguucggccccaccuaccuggacggggccgacgugaccaagaucaagccccacaacucccacgagggcaagacguucuacgugcucccgaacgacgacacccugcgcgucgaggccuucgaguacuaccacaccaccgaccccagcuuccuggggcgguacauguccgcccucaaccacacgaagaaguggaaguacccccaggugaacggccugaccagcaucaagugggccgacaacaacugcuaccuggcgaccgcccuccugacccugcagcagaucgagcucaaguucaaccccccggcccugcaggacgccuacuaccgcgcgcgggccggggaggccgccaacuucugcgcccugauccucgcguacugcaacaagacggugggcgagcugggcgacguccgcgagaccauguccuaccuguuccagcacgccaaccucgacagcugcaagcgggugcugaacgucgugugcaagaccugcgggcagcagcagaccacccugaagggcguggaggccgucauguacauggggacgcucuccuacgagcaguucaagaagggcgugcagauccccugcaccugcgggaagcaggccaccaaguaccuggugcagcaggagagccccuucgucaugauguccgcccccccggcgcaguacgagcugaagcacggcaccuucacgugcgccagcgaguacaccggcaacuaccagugcgggcacuacaagcacaucaccuccaaggagacccucuacugcaucgacggcgcccugcugacgaagagcagcgaguacaaggggcccaucaccgacguguucuacaaggagaacuccuacaccaccacgaucaagcccgugaccuacaagcucgacggcgucgugugcaccgagaucgaccccaagcuggacaacuacuacaagaaggacaacagcuacuucaccgagcagccgaucgaccuggugcccaaccagcccuaccccaacgccuccuucgacaacuucaaguucgucugcgacaacaucaaguucgccgacgaccucaaccagcugacgggguacaagaagccggcgagccgcgagcugaaggugaccuucuuccccgaccucaacggcgacguggucgccaucgacuacaagcacuacacccccuccuucaagaagggcgccaagcugcugcacaagcccaucguguggcacgugaacaacgccaccaacaaggcgacguacaagccgaacaccuggugcauccggugccucuggagcaccaagcccgucgagaccuccaacagcuucgacgugcugaaguccgaggacgcccaggggauggacaaccuggccugcgaggaccucaagcccgugagcgaggaggucguggagaaccccacgauccagaaggacgugcuggagugcaacgucaagaccaccgagguggugggcgacaucauccugaagccggccaacaacucccucaagaucaccgaggaggucgggcacacggaccugauggccgcguacguggacaacagcucccugaccaucaagaagcccaacgagcucagccgcgugcugggccugaagacccucgccacccacgggcuggccgccgucaacuccgugcccugggacacgaucgccaacuacgcgaagccguuccugaacaagguggucagcaccaccaccaacaucgugacgcgcugccucaaccgggugugcaccaacuacaugcccuacuucuucacccugcugcuccagcugugcaucuucacccgcuccaccaacagccggaucaaggccuccaugcccacgaccaucgccaagaacaccgucaagagcgugggcaaguucugccuggaggccagcuucaacuaccucaagucccccaacuucagcaagcugaucaacaucaucaucugguuccugcuccuguccgugugccugggcagccucaucuacuccaccgccgcgcuggggguccugaugagcaaccucggcaugccguccuacugcacgggguaccgcgagggcuaccugaacagcaccaacgugaccaucgccaccuacugcacgggcuccauccccugcagcgugugccuguccgggcucgacagccuggacaccuaccccucccuggagaccauccagaucaccaucagcuccuucaagugggaccucacggccuucggccuggucgccgagugguuccuggccuacauccucuucacccgguucuucuacgugcuggggcuggcggccaucaugcagcucuucuucagcuacuucgccgugcacuucaucuccaacagcuggcugauguggcugaucaucaaccugguccagauggcccccaucuccgcgauggugcgcauguacaucuucuucgccagcuucuacuacguguggaagagcuacguccacgugguggacggcugcaacuccagcaccugcaugaugugcuacaagcggaaccgcgccacccgggucgagugcacgaccaucgugaacgggguccgccgguccuucuacguguacgccaacggcggcaagggguucugcaagcuccacaacuggaacugcgugaacugcgacaccuucugcgccggcagcaccuucaucuccgacgaggucgcgcgcgaccugagccugcaguucaagcggccgaucaaccccacggaccaguccagcuacaucguggacuccgugaccgucaagaacgggagcauccaccucuacuucgacaaggccggccagaagaccuacgagcgccacucccugagccacuucgugaaccuggacaaccuccgggccaacaacaccaaggggucccugcccaucaacgugaucgucuucgacggcaagagcaagugcgaggaguccagcgccaaguccgccagcguguacuacucccagcugaugugccagcccauccuccugcuggaccaggcgcucgugagcgacgucggcgacagcgccgagguggccgugaagauguucgacgccuacgucaacacguucuccagcaccuucaacgugccgauggagaagcugaagacccugguggccaccgcggaggccgagcucgccaagaacgucucccuggacaacgugcugagcacguucaucuccgccgcgcgccagggguucguggacagcgacgucgagaccaaggacgugguggagugccucaagcugucccaccagagcgacaucgaggucaccggcgacuccugcaacaacuacaugcugaccuacaacaagguggagaacaugacgccccgggaccucggggccugcaucgacugcagcgcccgccacaucaacgcccagguggccaagucccacaacaucgcgcugaucuggaacgucaaggacuucaugagccuguccgagcagcuccggaagcagauccgcagcgccgccaagaagaacaaccugcccuucaagcugaccugcgccaccacccgccagguggugaacgucgugacgaccaagaucgcccucaagggcggguga

SEQ ID NO: 17713 - RNA, 5841 nt, Artificial Sequence
  SARS-CoV-2__MT876555.1__non-structural protein 3 (NSP3) CDS gc
auggcccccaccaaggugaccuucggcgacgacacggucaucgaggugcagggguacaagagcgugaacaucaccuucgagcuggacgagcgcaucgacaagguccucaacgagaagugcuccgccuacaccguggagcugggcaccgaggugaacgaguucgcgugcgucguggccgacgccgugaucaagauccugcagccggucagcgagcuccugacgccccuggggaucgaccucgacgagugguccauggccaccuacuaccuguucgacgagagcggcgaguucaagcuggccucccacauguacugcagcuucuacccccccgacgaggacgaggaggagggggacugcgaggaggaggaguucgagccguccacccaguacgaguacggcaccgaggacgacuaccagggcaagccccucgaguucggggcgacgagcgccgcccugcagcccgaggaggagcaggaggaggacuggcuggacgacgacucccagcagaccgugggccagcaggacgggagcgaggacaaccagaccaccacgauccagaccaucguggagguccagccccagcucgagauggagcugaccccgguggugcagaccaucgaggucaacuccuucagcggcuaccugaagcucacggacaacguguacaucaagaacgccgacaucguggaggaggcgaagaaggucaagcccaccgugguggucaacgccgccaacguguaccugaagcacgggggcggcguggccggggcccugaacaaggcgaccaacaacgccaugcaggucgaguccgacgacuacaucgccaccaacggcccccucaagguggggggcagcugcguccuguccggccacaaccuggccaagcacugccuccacgugguggggcccaacgucaacaagggcgaggacauccagcugcugaagagcgccuacgagaacuucaaccagcacgaggugcuccuggcgccgcugcucuccgccgggaucuucggcgccgaccccauccacagccugcgggugugcgucgacacggugcgcaccaacguguaccuggccgucuucgacaagaaccucuacgacaagcugguguccagcuuccuggagaugaagagcgagaagcagguggagcagaagaucgccgagauccccaaggaggaggucaagcccuucaucaccgaguccaagccgagcguggagcagcggaagcaggacgacaagaagaucaaggcgugcguggaggaggucaccacgacccucgaggagaccaaguuccugaccgagaaccugcuccuguacaucgacaucaacgggaaccugcaccccgacuccgccacgcucgugagcgacaucgacaucaccuuccugaagaaggacgcccccuacaucgugggcgacgucgugcaggagggcgugcugaccgccgucgugauccccaccaagaaggccgggggcacgaccgagaugcucgcgaaggcccugcgcaaggugccgaccgacaacuacaucaccacguaccccgggcagggccugaacggguacaccgucgaggaggccaagaccgugcucaagaagugcaaguccgccuucuacauccugcccagcaucaucuccaacgagaagcaggagauccugggcaccgugagcuggaaccuccgggagaugcuggcgcacgccgaggagacccgcaagcugaugcccgucugcguggagacgaaggccaucguguccaccauccagcggaaguacaagggcaucaagauccaggagggggucguggacuacggcgcccgcuucuacuucuacaccagcaagaccacgguggccucccugaucaacacccucaacgaccugaacgagacccuggucaccaugccgcucggguacgugacgcacggccugaaccuggaggaggcggcccgguacaugcgcagccucaaggugcccgccaccgucuccgugagcucccccgacgccgugaccgccuacaacggguaccugaccagcuccagcaagacgcccgaggagcacuucaucgagaccaucucccuggcgggcagcuacaaggacuggagcuacuccggccagagcacccagcucgggaucgaguuccugaagcggggcgacaaguccgucuacuacaccagcaacccgacgaccuuccaccuggacggggaggugaucaccuucgacaaccucaagacccugcugucccuccgcgaggugcggacgaucaaggucuucaccaccguggacaacaucaaccugcacacccagguggucgacaugagcaugacguacggccagcaguucggccccaccuaccuggacggggccgacgugaccaagaucaagccccacaacucccacgagggcaagaccuucuacgugcucccgaacgacgacacgcugcgcgucgaggccuucgaguacuaccacaccaccgaccccagcuuccuggggcgguacauguccgcccucaaccacaccaagaaguggaaguacccccaggugaacggccugacgagcaucaagugggccgacaacaacugcuaccuggcgaccgcccuccugacccugcagcagaucgagcucaaguucaaccccccggcccugcaggacgccuacuaccgcgcgcgggccggggaggccgccaacuucugcgcccugauccucgcguacugcaacaagaccgugggcgagcugggcgacguccgcgagacgauguccuaccuguuccagcacgccaaccucgacagcugcaagcgggugcugaacgucgugugcaagaccugcgggcagcagcagaccacccugaagggcguggaggccgucauguacauggggacccucuccuacgagcaguucaagaagggcgugcagauccccugcacgugcgggaagcaggccaccaaguaccuggugcagcaggagagccccuucgucaugauguccgcccccccggcgcaguacgagcugaagcacggcaccuucaccugcgccagcgaguacacgggcaacuaccagugcgggcacuacaagcacaucaccuccaaggagacccucuacugcaucgacggcgcccugcugaccaagagcagcgaguacaaggggcccaucacggacguguucuacaaggagaacuccuacaccaccaccaucaagcccgugacguacaagcucgacggcgucgugugcaccgagaucgaccccaaccuggacaacuacuacaagaaggacaacagcuacuucaccgagcagccgaucgaccuggugcccaaccagcccuaccccaacgccuccuucgacaacuucaaguucgucugcgacaacaucaaguucgccgacgaccucaaccagcugaccggguacaagaagccggcgagccgcgagcugaaggugacguucuuccccgaccucaacggcgacguggucgccaucgacuacaagcacuacacccccuccuucaagaagggcgccaagcugcugcacaagcccaucguguggcacgugaacaacgccaccaacaaggcgaccuacaagccgaacacguggugcauccggugccucuggagcaccaagcccgucgagaccuccaacagcuucgacgugcugaaguccgaggacgcccaggggauggacaaccuggccugcgaggaccucaagcccgugagcgaggaggucguggagaaccccaccauccagaaggacgugcuggagugcaacgucaagacgaccgagguggugggcgacaucauccugaagccggccaacaacucccucaagaucaccgaggaggucgggcacaccgaccugauggccgcguacguggacaacagcucccugacgaucaagaagcccaacgagcucagccgcgugcugggccugaagacccucgccacccacgggcuggccgccgucaacuccgugcccugggacaccaucgccaacuacgcgaagccguuccugaacaagguggucagcacgaccaccaacaucgugacccgcugccucaaccgggugugcacgaacuacaugcccuacuucuucacccugcugcuccagcugugcaccuucacccgcuccaccaacagccggaucaaggccuccaugcccacgaccaucgccaagaacaccgucaagagcgugggcaaguucugccuggaggccagcuucaacuaccucaagucccccaacuucagcaagcugaucaacaucaucaucugguuccugcuccuguccgugugccugggcagccucaucuacuccaccgccgcgcuggggguccugaugagcaaccucggcaugccguccuacugcacgggguaccgcgagggcuaccugaacagcaccaacgugaccaucgccaccuacugcacgggcuccauccccugcagcgugugccuguccgggcucgacagccuggacaccuaccccucccuggagaccauccagaucaccaucagcuccuucaagugggaccucacggccuucggccuggucgccgagugguuccuggccuacauccucuucacccgguucuucuacgugcuggggcuggcggccaucaugcagcucuucuucagcuacuucgccgugcacuucaucuccaacagcuggcugauguggcugaucaucaaccugguccagauggcccccaucuccgcgauggugcgcauguacaucuucuucgccagcuucuacuacguguggaagagcuacguccacgugguggacggcugcaacuccagcaccugcaugaugugcuacaagcggaaccgcgccacccgggucgagugcacgaccaucgugaacgggguccgccgguccuucuacguguacgccaacggcggcaagggguucugcaagcuccacaacuggaacugcgugaacugcgacaccuucugcgccggcagcaccuucaucuccgacgaggucgcgcgcgaccugagccugcaguucaagcggccgaucaaccccacggaccaguccagcuacaucguggacuccgugaccgucaagaacgggagcauccaccucuacuucgacaaggccggccagaagaccuacgagcgccacucccugagccacuucgugaaccuggacaaccuccgggccaacaacaccaaggggucccugcccaucaacgugaucgucuucgacggcaagagcaagugcgaggaguccagcgccaaguccgccagcguguacuacucccagcugaugugccagcccauccuccugcuggaccaggcgcucgugagcgacgucggcgacagcgccgagguggccgugaagauguucgacgccuacgucaacacguucuccagcaccuucaacgugccgauggagaagcugaagacccugguggccaccgcggaggccgagcucgccaagaacgucucccuggacaacgugcugagcacguucaucuccgccgcgcgccagggguucguggacagcgacgucgagaccaaggacgugguggagugccucaagcugucccaccagagcgacaucgaggucaccggcgacuccugcaacaacuacaugcugaccuacaacaagguggagaacaugacgccccgggaccucggggccugcaucgacugcagcgcccgccacaucaacgcccagguggccaagucccacaacaucgcgcugaucuggaacgucaaggacuucaugagccuguccgagcagcuccggaagcagauccgcagcgccgccaagaagaacaaccugcccuucaagcugaccugcgccaccacccgccagguggugaacgucgugacgaccaagaucgcccucaagggcggguga

SEQ ID NO: 17714 - RNA, 5841 nt, Artificial Sequence
  SARS-CoV-2__MT876556.1__non-structural protein 3 (NSP3) CDS gc
auggcccccaccaaggugaccuucggcgacgacacggucaucgaggugcagggguacaagagcgugaacaucaccuucgagcuggacgcccgcaucgacaagguccucaacgagaagugcuccgcguacaccguggagcugggcaccgaggugaacgaguucgccugcgucguggccgacgccgugaucaagacgcugcagccggucagcgagcuccugaccccccuggggaucgaccucgacgagugguccauggccaccuacuaccuguucgacgagagcggcgaguucaagcuggcgucccacauguacugcagcuucuacccccccgacgaggacgaggaggagggggacugcgaggaggaggaguucgagccguccacccaguacgaguacggcacggaggacgacuaccagggcaagccccucgaguucggggccaccagcgccgcccugcagcccgaggaggagcaggaggaggacuggcuggacgacgacucccagcagaccgugggccagcaggacgggagcgaggacaaccagaccacgaccauccagaccaucguggagguccagccccagcucgagauggagcugaccccgguggugcagacgaucgaggucaacuccuucagcggcuaccugaagcucaccgacaacguguacaucaagaacgcggacaucguggaggaggccaagaaggucaagcccaccgugguggucaacgccgccaacguguaccugaagcacgggggcggcguggccggggcgcugaacaaggccaccaacaacgccaugcaggucgaguccgacgacuacaucgccacgaacggcccccucaagguggggggcagcugcguccuguccggccacaaccuggccaagcacugccuccacgugguggggcccaacgucaacaagggcgaggacauccagcugcugaagagcgcguacgagaacuucaaccagcacgaggugcuccuggccccgcugcucuccgccgggaucuucggcgccgaccccauccacagccugcgggugugcgucgacaccgugcgcaccaacguguaccuggccgucuucgacaagaaccucuacgacaagcugguguccagcuuccuggagaugaagagcgagaagcagguggagcagaagaucgcggagauccccaaggaggaggucaagcccuucaucaccgaguccaagccgagcguggagcagcggaagcaggacgacaagaagaucaaggccugcguggaggaggucacgaccacccucgaggagaccaaguuccugacggagaaccugcuccuguacaucgacaucaacgggaaccugcaccccgacuccgccacccucgugagcgacaucgacaucaccuuccugaagaaggacgcccccuacaucgugggcgacgucgugcaggagggcgugcugaccgccgucgugauccccacgaagaaggcggggggcaccaccgagaugcucgccaaggcccugcgcaaggugccgaccgacaacuacaucacgaccuaccccgggcagggccugaacggguacaccgucgaggaggccaagaccgugcucaagaagugcaaguccgcguucuacauccugcccagcaucaucuccaacgagaagcaggagauccugggcaccgugagcuggaaccuccgggagaugcuggcccacgccgaggagacgcgcaagcugaugcccgucugcguggagaccaaggccaucguguccaccauccagcggaaguacaagggcaucaagauccaggagggggucguggacuacggcgcccgcuucuacuucuacaccagcaagacgaccguggcgucccugaucaacacccucaacgaccugaacgagacccuggucacgaugccgcucggguacgugacccacggccugaaccuggaggaggccgcccgguacaugcgcagccucaaggugcccgccaccgucuccgugagcucccccgacgccgugaccgcguacaacggguaccugacgagcuccagcaagacccccgaggagcacuucaucgagaccaucucccuggccggcagcuacaaggacuggagcuacuccggccagagcacccagcucgggaucgaguuccugaagcggggcgacaaguccgucuacuacacgagcaacccgaccaccuuccaccuggacggggaggugaucaccuucgacaaccucaagacgcugcugucccuccgcgaggugcggaccaucaaggucuucaccaccguggacaacaucaaccugcacacgcagguggucgacaugagcaugaccuacggccagcaguucggccccaccuaccuggacggggccgacgugaccaagaucaagccccacaacucccacgagggcaagacguucuacgugcucccgaacgacgacacccugcgcgucgaggccuucgaguacuaccacaccaccgaccccagcuuccuggggcgguacauguccgcccucaaccacacgaagaaguggaaguacccccaggugaacggccugaccagcaucaagugggcggacaacaacugcuaccuggccaccgcccuccugacccugcagcagaucgagcucaaguucaaccccccggcccugcaggacgcguacuaccgcgcccgggccggggaggccgccaacuucugcgcgcugauccucgccuacugcaacaagacggugggcgagcugggcgacguccgcgagaccauguccuaccuguuccagcacgccaaccucgacagcugcaagcgggugcugaacgucgugugcaagaccugcgggcagcagcagaccacccugaagggcguggaggccgucauguacauggggacgcucuccuacgagcaguucaagaagggcgugcagauccccugcaccugcgggaagcaggccaccaaguaccuggugcagcaggagagccccuucgucaugauguccgcgcccccggcccaguacgagcugaagcacggcaccuucacgugcgccagcgaguacaccggcaacuaccagugcgggcacuacaagcacaucaccuccaaggagacccucuacugcaucgacggcgcccugcugacgaagagcagcgaguacaaggggcccaucaccgacguguucuacaaggagaacuccuacaccaccacgaucaagcccgugaccuacaagcucgacggcgucgugugcaccgagaucgaccccaagcuggacaacuacuacaagaaggacaacagcuacuucaccgagcagccgaucgaccuggugcccaaccagcccuaccccaacgccuccuucgacaacuucaaguucgucugcgacaacaucaaguucgcggacgaccucaaccagcugacgggguacaagaagccggccagccgcgagcugaaggugaccuucuuccccgaccucaacggcgacguggucgccaucgacuacaagcacuacacccccuccuucaagaagggcgccaagcugcugcacaagcccaucguguggcacgugaacaacgcgaccaacaaggccacguacaagccgaacaccuggugcauccggugccucuggagcaccaagcccgucgagaccuccaacagcuucgacgugcugaaguccgaggacgcccaggggauggacaaccuggccugcgaggaccucaagcccgugagcgaggaggucguggagaaccccacgauccagaaggacgugcuggagugcaacgucaagaccaccgagguggugggcgacaucauccugaagccggccaacaacucccucaagaucaccgaggaggucgggcacacggaccugauggcggccuacguggacaacagcucccugaccaucaagaagcccaacgagcucagccgcgugcugggccugaagacccucgccacccacgggcuggccgccgucaacuccgugcccugggacacgaucgcgaacuacgccaagccguuccugaacaagguggucagcaccaccaccaacaucgugacgcgcugccucaaccgggugugcaccaacuacaugcccuacuucuucacccugcugcuccagcugugcaccuucacccgcuccacgaacagccggaucaaggccuccaugcccaccaccaucgccaagaacaccgucaagagcgugggcaaguucugccuggaggccagcuucaacuaccucaagucccccaacuucagcaagcugaucaacaucaucaucugguuccugcuccuguccgugugccugggcagccucaucuacuccacggcggcccuggggguccugaugagcaaccucggcaugccguccuacugcaccggguaccgcgagggcuaccugaacagcaccaacgugaccaucgccacguacugcaccggcuccauccccugcagcgugugccuguccgggcucgacagccuggacaccuaccccucccuggagaccauccagaucacgaucagcuccuucaagugggaccucaccgccuucggccuggucgccgagugguuccuggcguacauccucuucacccgguucuucuacgugcuggggcuggccgccaucaugcagcucuucuucagcuacuucgccgugcacuucaucuccaacagcuggcugauguggcugaucaucaaccugguccagauggcgcccaucuccgccauggugcgcauguacaucuucuucgccagcuucuacuacguguggaagagcuacguccacgugguggacggcugcaacuccagcaccugcaugaugugcuacaagcggaaccgcgccacgcgggucgagugcaccaccaucgugaacgggguccgccgguccuucuacguguacgccaacggcggcaagggguucugcaagcuccacaacuggaacugcgugaacugcgacaccuucugcgcgggcagcacguucaucuccgacgaggucgcccgcgaccugagccugcaguucaagcggccgaucaaccccaccgaccaguccagcuacaucguggacuccgugaccgucaagaacgggagcauccaccucuacuucgacaaggccggccagaagaccuacgagcgccacucccugagccacuucgugaaccuggacaaccuccgggccaacaacacgaaggggucccugcccaucaacgugaucgucuucgacggcaagagcaagugcgaggaguccagcgccaaguccgcgagcguguacuacucccagcugaugugccagcccauccuccugcuggaccaggcccucgugagcgacgucggcgacagcgccgagguggccgugaagauguucgacgccuacgucaacaccuucuccagcaccuucaacgugccgauggagaagcugaagacccugguggcgacggccgaggccgagcucgccaagaacgucucccuggacaacgugcugagcaccuucaucuccgcggcccgccagggguucguggacagcgacgucgagaccaaggacgugguggagugccucaagcugucccaccagagcgacaucgaggucaccggcgacuccugcaacaacuacaugcugacguacaacaagguggagaacaugaccccccgggaccucggggccugcaucgacugcagcgcccgccacaucaacgcccagguggcgaagucccacaacaucgcccugaucuggaacgucaaggacuucaugagccuguccgagcagcuccggaagcagauccgcagcgccgccaagaagaacaaccugcccuucaagcugaccugcgccaccacgcgccagguggugaacgucgugaccaccaagaucgcgcucaagggcggguga

SEQ ID NO: 17715 - RNA, 5841 nt, Artificial Sequence
  SARS-CoV-2__MT876598.1__non-structural protein 3 (NSP3) CDS gc
auggcccccaccaaggugaccuucggcgacgacacggucaucgaggugcagggguacaagagcgugaacaucaccuucgagcuggacgagcgcaucgacaagguccucaacgagaagugcuccgccuacaccguggagcugggcaccgaggugaacgaguucgcgugcgucguggccgacgccgugaucaagacgcugcagccggucagcgagcuccugaccccccuggggaucgaccucgacgagugguccauggccaccuacuaccuguucgacgagagcggcgaguucaagcuggccucccacauguacugcagcuucuacccccccgacgaggacgaggaggagggggacugcgaggaggaggaguucgagccguccacccaguacgaguacggcacggaggacgacuaccagggcaagccccucgaguucggggcgaccagcgccgcccugcagcccgaggaggagcaggaggaggacuggcuggacgacgacucccagcagaccgugggccagcaggacgggagcgaggacaaccagaccacgaccauccagaccaucguggagguccagccccagcucgagauggagcugaccccgguggugcagacgaucgaggucaacuccuucagcggcuaccugaagcucaccgacaacguguacaucaagaacgccgacaucguggaggaggcgaagaaggucaagcccaccgugguggucaacgccgccaacguguaccugaagcacgggggcggcguggccggggcccugaacaaggcgaccaacaacgccaugcaggucgaguccgacgacuacaucgccacgaacggcccccucaagguggggggcagcugcguccuguccggccacaaccuggccaagcacugccuccacgugguggggcccaacgucaacaagggcgaggacauccagcugcugaagagcgccuacgagaacuucaaccagcacgaggugcuccuggcgccgcugcucuccgccgggaucuucggcgccgaccccauccacagccugcgggugugcgucgacaccgugcgcaccaacguguaccuggccgucuucgacaagaaccucuacgacaagcugguguccagcuuccuggagaugaagagcgagaagcagguggagcagaagaucgccgagauccccaaggaggaggucaagcccuucaucaccgaguccaagccgagcguggagcagcggaagcaggacgacaagaagaucaaggcgugcguggaggaggucacgaccacccucgaggagaccaaguuccugacggagaaccugcuccuguacaucgacaucaacgggaaccugcaccccgacuccgccacccucgugagcgacaucgacaucaccuuccugaagaaggacgcccccuacaucgugggcgacgucgugcaggagggcgugcugaccgccgucgugauccccacgaagaaggccgggggcaccaccgagaugcucgcgaaggcccugcgcaaggugccgaccgacaacuacaucacgaccuaccccgggcagggccugaacggguacaccgucgaggaggccaagaccgugcucaagaagugcaaguccgccuucuacauccugcccagcaucaucuccaacgagaagcaggagauccugggcaccgugagcuggaaccuccgggagaugcuggcgcacgccgaggagacgcgcaagcugaugcccgucugcguggagaccaaggccaucguguccaccauccagcggaaguacaagggcaucaagauccaggagggggucguggacuacggcgcccgcuucuacuucuacaccagcaagacgaccguggccucccugaucaacacccucaacgaccugaacgagacccuggucacgaugccgcucggguacgugacccacggccugaaccuggaggaggcggcccgguacaugcgcagccucaaggugcccgccaccgucuccgugagcucccccgacgccgugaccgccuacaacggguaccugacgagcuccagcaagacccccgaggagcacuucaucgagaccgucucccuggcgggcagcuacaaggacuggagcuacuccggccagagcacccagcucgggaucgaguuccugaagcggggcgacaaguccguguacuacacgagcaacccgaccaccuuccaccuggacggggaggugaucaccuucgacaaccucaagacgcugcugucccuccgcgagguccggaccaucaagguguucaccaccguggacaacaucaaccugcacacgcaggucguggacaugagcaugaccuacggccagcaguucggccccaccuaccuggacggggccgacgugaccaagaucaagccccacaacucccacgagggcaagacguucuacguccucccgaacgacgacacccugcgcguggaggccuucgaguacuaccacaccaccgaccccagcuuccuggggcgguacauguccgcccucaaccacacgaagaaguggaaguacccccaggugaacggccugaccagcaucaagugggccgacaacaacugcuaccuggcgaccgcccuccugacccugcagcagaucgagcucaaguucaaccccccggcccugcaggacgccuacuaccgcgcgcgggccggggaggccgccaacuucugcgcccugauccucgcguacugcaacaagacggucggcgagcugggcgacgugcgcgagaccauguccuaccuguuccagcacgccaaccucgacagcugcaagcggguccugaacguggugugcaagaccugcgggcagcagcagaccacccugaagggcgucgaggccgugauguacauggggacgcucuccuacgagcaguucaagaagggcgugcagauccccugcaccugcgggaagcaggccaccaaguaccugguccagcaggagagccccuucgugaugauguccgcccccccggcgcaguacgagcugaagcacggcaccuucacgugcgccagcgaguacaccggcaacuaccagugcgggcacuacaagcacaucaccuccaaggagacccucuacugcaucgacggcgcccugcugacgaagagcagcgaguacaaggggcccaucaccgacguguucuacaaggagaacuccuacaccaccacgaucaagcccgucaccuacaagcucgacggcguggugugcaccgagaucgaccccaagcuggacaacuacuacaagaaggacaacagcuacuucaccgagcagccgaucgaccugguccccaaccagcccuaccccaacgccuccuucgacaacuucaaguucgugugcgacaacaucaaguucgccgacgaccucaaccagcugacgggguacaagaagccggcgagccgcgagcugaaggugaccuucuuccccgaccucaacggcgacgucguggccaucgacuacaagcacuacacccccuccuucaagaagggcgccaagcugcugcacaagcccaucguguggcacgucaacaacgccaccaacaaggcgacguacaagccgaacaccuggugcauccggugccucuggagcaccaagcccguggagaccuccaacagcuucgacgugcugaaguccgaggacgcccaggggauggacaaccuggccugcgaggaccucaagcccgucagcgaggaggugguggagaaccccacgauccagaaggacguccuggagugcaacgugaagaccaccgagguggucggcgacaucauccugaagccggccaacaacucccucaagaucaccgaggagguggggcacacggaccugauggccgcguacguggacaacagcucccugaccaucaagaagcccaacgagcucagccgcguccugggccugaagacccucgccacccacgggcuggccgccgugaacuccgugcccugggacacgaucgccaacuacgcgaagccguuccugaacaaggucgugagcaccaccaccaacaucgugacgcgcugccucaaccgggucugcaccaacuacaugcccuacuucuucacccugcugcuccagcugugcaccuucacccgcuccacgaacagccggaucaaggccuccaugcccaccaccaucgccaagaacaccgugaagagcgugggcaaguucugccuggaggccagcuucaacuaccucaagucccccaacuucagcaagcugaucaacaucaucaucugguuccugcuccuguccgucugccugggcagccucaucuacuccacggccgcgcugggggugcugaugagcaaccucggcaugccguccuacugcaccggguaccgcgagggcuaccugaacagcaccaacgugaccaucgccacguacugcaccggcuccauccccugcagcgucugccuguccgggcucgacagccuggacaccuaccccucccuggagaccauccagaucacgaucagcuccuucaagugggaccucaccgccuucggccugguggccgagugguuccuggccuacauccucuucacccgguucuucuacgugcuggggcuggcggccaucaugcagcucuucuucagcuacuucgccguccacuucaucuccaacagcuggcugauguggcugaucaucaaccuggugcagauggcccccaucuccgcgauggugcgcauguacaucuucuucgccagcuucuacuacgucuggaagagcuacgugcacguggucgacggcugcaacuccagcaccugcaugaugugcuacaagcggaaccgcgccacgcggguggagugcaccaccaucgucaacggggugcgccgguccuucuacguguacgccaacggcggcaagggguucugcaagcuccacaacuggaacugcgucaacugcgacaccuucugcgccggcagcacguucaucuccgacgagguggcgcgcgaccugagccugcaguucaagcggccgaucaaccccaccgaccaguccagcuacaucguggacuccgucaccgugaagaacgggagcauccaccucuacuucgacaaggccggccagaagaccuacgagcgccacucccugagccacuucgugaaccuggacaaccuccgggccaacaacacgaaggggucccugcccaucaacgucaucguguucgacggcaagagcaagugcgaggaguccagcgccaaguccgccagcguguacuacucccagcugaugugccagcccauccuccugcuggaccaggcgcucgucagcgacgugggcgacagcgccgagguggccgucaagauguucgacgccuacgugaacaccuucuccagcaccuucaacgugccgauggagaagcugaagacccuggucgccacggcggaggccgagcucgccaagaacgugucccuggacaacgugcugagcaccuucaucuccgccgcgcgccagggguucgucgacagcgacguggagaccaaggacguggucgagugccucaagcugucccaccagagcgacaucgaggugaccggcgacuccugcaacaacuacaugcugacguacaacaagguggagaacaugaccccccgggaccucggggccugcaucgacugcagcgcccgccacaucaacgcccaggucgccaagucccacaacaucgcgcugaucuggaacgugaaggacuucaugagccuguccgagcagcuccggaagcagauccgcagcgccgccaagaagaacaaccugcccuucaagcugaccugcgccaccacgcgccagguggucaacguggugaccaccaagaucgcccucaagggcggguga

SEQ ID NO: 17716 - RNA, 5841 nt, Artificial Sequence
  SARS-CoV-2__MT876599.1__non-structural protein 3 (NSP3) CDS gc
auggcccccaccaaggugaccuucggcgacgacacggucaucgaggugcagggguacaagagcgugaacaucaccuucgagcuggacgagcgcaucgacaagguccucaacgagaagugcuccgccuacaccguggagcugggcaccgaggugaacgaguucgcgugcgucguggccgacgccgugaucaagacgcugcagccggucagcgagcuccugaccccccuggggaucgaccucgacgagugguccauggccaccuacuaccuguucgacgagagcggcgaguucaagcuggccucccacauguacugcagcuucuacccccccgacgaggacgaggaggagggggacugcgaggaggaggaguucgagccguccacccaguacgaguacggcacggaggacgacuaccagggcaagccccucgaguucggggcgaccagcgccgcccugcagcccgaggaggagcaggaggaggacuggcuggacgacgacucccagcagaccgugggccagcaggacgggagcgaggacaaccagaccacgaccauccagaccaucguggagguccagccccagcucgagauggagcugaccccgguggugcagacgaucgaggucaacuccuucagcggcuaccugaagcucaccgacaacguguacaucaagaacgccgacaucguggaggaggcgaagaaggucaagcccaccgugguggucaacgccgccaacguguaccugaagcacgggggcggcguggccggggcccugaacaaggcgaccaacaacgccaugcaggucgaguccgacgacuacaucgccacgaacggcccccucaagguggggggcagcugcguccuguccggccacaaccuggccaagcacugccuccacgugguggggcccaacgucaacaagggcgaggacauccagcugcugaagagcgccuacgagaacuucaaccagcacgaggugcuccuggcgccgcugcucuccgccgggaucuucggcgccgaccccauccacagccugcgggugugcgucgacaccgugcgcaccaacguguaccuggccgucuucgacaagaaccucuacgacaagcugguguccagcuuccuggagaugaagagcgagaagcagguggagcagaagaucgccgagauccccaaggaggaggucaagcccuucaucaccgaguccaagccgagcguggagcagcggaagcaggacgacaagaagaucaaggcgugcguggaggaggucacgaccacccucgaggagaccaaguuccugacggagaaccugcuccuguacaucgacaucaacgggaaccugcaccccgacuccgccacccucgugagcgacaucgacaucaccuuccugaagaaggacgcccccuacaucgugggcgacgucgugcaggagggcgugcugaccgccgucgugauccccacgaagaaggccgggggcaccaccgagaugcucgcgaaggcccugcgcaaggugccgaccgacaacuacaucacgaccuaccccgggcagggccugaacggguacaccgucgaggaggccaagaccgugcucaagaagugcaaguccgccuucuacauccugcccagcaucaucuccaacgagaagcaggagauccugggcaccgugagcuggaaccuccgggagaugcuggcgcacgccgaggagacgcgcaagcugaugcccgucugcguggagaccaaggccaucguguccaccauccagcggaaguacaagggcaucaagauccaggagggggucguggacuacggcgcccgcuucuacuucuacaccagcaagacgaccguggccucccugaucaacacccucaacgaccugaacgagacccuggucacgaugccgcucggguacgugacccacggccugaaccuggaggaggcggcccgguacaugcgcagccucaaggugcccgccaccgucuccgugagcucccccgacgccgugaccgccuacaacggguaccugacgagcuccagcaagacccccgaggagcacuucaucgagaccaucucccuggcgggcagcuacaaggacuggagcuacuccggccagagcacccagcucgggaucgaguuccugaagcggggcgacaaguccgucuacuacacgagcaacccgaccaccuuccaccuggacggggaggugaucaccuucgacaaccucaagacgcugcugucccuccgcgaggugcggaccaucaaggucuucaccaccguggacaacaucaaccugcacacgcagguggucgacaugagcaugaccuacgcccagcaguucggccccaccuaccuggacggcgccgacgugaccaagaucaagccccacaacucccacgaggggaagacguucuacgugcucccgaacgacgacacccugcgcgucgaggccuucgaguacuaccacaccaccgaccccagcuuccugggccgguacauguccgcccucaaccacacgaagaaguggaaguacccccaggugaacgggcugaccagcaucaagugggcggacaacaacugcuaccuggccaccgcccuccugacccugcagcagaucgagcucaaguucaaccccccggcccugcaggacgcguacuaccgcgcccgggccggcgaggccgccaacuucugcgcgcugauccucgccuacugcaacaagacggugggggagcugggcgacguccgcgagaccauguccuaccuguuccagcacgccaaccucgacagcugcaagcgggugcugaacgucgugugcaagaccugcggccagcagcagaccacccugaaggggguggaggccgucauguacaugggcacgcucuccuacgagcaguucaagaagggggugcagauccccugcaccugcggcaagcaggccaccaaguaccuggugcagcaggagagccccuucgucaugauguccgcgcccccggcccaguacgagcugaagcacgggaccuucacgugcgccagcgaguacaccggcaacuaccagugcggccacuacaagcacaucaccuccaaggagacccucuacugcaucgacggggcccugcugacgaagagcagcgaguacaagggccccaucaccgacguguucuacaaggagaacuccuacaccaccacgaucaagcccgugaccuacaagcucgacggggucgugugcaccgagaucgaccccaagcuggacaacuacuacaagaaggacaacagcuacuucaccgagcagccgaucgaccuggugcccaaccagcccuaccccaacgccuccuucgacaacuucaaguucgucugcgacaacaucaaguucgcggacgaccucaaccagcugacgggcuacaagaagccggccagccgcgagcugaaggugaccuucuuccccgaccucaacggggacguggucgccaucgacuacaagcacuacacccccuccuucaagaagggcgccaagcugcugcacaagcccaucguguggcacgugaacaacgcgaccaacaaggccacguacaagccgaacaccuggugcauccggugccucuggagcaccaagcccgucgagaccuccaacagcuucgacgugcugaaguccgaggacgcccagggcauggacaaccuggccugcgaggaccucaagcccgugagcgaggaggucguggagaaccccacgauccagaaggacgugcuggagugcaacgucaagaccaccgagguggugggggacaucauccugaagccggccaacaacucccucaagaucaccgaggaggucggccacacggaccugauggcggccuacguggacaacagcucccugaccaucaagaagcccaacgagcucagccgcgugcuggggcugaagacccucgccacccacggccuggccgccgucaacuccgugcccugggacacgaucgcgaacuacgccaagccguuccugaacaagguggucagcaccaccaccaacaucgugacgcgcugccucaaccgggugugcaccaacuacaugcccuacuucuucacccugcugcuccagcugugcaccuucacccgcuccacgaacagccggaucaaggccuccaugcccaccaccaucgccaagaacaccgucaagagcguggggaaguucugccuggaggccagcuucaacuaccucaagucccccaacuucagcaagcugaucaacaucaucaucugguuccugcuccuguccgugugccugggcagccucaucuacuccacggcggcccugggcguccugaugagcaaccucgggaugccguccuacugcaccggcuaccgcgagggguaccugaacagcaccaacgugaccaucgccacguacugcaccggcuccauccccugcagcgugugccuguccggccucgacagccuggacaccuaccccucccuggagaccauccagaucacgaucagcuccuucaagugggaccucaccgccuucgggcuggucgccgagugguuccuggcguacauccucuucacccgguucuucuacgugcugggccuggccgccaucaugcagcucuucuucagcuacuucgccgugcacuucaucuccaacagcuggcugauguggcugaucaucaaccugguccagauggcgcccaucuccgccauggugcgcauguacaucuucuucgccagcuucuacuacguguggaagagcuacguccacgugguggacgggugcaacuccagcaccugcaugaugugcuacaagcggaaccgcgccacgcgggucgagugcaccaccaucgugaacggcguccgccgguccuucuacguguacgccaacgggggcaagggcuucugcaagcuccacaacuggaacugcgugaacugcgacaccuucugcgcggggagcacguucaucuccgacgaggucgcccgcgaccugagccugcaguucaagcggccgaucaaccccaccgaccaguccagcuacaucguggacuccgugaccgucaagaacggcagcauccaccucuacuucgacaaggccgggcagaagaccuacgagcgccacucccugagccacuucgugaaccuggacaaccuccgggccaacaacacgaagggcucccugcccaucaacgugaucgucuucgacgggaagagcaagugcgaggaguccagcgccaaguccgcgagcguguacuacucccagcugaugugccagcccauccuccugcuggaccaggcccucgugagcgacgucggcgacagcgccgagguggccgugaagauguucgacgccuacgucaacaccuucuccagcaccuucaacgugccgauggagaagcugaagacccugguggcgacggccgaggccgagcucgccaagaacgucucccuggacaacgugcuggcgaccuucaucagcgccgcccgccagggcuucguggacuccgacgucgagaccaaggacgugguggagugccucaagcugagccaccaguccgacaucgaggucaccggggacagcugcaacaacuacaugcugacguacaacaagguggagaacaugaccccccgggaccucggcgccugcaucgacugcuccgcccgccacaucaacgcgcagguggccaagagccacaacaucgcccugaucuggaacgucaaggacuucaugucccugagcgagcagcuccggaagcagauccgcuccgccgccaagaagaacaaccugcccuucaagcugaccugcgcgaccacgcgccagguggugaacgucgugaccaccaagaucgcccucaaggggggcuga

SEQ ID NO: 17717 - RNA, 5841 nt, Artificial Sequence
  SARS-CoV-2__MT876607.1__non-structural protein 3 (NSP3) CDS gc
auggcccccaccaaggugaccuucggcgacgacacggucaucgaggugcagggguacaagagcgugaacaucaccuucgagcuggacgagcgcaucgacaagguccucaacgagaagugcuccgccuacaccguggagcugggcaccgaggugaacgaguucgcgugcgucguggccgacgccgugaucaagacgcugcagccggucagcgagcuccugaccccccuggggaucgaccucgacgagugguccauggccaccuacuaccuguucgacgagagcggcgaguucaagcuggccucccacauguacugcagcuucuacccccccgacgaggacgaggaggagggggacugcgaggaggaggaguucgagccguccacccaguacgaguacggcacggaggacgacuaccagggcaagccccucgaguucggggcgaccagcgccgcccugcagcccgaggaggagcaggaggaggacuggcuggacgacgacucccagcagaccgugggccagcaggacgggagcgaggacaaccagaccacgaccauccagaccaucguggagguccagccccagcucgagauggagcugaccccgguggugcagacgaucgaggucaacuccuucagcggcuaccugaagcucaccgacaacguguacaucaagaacgccgacaucguggaggaggcgaagaaggucaagcccaccgugguggucaacgccgccaacguguaccugaagcacgggggcggcguggccggggcccugaacaaggcgaccaacaacgccaugcaggucgaguccgacgacuacaucgccacgaacggcccccucaagguggggggcagcugcguccuguccggccacaaccuggccaagcacugccuccacgugguggggcccaacgucaacaagggcgaggacauccagcugcugaagagcgccuacgagaacuucaaccagcacgaggugcuccuggcgccgcugcucuccgccgggaucuucggcgccgaccccauccacagccugcgggugugcgucgacaccgugcgcaccaacguguaccuggccgucuucgacaagaaccucuacgacaagcugguguccagcuuccuggagaugaagagcgagaagcagguggagcagaagaucgccgagauccccaaggaggaggucaagcccuucaucaccgaguccaagccgagcguggagcagcggaagcaggacgacaagaagaucaaggcgugcguggaggaggucacgaccacccucgaggagaccaaguuccugacggagaaccugcuccuguacaucgacaucaacgggaaccugcaccccgacuccgccacccucgugagcgacaucgacaucaccuuccugaagaaggacgugcccuacaucgucggcgacguggugcaggagggcguccugaccgccguggugauccccacgaagaaggccgggggcaccaccgagaugcucgccaaggcgcugcgcaaggucccgaccgacaacuacaucacgaccuaccccgggcagggccugaacggguacaccguggaggaggccaagaccgugcucaagaagugcaaguccgccuucuacauccugcccagcaucaucuccaacgagaagcaggagauccugggcaccgucagcuggaaccuccgggagaugcuggcccacgcggaggagacgcgcaagcugaugcccgugugcguggagaccaaggccaucgucuccaccauccagcggaaguacaagggcaucaagauccaggagggggugguggacuacggcgcccgcuucuacuucuacaccagcaagacgaccgucgccucccugaucaacacccucaacgaccugaacgagacccuggugacgaugccgcucggguacgugacccacggccugaaccuggaggaggccgcgcgguacaugcgcagccucaagguccccgccaccguguccgugagcucccccgacgccgucaccgccuacaacggguaccugacgagcuccagcaagacccccgaggagcacuucaucgagaccaucucccuggccggcagcuacaaggacuggagcuacuccggccagagcacccagcucgggaucgaguuccugaagcggggcgacaaguccguguacuacacgagcaacccgaccaccuuccaccuggacggggaggugaucaccuucgacaaccucaagacgcugcugucccuccgcgagguccggaccaucaagguguucaccaccguggacaacaucaaccugcacacgcaggucguggacaugagcaugaccuacggccagcaguucggccccaccuaccuggacggggcggacgugaccaagaucaagccccacaacucccacgagggcaagacguucuacguccucccgaacgacgacacccugcgcguggaggccuucgaguacuaccacaccaccgaccccagcuuccuggggcgguacauguccgcccucaaccacacgaagaaguggaaguacccccaggugaacggccugaccagcaucaagugggccgacaacaacugcuaccuggccaccgcgcuccugacccugcagcagaucgagcucaaguucaaccccccggcccugcaggacgccuacuaccgcgcccgggcgggggaggccgccaacuucugcgcccugauccucgccuacugcaacaagacggucggcgagcugggcgacgugcgcgagaccauguccuaccuguuccagcacgcgaaccucgacagcugcaagcggguccugaacguggugugcaagaccugcgggcagcagcagaccacccugaagggcgucgaggccgugauguacauggggacgcucuccuacgagcaguucaagaagggcgugcagauccccugcaccugcgggaagcaggccaccaaguaccugguccagcaggagagccccuucgugaugauguccgcccccccggcccaguacgagcugaagcacggcaccuucacgugcgcgagcgaguacaccggcaacuaccagugcgggcacuacaagcacaucaccuccaaggagacccucuacugcaucgacggcgcccugcugacgaagagcagcgaguacaaggggcccaucaccgacguguucuacaaggagaacuccuacaccaccacgaucaagcccgucaccuacaagcucgacggcguggugugcaccgagaucgaccccaagcuggacaacuacuacaagaaggacaacagcuacuucaccgagcagccgaucgaccugguccccaaccagcccuaccccaacgccuccuucgacaacuucaaguucgugugcgacaacaucaaguucgccgacgaccucaaccagcugacgggguacaagaagccggccagccgcgagcugaaggugaccuucuuccccgaccucaacggcgacgucguggcgaucgacuacaagcacuacacccccuccuucaagaagggcgccaagcugcugcacaagcccaucguguggcacgucaacaacgccaccaacaaggccacguacaagccgaacaccuggugcauccggugccucuggagcaccaagcccguggagaccuccaacagcuucgacgugcugaaguccgaggacgcgcaggggauggacaaccuggccugcgaggaccucaagcccgucagcgaggaggugguggagaaccccacgauccagaaggacguccuggagugcaacgugaagaccaccgagguggucggcgacaucauccugaagccggccaacaacucccucaagaucaccgaggagguggggcacacggaccugauggccgccuacguggacaacagcucccugaccaucaagaagcccaacgagcucagccgcguccugggccugaagacccucgcgacccacgggcuggccgccgugaacuccgugcccugggacacgaucgccaacuacgccaagccguuccugaacaaggucgugagcaccaccaccaacaucgugacgcgcugccucaaccgggucugcaccaacuacaugcccuacuucuucacccugcugcuccagcugugcaccuucacccgcuccacgaacagccggaucaaggcguccaugcccaccaccaucgccaagaacaccgugaagagcgugggcaaguucugccuggaggccagcuucaacuaccucaagucccccaacuucagcaagcugaucaacaucaucaucugguuccugcuccuguccgucugccugggcagccucaucuacuccacggccgcccugggggugcugaugagcaaccucggcaugccguccuacugcaccggguaccgcgagggcuaccugaacagcaccaacgugaccaucgcgacguacugcaccggcuccauccccugcagcgucugccuguccgggcucgacagccuggacaccuaccccucccuggagaccauccagaucacgaucagcuccuucaagugggaccucaccgccuucggccugguggccgagugguuccuggccuacauccucuucacccgguucuucuacgugcuggggcuggccgcgaucaugcagcucuucuucagcuacuucgccguccacuucaucuccaacagcuggcugauguggcugaucaucaaccuggugcagauggcccccaucuccgccauggugcgcauguacaucuucuucgcgagcuucuacuacgucuggaagagcuacgugcacguggucgacggcugcaacuccagcaccugcaugaugugcuacaagcggaaccgcgccacgcggguggagugcaccaccaucgucaacggggugcgccgguccuucuacguguacgccaacggcggcaagggguucugcaagcuccacaacuggaacugcgucaacugcgacaccuucugcgccggcagcacguucaucuccgacgagguggcccgcgaccugagccugcaguucaagcggccgaucaaccccaccgaccaguccagcuacaucguggacuccgucaccgugaagaacgggagcauccaccucuacuucgacaaggcgggccagaagaccuacgagcgccacucccugagccacuucgugaaccuggacaaccuccgggccaacaacacgaaggggucccugcccaucaacgucaucguguucgacggcaagagcaagugcgaggaguccagcgccaaguccgccagcguguacuacucccagcugaugugccagcccauccuccugcuggaccaggcccucgucagcgacgugggcgacagcgcggagguggccgucaagauguucgacgccuacgugaacaccuucuccagcaccuucaacgugccgauggagaagcugaagacccuggucgccacggccgaggcggagcucgccaagaacgugucccuggacaacgugcugagcaccuucaucuccgccgcccgccagggguucgucgacagcgacguggagaccaaggacguggucgagugccucaagcugucccaccagagcgacaucgaggugaccggcgacuccugcaacaacuacaugcugacguacaacaagguggagaacaugaccccccgggaccucggggcgugcaucgacugcagcgcccgccacaucaacgcccaggucgccaagucccacaacaucgcccugaucuggaacgugaaggacuucaugagccuguccgagcagcuccggaagcagauccgcagcgcggccaagaagaacaaccugcccuucaagcugaccugcgccaccacgcgccagguggucaacguggugaccaccaagaucgcccucaagggcggguga

SEQ ID NO: 17718 - RNA, 5841 nt, Artificial Sequence
  SARS-CoV-2__MT877304.1__non-structural protein 3 (NSP3) CDS gc
auggcccccaccaaggugaccuucggcgacgacacggucaucgaggugcagggguacaagagcgugaacaucaccuucgagcuggacgagcgcaucgacaagguccucaacgagaagugcuccgccuacaccguggagcugggcaccgaggugaacgaguucgcgugcgucguggccgacgccgugaucaagacgcugcagccggucagcgagcuccugaccccccuggggaucgaccucgacgagugguccauggccaccuacuaccuguucgacgagagcggcgaguucaagcuggccucccacauguacugcagcuucuacccccccgacgaggacgaggaggagggggacugcgaggaggaggaguucgagccguccacccaguacgaguacggcacggaggacgacuaccagggcaagccccucgaguucggggcgaccagcgccgcccugcagcccgaggaggagcaggaggaggacuggcuggacgacgacucccagcagaccgugggccagcaggacgggagcgaggacaaccagaccacgaccauccagaccaucguggagguccagccccagcucgagauggagcugaccccgguggugcagacgaucgaggucaacuccuucagcggcuaccugaagcucaccgacaacguguacaucaagaacgccgacaucguggaggaggcgaagaaggucaagcccaccgugguggucaacgccgccaacguguaccugaagcacgggggcggcguggccggggcccugaacaaggcgaccaacaacgccaugcaggucgaguccgacgacuacaucgccacgaacggcccccucaagguggggggcagcugcguccuguccggccacaaccuggccaagcacugccuccacgugguggggcccaacgucaacaagggcgaggacauccagcugcugaagagcgccuacgagaacuucaaccagcacgaggugcuccuggcgccgcugcucuccgccgggaucuucggcgccgaccccauccacagccugcgggugugcgucgacaccgugcgcaccaacguguaccuggccgucuucgacaagaaccucuacgacaagcugguguccagcuuccuggagaugaagagcgagaagcagguggagcagaagaucgccgagauccccaaggaggaggucaagcccuucaucaccgaguccaagccgagcguggagcagcggaagcaggacgacaagaagaucaaggcgugcguggaggaggucacgaccacccucgaggagaccaaguuccugacggagaaccugcuccuguacaucgacaucaacgggaaccugcaccccgacuccgccacccucgugagcgacaucgacaucaccuuccugaagaaggacgcccccuacaucgugggcgacgucgugcaggagggcgugcugaccgccgucgugauccccacgaagaaggccgggggcaccaccgagaugcucgcgaaggcccugcgcaaggugccgaccgacaacuacaucacgaccuaccccgggcagggccugaacggguacaccgucgaggaggccaagaccgugcucaagaagugcaaguccgccuucuacauccugcccagcaucaucuccaacgagaagcaggagauccugggcaccgugagcuggaaccuccgggagaugcuggcgcacgccgaggagacgcgcaagcugaugcccgucugcguggagaccaaggccaucguguccaccauccagcggaaguacaagggcaucaagauccaggagggggucguggacuacggcgcccgcuucuacuucuacaccagcaagacgaccguggccucccugaucaacacccucaacgaccugaacgagacccuggucacgaugccgcucggguacgugacccacggccugaaccuggaggaggcggcccgguacaugcgcagccucaaggugcccgccaccgucuccgugagcucccccgacgccgugaccgccuacaacggguaccugacgagcuccagcaagacccccgaggagcacuucaucgagaccaucucccuggcgggcagcuacaaggacuggagcuacuccggccagagcacccagcucgggaucgaguuccugaagcggggcgacaaguccgucuacuacacgagcaacccgaccaccuuccaccuggacggggaggugaucaccuucgacaaccucaagacgcugcugucccuccgcgaggugcggaccaucaaggucuucaccaccguggacaacaucaaccugcacacgcagguggucgacaugagcaugaccuacggccagcaguucggccccaccuaccuggacggggccgacgugaccaagaucaagccccacaacucccacgagggcaagacguucuacgugcucccgaacgacgacacccugcgcgucgaggccuucgaguacuaccacaccaccgaccccagcuuccuggggcgguacauguccgcccucaaccacacgaagaaguggaaguacccccaggugaacggccugaccagcaucaagugggccgacaacaacugcuaccuggcgaccgcccuccugacccugcagcagaucgagcucaaguucaaccccccggcccugcaggacgccuacuaccgcgcgcgggccggggaggccgccaacuucugcgcccugauccucgcguacugcaacaagacggugggcgagcugggcgacguccgcgagaccauguccuaccuguuccagcacgccaaccucgacagcugcaagcgggugcugaacgucgugugcaagaccugcgggcagcagcagaccacccugaagggcguggaggccgucauguacauggggacgcucuccuacgagcaguucaagaagggcgugcagauccccugcaccugcgggaagcaggccaccaaguaccuggugcagcaggagagccccuucgucaugauguccgcccccccggcgcaguacgagcugaagcacggcaccuucacgugcgccagcgaguacaccggcaacuaccagugcgggcacuacaagcacaucaccuccaaggagacccucuacugcaucgacggcgcccugcugacgaagagcagcgaguacaaggggcccaucaccgacguguucuacaaggagaacuccuacaccaccacgaucaagcccgugaccuacaagcucgacggcgucgugugcaccgagaucgaccccaagcuggacaacuacuacaagaaggacaacagcuacuucaccgagcagccgaucgaccuggugcccaaccagcccuaccccaacgccuccuucgacaacuucaaguucgucugcgacaacaucaaguucgccgacgaccucaaccagcugacgggguacaagaagccggcgagccgcgagcugaaggugaccuucuuccccgaccucaacggcgacguggucgccaucgacuacaagcacuacacccccuccuucaagaagggcgccaagcugcugcacaagcccaucguguggcacgugaacaacgccaccaacaaggcgacguacaagccgaacaccuggugcauccggugccucuggagcaccaagcccgucgagaccuccaacagcuucgacgugcugaaguccgaggacgcccaggggauggacaaccuggccugcgaggaccucaagcccgugagcgaggaggucguggagaaccccacgauccagaaggacgugcuggagugcaacgucaagaccaccgagguggugggcgacaucauccugaagccggccaacaacucccucaagaucaccgaggaggucgggcacacggaccugauggccgcguacguggacaacagcucccugaccaucaagaagcccaacgagcucagccgcgugcugggccugaagacccucgccacccacgggcuggccgccgucaacuccgugcccugggacacgaucgccaacuacgcgaagccguuccugaacaagguggucagcaccaccaccaacaucgugacgcgcugccucaaccgggugugcaccaacuacaugcccuacuucuucacccugcugcuccagcugugcaccuucacccgcuccacgaacagccggaucaaggccuccaugcccaccaccaucgccaagaacaccgucaagagcgugggcaaguucugccuggaggccagcuucaacuaccucaagucccccaacuucagcaagcugaucaacaucaucaucugguuccugcuccuguccgugugccugggcagccucaucuacuccacggccgcgcuggggguccugaugagcaaccucggcaugccguccuacugcaccggguaccgcgagggcuaccugaacagcaccaacgugaccaucgccacguacugcaccggcuccauccccugcagcgugugccuguccgggcucgacagccuggacaccuaccccucccuggagaccauccagaucacgaucagcuccuucaagugggaccucaccgccuucggccuggucgccgagugguuccuggccuacauccucuucacccgguucuucuacgugcuggggcuggcggccaucaugcagcucuucuucagcuacuucgccauccacuucaucuccaacagcuggcugauguggcugaucaucaaccuggugcagauggcccccaucuccgcgaugguccgcauguacaucuucuucgccagcuucuacuacguguggaagagcuacgugcacgucguggacggcugcaacuccagcaccugcaugaugugcuacaagcggaaccgcgccacgcggguggagugcaccaccaucgucaacggggugcgccgguccuucuacgucuacgccaacggcggcaagggguucugcaagcuccacaacuggaacugcgugaacugcgacaccuucugcgccggcagcacguucaucuccgacgagguggcgcgcgaccugagccugcaguucaagcggccgaucaaccccaccgaccaguccagcuacaucgucgacuccgugaccgugaagaacgggagcauccaccucuacuucgacaaggccggccagaagaccuacgagcgccacucccugagccacuucgucaaccuggacaaccuccgggccaacaacacgaaggggucccugcccaucaacgugaucguguucgacggcaagagcaagugcgaggaguccagcgccaaguccgccagcgucuacuacucccagcugaugugccagcccauccuccugcuggaccaggcgcucgugagcgacgugggcgacagcgccgaggucgccgugaagauguucgacgccuacgugaacaccuucuccagcaccuucaacgucccgauggagaagcugaagacccugguggccacggcggaggccgagcucgccaagaacgugucccuggacaacguccugagcaccuucaucuccgccgcgcgccagggguucguggacagcgacguggagaccaaggacgucguggagugccucaagcugucccaccagagcgacaucgaggugaccggcgacuccugcaacaacuacaugcugacguacaacaaggucgagaacaugaccccccgggaccucggggccugcaucgacugcagcgcccgccacaucaacgcccagguggccaagucccacaacaucgcgcugaucuggaacgugaaggacuucaugagccuguccgagcagcuccggaagcagauccgcagcgccgccaagaagaacaaccugcccuucaagcugaccugcgccaccacgcgccaggucgugaacguggucaccaccaagaucgcccucaagggcggguga

SEQ ID NO: 17719 - RNA, 5841 nt, Artificial Sequence
  SARS-CoV-2__MT877315.1__non-structural protein 3 (NSP3) CDS gc
auggcccccaccaaggugaccuucggcgacgacacggucaucgaggugcagggguacaagagcgugaacaucaccuucgagcuggacgagcgcaucgacaagguccucaacgagaagugcuccgccuacaccguggagcugggcaccgaggugaacgaguucgcgugcgucguggccgacgccgugaucaagacgcugcagccggucagcgagcuccugaccccccuggggaucgaccucgacgagugguccauggccaccuacuaccuguucgacgagagcggcgaguucaagcuggccucccacauguacugcagcuucuacccccccgacgaggacgaggaggagggggacugcgaggaggaggaguucgagccguccacccaguacgaguacggcacggaggacgacuaccagggcaagccccucgaguucggggcgaccagcgccgcccugcagcccgaggaggagcaggaggaggacuggcuggacgacgacucccagcagaccgugggccagcaggacgggagcgaggacaaccagaccacgaccauccagaccaucguggagguccagccccagcucgagauggagcugaccccgguggugcagacgaucgaggucaacuccuucagcggcuaccugaagcucaccgacaacguguacaucaagaacgccgacaucguggaggaggcgaagaaggucaagcccaccgugguggucaacgccgccaacguguaccugaagcacgggggcggcguggccggggcccugaacaaggcgaccaacaacgccaugcaggucgaguccgacgacuacaucgccacgaacggcccccucaagguggggggcagcugcguccuguccggccacaaccuggccaagcacugccuccacgugguggggcccaacgucaacaagggcgaggacauccagcugcugaagagcgccuacgagaacuucaaccagcacgaggugcuccuggcgccgcugcucuccgccgggaucuucggcgccgaccccauccacagccugcgggugugcgucgacaccgugcgcaccaacguguaccuggccgucuucgacaagaaccucuacgacaagcugguguccagcuuccuggagaugaagagcgagaagcagguggagcagaagaucgccgagauccccaaggaggaggucaagcccuucaucaccgaguccaagccgagcguggagcagcggaagcaggacgacaagaagaucaaggcgugcguggaggaggucacgaccacccucgaggagaccaaguuccugacggagaaccugcuccuguacaucgacaucaacgggaaccugcaccccgacuccgccacccucgugagcgacaucgacaucaccuuccugaagaaggacgcccccuacaucgugggcgacgucgugcaggagggcgugcugaccgccgucgugauccccacgaagaaggccgggggcaccaccgagaugcucgcgaaggcccugcgcaaggugccgaccgacaacuacaucacgaccuaccccgggcagggccugaacggguacaccgucgaggaggccaagaccgugcucaagaagugcaaguccgccuucuacauccugcccagcaucaucuccaacgagaagcaggagauccugggcaccgugagcuggaaccuccgggagaugcuggcgcacgccgaggagacgcgcaagcugaugcccgucugcguggagaccaaggccaucguguccaccauccagcggaaguacaagggcaucaagauccaggagggggucguggacuacggcgcccgcuucuacuucuacaccagcaagacgaccguggccucccugaucaacacccucaacgaccugaacgagacccuggucacgaugccgcucggguacgugacccacggccugaaccuggaggaggcggcccgguacaugcgcagccucaaggugcccgccaccgucuccgugagcucccccgacgccgugaccgccuacaacggguaccugacgagcuccagcaagacccccgaggagcacuucaucgagaccaucucccuggcgggcagcuacaaggacuggagcuacuccggccagagcacccagcucgggaucgaguuccugaagcggggcgacaaguccgucuacuacacgagcaacccgaccaccuuccaccuggacggggaggugaucaccuucgacaaccucaagacgcugcugucccuccgcgaggugcggaccaucaaggucuucaccaccguggacaacaucaaccugcacacgcagguggucgacaugagcaugaccuacggccagcaguucggccccaccuaccuggacggggccgacgugaccaagaucaagccccacaacucccacgagggcaagacguucuacgugcucccgaacgacgacacccugcgcgucgaggccuucgaguacuaccacaccaccgaccccagcuuccuggggcgguacauguccgcccucaaccacacgaagaaguggaaguacccccaggugaacggccugaccagcaucaagugggccgacaacaacugcuaccuggcgaccgcccuccugacccugcagcagaucgagcucaaguucaaccccccggcccugcaggacgccuacuaccgcgcgcgggccggggaggccgccaacuucugcgcccugauccucgcguacugcaacaagacggugggcgagcugggcgacguccgcgagaccauguccuaccuguuccagcacgccaaccucgacagcugcaagcgggugcugaacgucgugugcaagaccugcgggcagcagcagaccacccugaagggcguggaggccgucauguacauggggacgcucuccuacgagcaguucaagaagggcgugcagauccccugcaccugcgggaagcaggccaccaaguaccuggugcagcaggagagccccuucgucaugauguccgcccccccggcgcaguacgagcugaagcacggcaccuucacgugcgccagcgaguacaccggcaacuaccagugcgggcacuacaagcacaucaccuccaaggagacccucuacugcaucgacggcgcccugcugacgaagagcagcgaguacaaggggcccaucaccgacguguucuacaaggagaacuccuacaccaccacgaucaagcccgugaccuacaagcucgacggcgucgugugcaccgagaucgaccccaagcuggacaacuacuacaagaaggacaacagcuacuucaccgagcagccgaucgaccuggugcccaaccagcccuaccccaacgccuccuucgacaacuucaaguucgucugcgacaacaucaaguucgccgacgaccucaaccagcugacgggguacaagaagccggcgagccgcgagcugaaggugaccuucuuccccgaccucaacggcgacguggucgccaucgacuacaagcacuacacccccuccuucaagaagggcgccaagcugcugcacaagcccaucguguggcacgugaacaacgccaccaacaaggcgacguacaagccgaacaccuggugcauccggugccucuggagcaccaagcccgucgagaccuccaacagcuucgacgugcugaaguccgaggacgcccaggggauggacaaccuggccugcgaggaccucaagcccgugagcgaggaggucguggagaaccccacgauccagaaggacgugcuggagugcaacgucaagaccaccgagguggugggcgacaucauccugaagccggccaacaacucccucaagaucaccgaggaggucgggcacacggaccugauggccgcguacguggacaacagcucccugaccaucaagaagcccaacgagcucagccgcgugcugggccugaagacccucgccacccacgggcuggccgccgucaacuccgugcccugggacacgaucgccaacuacgcgaagccguuccugaacaagguggucagcaccaccaccaacaucgugacgcgcugccucaaccgggugugcaccaacuacaugcccuacuucuucacccugcugcuccagcugugcaccuucacccgcuccacgaacagccggaucaaggccuccaugcccaccaccaucgccaagaacaccgucaagagcgccggcaaguucugccuggaggccagcuucaacuaccucaagucccccaacuucagcaagcugaucaacaucaucaucugguuccugcuccuguccgugugccugggcagccucaucuacuccacggcggcccugggggugcugaugagcaaccucggcaugccguccuacugcaccggguaccgcgagggcuaccugaacagcaccaacgucaccaucgccacguacugcaccggcuccauccccugcagcgugugccuguccgggcucgacagccuggacaccuaccccucccuggagaccauccagaucacgaucagcuccuucaagugggaccucaccgccuucggccugguggccgagugguuccuggcguacauccucuucacccgguucuucuacguccuggggcuggccgccaucaugcagcucuucuucagcuacuucgccgugcacuucaucuccaacagcuggcugauguggcugaucaucaaccuggugcagauggcgcccaucuccgccaugguccgcauguacaucuucuucgccagcuucuacuacguguggaagagcuacgugcacgucguggacggcugcaacuccagcaccugcaugaugugcuacaagcggaaccgcgccacgcggguggagugcaccaccaucgucaacggggugcgccgguccuucuacgucuacgccaacggcggcaagggguucugcaagcuccacaacuggaacugcgugaacugcgacaccuucugcgcgggcagcacguucaucuccgacgagguggcccgcgaccugagccugcaguucaagcggccgaucaaccccaccgaccaguccagcuacaucgucgacuccgugaccgugaagaacgggagcauccaccucuacuucgacaaggccggccagaagaccuacgagcgccacucccugagccacuucgucaaccuggacaaccuccgggccaacaacacgaaggggucccugcccaucaacgugaucguguucgacggcaagagcaagugcgaggaguccagcgccaaguccgcgagcgucuacuacucccagcugaugugccagcccauccuccugcuggaccaggcccucgugagcgacgugggcgacagcgccgaggucgccgugaagauguucgacgccuacgugaacaccuucuccagcaccuucaacgucccgauggagaagcugaagacccugguggcgacggccgaggccgagcucgccaagaacgugucccuggacaacguccugagcaccuucaucuccgcggcccgccagggguucguggacagcgacguggagaccaaggacgucguggagugccucaagcugucccaccagagcgacaucgaggugaccggcgacuccugcaacaacuacaugcugacguacaacaaggucgagaacaugaccccccgggaccucggggccugcaucgacugcagcgcccgccacaucaacgcccagguggcgaagucccacaacaucgcccugaucuggaacgugaaggacuucaugagccuguccgagcagcuccggaagcagauccgcagcgccgccaagaagaacaaccugcccuucaagcugaccugcgccaccacgcgccaggucgugaacguggucaccaccaagaucgcgcucaagggcggguga

SEQ ID NO: 17720 - RNA, 5841 nt, Artificial Sequence
  SARS-CoV-2__MT877324.1__non-structural protein 3 (NSP3) CDS gc
auggcccccaccaaggugaccuucggcgacgacacggucaucgaggugcagggguacaagagcgugaacaucaccuucgagcuggacgagcgcaucgacaagguccucaacgagaagugcuccgccuacaccguggagcugggcaccgaggugaacgaguucgcgugcgucguggccgacgccgugaucaagacgcugcagccggucagcgagcuccugaccccccuggggaucgaccucgacgagugguccauggccaccuacuaccuguucgacgagagcggcgaguucaagcuggccucccacauguacugcagcuucuacccccccgacgaggacgaggaggagggggacugcgaggaggaggaguucgagccguccacccaguacgaguacggcacggaggacgacuaccagggcaagccccucgaguucggggcgaccagcgccgcccugcagcccgaggaggagcaggaggaggacuggcuggacgacgacucccagcagaccgugggccagcaggacgggagcgaggacaaccagaccacgaccauccagaccaucguggagguccagccccagcucgagauggagcugaccccgguggugcagacgaucgaggucaacuccuucagcggcuaccugaagcucaccgacaacguguacaucaagaacgccgacaucguggaggaggcgaagaaggucaagcccaccgugguggucaacgccgccaacguguaccugaagcacgggggcggcguggccggggcccugaacaaggcgaccaacaacgccaugcaggucgaguccgacgacuacaucgccacgaacggcccccucaagguggggggcagcugcguccuguccggccacaaccuggccaagcacugccuccacgugguggggcccaacgucaacaagggcgaggacauccagcugcugaagagcgccuacgagaacuucaaccagcacgaggugcuccuggcgccgcugcucuccgccgggaucuucggcgccgaccccauccacagccugcgggugugcgucgacaccgugcgcaccaacguguaccuggccgucuucgacaagaaccucuacgacaagcugguguccagcuuccuggagaugaagagcgagaagcagguggagcagaagaucgccgagauccccaaggaggaggucaagcccuucaucaccgaguccaagccgagcguggagcagcggaagcaggacgacaagaagaucaaggcgugcguggaggaggucacgaccacccucgaggagaccaaguuccugacggagaaccugcuccuguacaucgacaucaacgggaaccugcaccccgacuccgccacccucgugagcgacaucgacaucaccuuccugaagaaggacgcccccuacaucgugggcgacgucgugcaggagggcgugcugaccgccgucgugauccccacgaagaaggccgggggcaccaccgagaugcucgcgaaggcccugcgcaaggugccgaccgacaacuacaucacgaccuaccccgggcagggccugaacggguacaccgucgaggaggccaagaccgugcucaagaagugcaaguccgccuucuacauccugcccagcaucaucuccaacgagaagcaggagauccugggcaccgugagcuggaaccuccgggagaugcuggcgcacgccgaggagacgcgcaagcugaugcccgucugcguggagaccaaggccaucguguccaccauccagcggaaguacaagggcaucaagauccaggagggggucguggacuacggcgcccgcuucuacuucuacaccagcaagacgaccguggccucccugaucaacacccucaacgaccugaacgagacccuggucacgaugccgcucggguacgugacccacggccugaaccuggaggaggcggcccgguacaugcgcagccucaaggugcccgccaccgucuccgugagcucccccgacgccgugaccgccuacaacggguaccugacgagcuccagcaagacccccgaggagcacuucaucgagaccaucucccuggcgggcagcuacaaggacuggagcuacuccggccagagcacccagcucgggaucgaguuccugaagcggggcgacaaguccgucuacuacacgagcaacccgaccaccuuccaccuggacggggaggugaucaccuucgacaaccucaagacgcugcugucccuccgcgaggugcggaccaucaaggucuucaccaccguggacaacaucaaccugcacacgcagguggucgacaugagcaugaccuacggccagcaguucggccccaccuaccuggacggggccgacgugaccaagaucaagccccacaacucccacgagggcaagacguucuacgugcucccgaacgacgacacccugcgcgucgaggccuucgaguacuaccacaccaccgaccccagcuuccuggggcgguacauguccgcccucaaccacacgaagaaguggaaguacccccaggugaacggccugaccagcaucaagugggccgacaacaacugcuaccuggcgaccgcccuccugacccugcagcagaucgagcucaaguucaaccccccggcccugcaggacgccuacuaccgcgcgcgggccggggaggccgccaacuucugcgcccugauccucgcguacugcaacaagacggugggcgagcugggcgacguccgcgagaccauguccuaccuguuccagcacgccaaccucgacagcugcaagcgggugcugaacgucgugugcaagaccugcgggcagcagcagaccacccugaagggcguggaggccgucauguacauggggacgcucuccuacgagcaguucaagaagggcgugcagauccccugcaccugcgggaagcaggccaccaaguaccuggugcagcaggagagccccuucgucaugauguccgcccccccggcgcaguacgagcugaagcacggcaccuucacgugcgccagcgaguacaccggcaacuaccagugcgggcacuacaagcacaucaccuccaaggagacccucuacugcaucgacggcgcccugcugacgaagagcagcgaguacaaggggcccaucaccgacguguucuacaaggagaacuccuacaccaccacgaucaagcccgugaccuacaagcucgacggcgucgugugcaccgagaucgaccccaagcuggacaacuacuacaagaaggacaacagcuacuucaccgagcagccgaucgaccuggugcccaaccagcccuacuccaacgccagcuucgacaacuucaaguucgucugcgacaacaucaaguucgccgacgaccucaaccagcugacgggguacaagaagcccgcgucccgcgagcugaaggugaccuucuucccggaccucaacggcgacguggucgccaucgacuacaagcacuacacccccagcuucaagaagggcgccaagcugcugcacaagcccaucguguggcacgugaacaacgccaccaacaaggcgacguacaagcccaacaccuggugcauccggugccucugguccaccaagccggucgagaccagcaacuccuucgacgugcugaagagcgaggacgcccaggggauggacaaccuggccugcgaggaccucaagcccguguccgaggaggucguggagaaccccacgauccagaaggacgugcuggagugcaacgucaagaccaccgagguggugggcgacaucauccugaagcccgccaacaacagccucaagaucaccgaggaggucgggcacacggaccugauggccgcguacguggacaacuccagccugaccaucaagaagccgaacgagcucucccgcgugcugggccugaagacccucgccacccacgggcuggccgccgucaacagcgugcccugggacacgaucgccaacuacgcgaagcccuuccugaacaagguggucuccaccaccaccaacaucgugacgcgcugccucaaccgggugugcaccaacuacaugccguacuucuucacccugcugcuccagcugugcaccuucacccgcagcacgaacucccggaucaaggccagcaugcccaccaccaucgccaagaacaccgucaagagcgugggcaaguucugccuggaggccuccuucaacuaccucaagagccccaacuucuccaagcugaucaacaucaucaucugguuccugcuccugagcgugugccugggcucccucaucuacagcacggccgcgcuggggguccugauguccaaccucggcaugcccagcuacugcaccggguaccgcgagggcuaccugaacuccaccaacgugaccaucgccacguacugcaccggcagcaucccgugcuccgugugccugagcgggcucgacucccuggacaccuaccccagccuggagaccauccagaucacgaucuccagcuucaagugggaccucaccgccuucggccuggucgccgagugguuccuggccuacauccucuucacccgguucuucuacgugcuggggcuggcggccaucaugcagcucuucuucuccuacuucgccgugcacuucaucagcaacuccuggcugauguggcugaucaucaaccugguccagauggcccccaucagcgcgauggugcgcauguacaucuucuucgccagcuucuacuacguguggaaguccuacguccacgugguggacggcugcaacagcuccaccugcaugaugugcuacaagcggaaccgcgccacgcgggucgagugcaccaccaucgugaacgggguccgccggagcuucuacguguacgccaacggcggcaagggguucugcaagcuccacaacuggaacugcgugaacugcgacaccuucugcgccggcuccacguucaucagcgacgaggucgcgcgcgaccugucccugcaguucaagcggcccaucaacccgaccgaccagagcuccuacaucguggacagcgugaccgucaagaacggguccauccaccucuacuucgacaaggccggccagaagaccuacgagcgccacagccugucccacuucgugaaccuggacaaccuccgggccaacaacacgaaggggagccugcccaucaacgugaucgucuucgacggcaaguccaagugcgaggagagcuccgccaagagcgccuccguguacuacagccagcugaugugccagcccauccuccugcuggaccaggcgcucgugagcgacgucggcgacuccgccgagguggccgugaagauguucgacgccuacgucaacaccuucagcuccaccuucaacgugcccauggagaagcugaagacccugguggccacggcggaggccgagcucgccaagaacgucagccuggacaacgugcuguccaccuucaucagcgccgcgcgccagggguucguggacuccgacgucgagaccaaggacgugguggagugccucaagcugagccaccaguccgacaucgaggucaccggcgacagcugcaacaacuacaugcugacguacaacaagguggagaacaugaccccgcgggaccucggggccugcaucgacugcuccgcccgccacaucaacgcccagguggccaagagccacaacaucgcgcugaucuggaacgucaaggacuucaugucccugagcgagcagcuccggaagcagauccgcuccgccgccaagaagaacaaccugcccuucaagcugaccugcgccaccacgcgccagguggugaacgucgugaccaccaagaucgcccucaagggcggguga

SEQ ID NO: 17721 - RNA, 5841 nt, Artificial Sequence
  SARS-CoV-2__MT877379.1__non-structural protein 3 (NSP3) CDS gc
auggcccccaccaaggugaccuucggcgacgacacggucaucgaggugcagggguacaagagcgugaacaucaccuucgagcuggacgagcgcaucgacaagguccucaacgagaagugcuccgccuacaccguggagcugggcaccgaggugaacgaguucgcgugcgucguggccgacgccgugaucaagacgcugcagccggucagcgagcuccugaccccccuggggaucgaccucgacgagugguccauggccaccuacuaccuguucgacgagagcggcgaguucaagcuggccucccacauguacugcagcuucuacccccccgacgaggacgaggaggagggggacugcgaggaggaggaguucgagccguccacccaguacgaguacggcacggaggacgacuaccagggcaagccccucgaguucggggcgaccagcgccgcccugcagcccgaggaggagcaggaggaggacuggcuggacgacgacucccagcagaccgugggccagcaggacgggagcgaggacaaccagaccacgaccauccagaccaucguggagguccagccccagcucgagauggagcugaccccgguggugcagacgaucgaggucaacuccuucagcggcuaccugaagcucaccgacaacguguacaucaagaacgccgacaucguggaggaggcgaagaaggucaagcccaccgugguggucaacgccgccaacguguaccugaagcacgggggcggcguggccggggcccugaacaaggcgaccaacaacgccaugcaggucgaguccgacgacuacaucgccacgaacggcccccucaagguggggggcagcugcguccuguccggccacaaccuggccaagcacugccuccacgugguggggcccaacgucaacaagggcgaggacauccagcugcugaagagcgccuacgagaacuucaaccagcacgaggugcuccuggcgccgcugcucuccgccgggaucuucggcgccgaccccauccacagccugcgggugugcgucgacaccgugcgcaccaacguguaccuggccgucuucgacaagaaccucuacgacaagcugguguccagcuuccuggacaugaagagcgagaagcagguggagcagaagaucgccgagauccccaaggaggaggucaagcccuucaucaccgaguccaagccgagcguggagcagcggaagcaggacgacaagaagaucaaggcgugcguggaggaggucacgaccacccucgaggagaccaaguuccugacggagaaccugcuccuguacaucgacaucaacgggaaccugcaccccgacuccgccacccucgugagcgacaucgacaucaccuuccugaagaaggacgcccccuacaucgugggcgacgucgugcaggagggcgugcugaccgccgucgugauccccacgaagaaggccgggggcaccaccgagaugcucgcgaaggcccugcgcaaggugccgaccgacaacuacaucacgaccuaccccgggcagggccugaacggguacaccgucgaggaggccaagaccgugcucaagaagugcaaguccgccuucuacauccugcccagcaucaucuccaacgagaagcaggagauccugggcaccgugagcuggaaccuccgggagaugcuggcgcacgccgaggagacgcgcaagcugaugcccgucugcguggagaccaaggccaucguguccaccauccagcggaaguacaagggcaucaagauccaggagggggucguggacuacggcgcccgcuucuacuucuacaccagcaagacgaccguggccucccugaucaacacccucaacgaccugaacgagacccuggucacgaugccgcucggguacgugacccacggccugaaccuggaggaggcggcccgguacaugcgcagccucaaggugcccgccaccgucuccgugagcucccccgacgccgugaccgccuacaacggguaccugacgagcuccagcaagacccccgaggagcacuucaucgagaccaucucccuggcgggcagcuacaaggacuggagcuacuccggccagagcacccagcucgggaucgaguuccugaagcggggcgacaaguccgucuacuacacgagcaacccgaccaccuuccaccuggacggggaggugaucaccuucgacaaccucaagacgcugcugucccuccgcgaggugcggaccaucaaggucuucaccaccguggacaacaucaaccugcacacgcagguggucgacaugagcaugaccuacggccagcaguucggccccaccuaccuggacggggccgacgugaccaagaucaagccccacaacucccacgagggcaagacguucuacgugcucccgaacgacgacacccugcgcgucgaggccuucgaguacuaccacaccaccgaccccagcuuccuggggcgguacauguccgcccucaaccacacgaagaaguggaaguacccccaggugaacggccugaccagcaucaagugggccgacaacaacugcuaccuggcgaccgcccuccugacccugcagcagaucgagcucaaguucaaccccccggcccugcaggacgccuacuaccgcgcgcgggccggggaggccgccaacuucugcgcccugauccucgcguacugcaacaagacggugggcgagcugggcgacguccgcgagaccauguccuaccuguuccagcacgccaaccucgacagcugcaagcgggugcugaacgucgugugcaagaccugcgggcagcagcagaccacccugaagggcguggaggccgucauguacauggggacgcucuccuacgagcaguucaagaagggcgugcagauccccugcaccugcgggaagcaggccaccaaguaccuggugcagcaggagagccccuucgucaugauguccgcccccccggcgcaguacgagcugaagcacggcaccuucacgugcgccagcgaguacaccggcaacuaccagugcgggcacuacaagcacaucaccuccaaggagacccucuacugcaucgacggcgcccugcugacgaagagcagcgaguacaaggggcccaucaccgacguguucuacaaggagaacuccuacaccaccacgaucaagcccgugaccuacaagcucgacggcgucgugugcaccgagaucgaccccaagcuggacaacuacuacaagaaggacaacagcuacuucaccgagcagccgaucgaccuggugcccaaccagcccuaccccaacgccuccuucgacaacuucaaguucgucugcgacaacaucaaguucgccgacgaccucaaccagcugacgggguacaagaagccggcgagccgcgagcugaaggugaccuucuuccccgaccucaacggcgacguggucgccaucgacuacaagcacuacacccccuccuucaagaagggcgccaagcugcugcacaagcccaucguguggcacgugaacaacgccaccaacaaggcgacguacaagccgaacaccuggugcauccggugccucuggagcaccaagcccgucgagaccuccaacagcuucgacgugcugaaguccgaggacgcccaggggauggacaaccuggccugcgaggaccucaagcccgugagcgaggaggucguggagaaccccacgauccagaaggacgugcuggagugcaacgucaagaccaccgagguggugggcgacaucauccugaagccggccaacaaccgccucaagaucaccgaggaggucgggcacacggaccugauggccgcguacguggacaacuccagccugaccaucaagaagcccaacgagcucucccgcgugcugggccugaagacccucgccacccacgggcuggccgccgucaacagcgugcccugggacacgaucgccaacuacgcgaagccguuccugaacaagguggucuccaccaccaccaacaucgugacgcggugccucaaccgcgugugcaccaacuacaugcccuacuucuucacccugcugcuccagcugugcaccuucacccggagcacgaacucccgcaucaaggccagcaugcccaccaccaucgccaagaacaccgucaaguccgugggcaaguucugccuggaggccagcuucaacuaccucaagagccccaacuucuccaagcugaucaacaucaucaucugguuccugcuccugagcgugugccugggcucccucaucuacagcacggccgcgcuggggguccugauguccaaccucggcaugccgagcuacugcaccggguaccgggagggcuaccugaacuccaccaacgugaccaucgccacguacugcaccggcagcauccccugcuccgugugccugagcgggcucgacucccuggacaccuaccccagccuggagaccauccagaucacgaucuccagcuucaagugggaccucaccgccuucggccuggucgccgagugguuccuggccuacauccucuucacccgcuucuucuacgugcuggggcuggcggccaucaugcagcucuucuucuccuacuucgccgugcacuucaucagcaacuccuggcugauguggcugaucaucaaccugguccagauggcccccaucagcgcgauggugcggauguacaucuucuucgccuccuucuacuacguguggaagagcuacguccacgugguggacggcugcaacagcuccaccugcaugaugugcuacaagcgcaaccgggccacgcgcgucgagugcaccaccaucgugaacgggguccggcgcagcuucuacguguacgccaacggcggcaagggguucugcaagcuccacaacuggaacugcgugaacugcgacaccuucugcgccggcuccacguucaucagcgacgaggucgcgcgggaccugucccugcaguucaagcgcccgaucaaccccaccgaccagagcuccuacaucguggacagcgugaccgucaagaacggguccauccaccucuacuucgacaaggccggccagaagaccuacgagcggcacagccugucccacuucgugaaccuggacaaccuccgcgccaacaacacgaaggggagccugcccaucaacgugaucgucuucgacggcaaguccaagugcgaggagagcuccgccaagagcgccuccguguacuacagccagcugaugugccagcccauccuccugcuggaccaggcgcucguguccgacgucggcgacagcgccgagguggccgugaagauguucgacgccuacgucaacaccuucagcuccaccuucaacgugccgauggagaagcugaagacccugguggccacggcggaggccgagcucgccaagaacgucagccuggacaacgugcuguccaccuucaucagcgccgcgcggcagggguucguggacuccgacgucgagaccaaggacgugguggagugccucaagcugagccaccaguccgacaucgaggucaccggcgacagcugcaacaacuacaugcugacguacaacaagguggagaacaugaccccccgcgaccucggggccugcaucgacugcuccgcccggcacaucaacgcccagguggccaagagccacaacaucgcgcugaucuggaacgucaaggacuucaugucccugagcgagcagcuccgcaagcagauccgcuccgccgccaagaagaacaaccugcccuucaagcugaccugcgccaccacgcggcagguggugaacgucgugaccaccaagaucgcccucaagggcggguga

SEQ ID NO: 17722 - RNA, 5841 nt, Artificial Sequence
  SARS-CoV-2__MT877409.1__non-structural protein 3 (NSP3) CDS gc
auggcccccaccaaggugaccuucggcgacgacacggucaucgaggugcagggguacaagagcgugaacaucaccuucgagcuggacgagcgcaucgacaagguccucaacgagaagugcuccgccuacaccguggagcugggcaccgaggugaacgaguucgcgugcgucguggccgacgccgugaucaagacgcugcagccggucagcgagcuccugaccccccuggggaucgaccucgacgagugguccauggccaccuacuaccuguucgacgagagcggcgaguucaagcuggccucccacauguacugcagcuucuacccccccgacgaggacgaggaggagggggacugcgaggaggaggaguucgagccguccacccaguacgaguacggcacggaggacgacuaccagggcaagccccucgaguucggggcgaccagcgccgcccugcagcccgaggaggagcaggaggaggacuggcuggacgacgacucccagcagaccgugggccagcaggacgggagcgaggacaaccagaccacgaccauccagaccaucguggagguccagccccagcucgagauggagcugaccccgguggugcagacgaucgaggucaacuccuucagcggcuaccugaagcucaccgacaacguguacaucaagaacgccgacaucguggaggaggcgaagaaggucaagcccaccgugguggucaacgccgccaacguguaccugaagcacgggggcggcguggccggggcccugaacaaggcgaccaacaacgccaugcaggucgaguccgacgacuacaucgccacgaacggcccccucaagguggggggcagcugcguccuguccggccacaaccuggccaagcacugccuccacgugguggggcccaacgucaacaagggcgaggacauccagcugcugaagagcgccuacgagaacuucaaccagcacgaggugcuccuggcgccgcugcucuccgccgggaucuucggcgccgaccccauccacagccugcgggugugcgucgacaccgugcgcaccaacguguaccuggccgucuucgacaagaaccucuacgacaagcugguguccagcuuccuggagaugaagagcgagaagcagguggagcagaagaucgccgagauccccaaggaggaggucaagcccuucaucaccgaguccaagccgagcguggagcagcggaagcaggacgacaagaagaucaaggcgugcguggaggaggucacgaccacccucgaggagaccaaguuccugacggagaaccugcuccuguacaucgacaucaacgggaaccugcaccccgacuccgccacccucgugagcgacaucgacaucaccuuccugaagaaggacgcccccuacaucgugggcgacgucgugcaggagggcgugcugaccgccgucgugauccccacgaagaaggccgggggcaccaccgagaugcucgcgaaggcccugcgcaaggugccgaccgacaacuacaucacgaccuaccccgggcagggccugaacggguacaccgucgaggaggccaagaccgugcucaagaagugcaaguccgccuucuacauccugcccagcaucaucuccaacgagaagcaggagauccugggcaccgugagcuggaaccuccgggagaugcuggcgcacgccgaggagacgcgcaagcugaugcccgucugcguggagaccaaggccaucguguccaccauccagcggaaguacaagggcaucaagauccaggagggggucguggacuacggcgcccgcuucuacuucuacaccagcaagacgaccguggccucccugaucaacacccucaacgaccugaacgagacccuggucacgaugccgcucggguacgugacccacggccugaaccuggaggaggcggcccgguacaugcgcagccucaaggugcccgccaccgucuccgugagcucccccgacgccgugaccgccuacaacggguaccugacgagcuccagcaagacccccgaggagcacuucaucgagaccaucucccuggcgggcagcuacaaggacuggagcuacuccggccagagcacccagcucgggaucgaguuccugaagcggggcgacaaguccgucuacuacacgagcaacccgaccaccuuccaccuggacggggaggugaucaccuucgacaaccucaagacgcugcugucccuccgcgaggugcggaccaucaaggucuucaccaccguggacaacaucaaccugcacacgcagguggucgacaugagcaugaccuacggccagcaguucggccccaccuaccuggacggggccgacgugaccaagaucaagccccacaacucccacgagggcaagacguucuacgugcucccgaacgacgacacccugcgcgucgaggccuucgaguacuaccacaccaccgaccccagcuuccuggggcgguacauguccgcccucaaccacacgaagaaguggaaguacccccaggugaacggccugaccagcaucaagugggccgacaacaacugcuaccuggcgaccgcccuccugacccugcagcagaucgagcucaaguucaaccccccggcccugcaggacgccuacuaccgcgcgcgggccggggaggccgccaacuucugcgcccugauccucgcguacugcaacaagacggugggcgagcugggcgacguccgcgagaccauguccuaccuguuccagcacgccaaccucgacagcugcaagcgggugcugaacgucgugugcaagaccugcgggcagcagcagaccacccugaagggcguggaggccgucauguacauggggacgcucuccuacgagcaguucaagaagggcgugcagauccccugcaccugcgggaagcaggccaccaaguaccuggugcagcaggagagccccuucgucaugauguccgcccccccggcgcaguacgagcugaagcacggcaccuucacgugcgccagcgaguacaccggcaacuaccagugcgggcacuacaagcacaucaccuccaaggagacccucuacugcaucgacggcgcccugcugacgaagagcagcgaguacaaggggcccaucaccgacguguucuacaaggagaacuccuacaccaccacgaucaagcccgugaccuacaagcucgacggcgucgugugcaccgagaucgaccccaagcuggacaacuacuacaagaaggacaacagcuacuucaccgagcagccgaucgaccuggugcccaaccagcccuaccccaacgccuccuucgacaacuucaaguucgucugcgacaacaucaaguucgccgacgaccucaaccagcugacgggguacaagaagccggcgagccgcgagcugaaggugaccuucuuccccgaccucaacggcgacguggucgccaucgacuacaagcacuacacccccuccuucaagaagggcgccaagcugcugcacaagcccaucguguggcacgugaacaacgccaccaacaaggcgacguacaagccgaacaccuggugcauccggugccucuggagcaccaagcccgucgagaccuccaacagcuucgacgugcugaaguccgaggacgcccaggggauggacaaccuggccugcgaggaccucaagcccgugagcgaggaggucguggagaaccccacgauccagaaggacgugcuggagugcaacgucaagaccaccgagguggugggcgacaucauccugaagccggccaacaaccgccucaagaucaccgaggaggucgggcacacggaccugauggccgcguacguggacaacuccagccugaccaucaagaagcccaacgagcucucccgcgugcugggccugaagacccucgccacccacgggcuggccgccgucaacagcgugcccugggacacgaucgccaacuacgcgaagccguuccugaacaagguggucuccaccaccaccaacaucgugacgcggugccucaaccgcgugugcaccaacuacaugcccuacuucuucacccugcugcuccagcugugcaccuucacccggagcacgaacucccgcaucaaggccagcaugcccaccaccaucgccaagaacaccgucaaguccgugggcaaguucugccuggaggccagcuucaacuaccucaagagccccaacuucuccaagcugaucaacaucaucaucugguuccugcuccugagcgugugccugggcucccucaucuacagcacggccgcgcuggggguccugauguccaaccucggcaugccgagcuacugcaccggguaccgggagggcuaccugaacuccaccaacgugaccaucgccacguacugcaccggcagcauccccugcuccgugugccugagcgggcucgacucccuggacaccuaccccagccuggagaccauccagaucacgaucuccagcuucaagugggaccucaccgccuucggccuggucgccgagugguuccuggccuacauccucuucacccgcuucuucuacgugcuggggcuggcggccaucaugcagcucuucuucuccuacuucgccgugcacuucaucagcaacuccuggcugauguggcugaucaucaaccugguccagauggcccccaucagcgcgauggugcggauguacaucuucuucgccuccuucuacuacguguggaagagcuacguccacgugguggacggcugcaacagcuccaccugcaugaugugcuacaagcgcaaccgggccacgcgcgucgagugcaccaccaucgugaacgggguccggcgcagcuucuacguguacgccaacggcggcaagggguucugcaagcuccacaacuggaacugcguguccugcgacaccuucugcgccggcagcacguucaucuccgacgaggucgcgcgggaccugagccugcaguucaagcgcccgaucaaccccaccgaccaguccagcuacaucguggacuccgugaccgucaagaacgggagcauccaccucuacuucgacaaggccggccagaagaccuacgagcggcacucccugagccacuucgugaaccuggacaaccuccgcgccaacaacacgaaggggucccugcccaucaacgugaucgucuucgacggcaagagcaagugcgaggaguccagcgccaaguccgccagcguguacuacucccagcugaugugccagcccauccuccugcuggaccaggcgcucgugagcgacgucggcgacagcgccgagguggccgugaagauguucgacgccuacgucaacaccuucuccagcaccuucaacgugccgauggagaagcugaagacccugguggccacggcggaggccgagcucgccaagaacgucucccuggacaacgugcugagcaccuucaucuccgccgcgcggcagggguucguggacagcgacgucgagaccaaggacgugguggagugccucaagcugucccaccagagcgacaucgaggucaccggcgacuccugcaacaacuacaugcugacguacaacaagguggagaacaugaccccccgcgaccucggggccugcaucgacugcagcgcccggcacaucaacgcccagguggccaagucccacaacaucgcgcugaucuggaacgucaaggacuucaugagccuguccgagcagcuccgcaagcagauccgcagcgccgccaagaagaacaaccugcccuucaagcugaccugcgccaccacgcggcagguggugaacgucgugaccaccaagaucgcccucaagggcggguga

SEQ ID NO: 17723 - RNA, 5841 nt, Artificial Sequence
  SARS-CoV-2__MT872497.1__non-structural protein 3 (NSP3) CDS gc
auggcccccaccaaggugaccuucggcgacgacacggucaucgaggugcagggguacaagagcgugaacaucaccuucgagcuggacgagcgcaucgacaagguccucaacgagaagugcuccgccuacaccguggagcugggcaccgaggugaacgaguucgcgugcgucguggccgacgccgugaucaagacgcugcagccggucagcgagcuccugaccccccuggggaucgaccucgacgagugguccauggccaccuacuaccuguucgacgagagcggcgaguucaagcuggccucccacauguacugcagcuucuacccccccgacgaggacgaggaggagggggacugcgaggaggaggaguucgagccguccacccaguacgaguacggcacggaggacgacuaccagggcaagccccucgaguucggggcgaccagcgccgcccugcagcccgaggaggagcaggaggaggacuggcuggacgacgacucccagcagaccgugggccagcaggacgggagcgaggacaaccagaccacgaccauccagaccaucguggagguccagccccagcucgagauggagcugaccccgguggugcagacgaucgaggucaacuccuucagcggcuaccugaagcucaccgacaacguguacaucaagaacgccgacaucguggaggaggcgaagaaggucaagcccaccgugguggucaacgccgccaacguguaccugaagcacgggggcggcguggccggggcccugaacaaggcgaccaacaacgccaugcaggucgaguccgacgacuacaucgccacgaacggcccccucaagguggggggcagcugcguccuguccggccacaaccuggccaagcacugccuccacgugguggggcccaacgucaacaagggcgaggacauccagcugcugaagagcgccuacgagaacuucaaccagcacgaggugcuccuggcgccgcugcucuccgccgggaucuucggcgccgaccccauccacagccugcgggugugcgucgacaccgugcgcaccaacguguaccuggccgucuucgacaagaaccucuacgacaagcugguguccagcuuccuggagaugaagagcgagaagcagguggagcagaagaucgccgagauccccaaggaggaggucaagcccuucaucaccgaguccaagccgagcguggagcagcggaagcaggacgacaagaagaucaaggcgugcguggaggaggucacgaccacccucgaggagaccaaguuccugacggagaaccugcuccuguacaucgacaucaacgggaaccugcaccccgacuccgccacccucgugagcgacaucgacaucaccuuccugaagaaggacgcccccuacaucgugggcgacgucgugcaggagggcgugcugaccgccgucgugauccccacgaagaaggccgggggcaccaccgagaugcucgcgaaggcccugcgcaaggugccgaccgacaacuacaucacgaccuaccccgggcagggccugaacggguacaccgucgaggaggccaagaccgugcucaagaagugcaaguccgccuucuacauccugcccagcaucaucuccaacgagaagcaggagauccugggcaccgugagcuggaaccuccgggagaugcuggcgcacgccgaggagacgcgcaagcugaugcccgucugcguggagaccaaguccaucgugagcaccauccagcggaaguacaagggcaucaagauccaggagggggucguggacuacggcgcccgcuucuacuucuacaccuccaagacgaccguggccagccugaucaacacccucaacgaccugaacgagacccuggucacgaugccgcucggguacgugacccacggccugaaccuggaggaggccgcgcgguacaugcgcucccucaaggugcccgccaccgucagcguguccagccccgacgccgugaccgccuacaacggguaccugacguccagcuccaagacccccgaggagcacuucaucgagaccaucagccuggccggcagcuacaaggacugguccuacagcggccaguccacccagcucgggaucgaguuccugaagcggggcgacaagagcgucuacuacacguccaacccgaccaccuuccaccuggacggggaggugaucaccuucgacaaccucaagacgcugcugagccuccgcgaggugcggaccaucaaggucuucaccaccguggacaacaucaaccugcacacgcagguggucgacauguccaugaccuacggccagcaguucggccccaccuaccuggacggggcggacgugaccaagaucaagccccacaacagccacgagggcaagacguucuacgugcucccgaacgacgacacccugcgcgucgaggccuucgaguacuaccacaccaccgaccccuccuuccuggggcgguacaugagcgcccucaaccacacgaagaaguggaaguacccccaggugaacggccugaccuccaucaagugggccgacaacaacugcuaccuggccaccgcgcuccugacccugcagcagaucgagcucaaguucaaccccccggcccugcaggacgccuacuaccgcgcccgggcgggggaggccgccaacuucugcgcccugauccucgccuacugcaacaagacggugggcgagcugggcgacguccgcgagaccaugagcuaccuguuccagcacgcgaaccucgacuccugcaagcgggugcugaacgucgugugcaagaccugcgggcagcagcagaccacccugaagggcguggaggccgucauguacauggggacgcucagcuacgagcaguucaagaagggcgugcagauccccugcaccugcgggaagcaggccaccaaguaccuggugcagcaggagucccccuucgucaugaugagcgcccccccggcccaguacgagcugaagcacggcaccuucacgugcgcguccgaguacaccggcaacuaccagugcgggcacuacaagcacaucaccagcaaggagacccucuacugcaucgacggcgcccugcugacgaagagcuccgaguacaaggggcccaucaccgacguguucuacaaggagaacagcuacaccaccacgaucaagcccgugaccuacaagcucgacggcgucgugugcaccgagaucgaccccaagcuggacaacuacuacaagaaggacaacuccuacuucaccgagcagccgaucgaccuggugcccaaccagcccuaccccaacgccagcuucgacaacuucaaguucgucugcgacaacaucaaguucgccgacgaccucaaccagcugacgggguacaagaagccggccucccgcgagcugaaggugaccuucuuccccgaccucaacggcgacguggucgcgaucgacuacaagcacuacacccccagcuucaagaagggcgccaagcugcugcacaagcccaucguguggcacgugaacaacgccaccaacaaggccacguacaagccgaacaccuggugcauccggugccucugguccaccaagcccgucgagaccagcaacuccuucgacgugcugaagagcgaggacgcgcaggggauggacaaccuggccugcgaggaccucaagcccguguccgaggaggucguggagaaccccacgauccagaaggacgugcuggagugcaacgucaagaccaccgagguggugggcgacaucauccugaagccggccaacaacagccucaagaucaccgaggaggucgggcacacggaccugauggccgccuacguggacaacuccagccugaccaucaagaagcccaacgagcucucccgcgugcugggccugaagacccucgcgacccacgggcuggccgccgucaacagcgugcccugggacacgaucgccaacuacgccaagccguuccugaacaagguggucuccaccaccaccaacaucgugacgcgcugccucaaccgggugugcaccaacuacaugcccuacuucuucacccugcugcuccagcugugcaccuucacccgcagcacgaacucccggaucaaggcgagcaugcccaccaccaucgccaagaacaccgucaagagcgugggcaaguucugccuggaggccuccuucaacuaccucaagagccccaacuucuccaagcugaucaacaucaucaucugguuccugcuccugagcgugugccugggcucccucaucuacagcacggccgcccuggggguccugauguccaaccucggcaugccgagcuacugcaccggguaccgcgagggcuaccugaacuccaccaacgugaccaucgcgacguacugcaccggcagcauccccugcuccgugugccugagcgggcucgacucccuggacaccuaccccagccuggagaccauccagaucacgaucuccagcuucaagugggaccucaccgccuucggccuggucgccgagugguuccuggccuacauccucuucacccgguucuucuacgugcuggggcuggccgcgaucaugcagcucuucuucuccuacuucgccgugcacuucaucagcaacuccuggcugauguggcugaucaucaaccugguccagauggcccccaucagcgccauggugcgcauguacaucuucuucgcgagcuucuacuacguguggaaguccuacguccacgugguggacggcugcaacagcuccaccugcaugaugugcuacaagcggaaccgcgccacgcgggucgagugcaccaccaucgugaacgggguccgccggagcuucuacguguacgccaacggcggcaagggguucugcaagcuccacaacuggaacugcgugaacugcgacaccuucugcgccggcuccacguucaucagcgacgaggucgcccgcgaccugucccugcaguucaagcggccgaucaaccccaccgaccagagcuccuacaucguggacagcgugaccgucaagaacggguccauccaccucuacuucgacaaggcgggccagaagaccuacgagcgccacagccugucccacuucgugaaccuggacaaccuccgggccaacaacacgaaggggagccugcccaucaacgugaucgucuucgacggcaaguccaagugcgaggagagcuccgccaagagcgccuccguguacuacagccagcugaugugccagcccauccuccugcuggaccaggcccucgugagcgacgucggcgacuccgcggagguggccgugaagauguucgacgccuacgucaacaccuucagcuccaccuucaacgugccgauggagaagcugaagacccugguggccacggccgaggcggagcucgccaagaacgucagccuggacaacgugcuguccaccuucaucagcgccgcccgccagggguucguggacuccgacgucgagaccaaggacgugguggagugccucaagcugagccaccaguccgacaucgaggucaccggcgacagcugcaacaacuacaugcugacguacaacaagguggagaacaugaccccccgggaccucggggcgugcaucgacugcuccgcccgccacaucaacgcccagguggccaagagccacaacaucgcccugaucuggaacgucaaggacuucaugucccugagcgagcagcuccggaagcagauccgcuccgcggccaagaagaacaaccugcccuucaagcugaccugcgccaccacgcgccagguggugaacgucgugaccaccaagaucgcccucaagggcggguga

SEQ ID NO: 17724 - RNA, 5841 nt, Artificial Sequence
  SARS-CoV-2__MT873807.1__non-structural protein 3 (NSP3) CDS gc
auggcccccaccaaggugaccuucggcgacgacacggucaucgaggugcagggguacaagagcgugaacaucaccuucgagcuggacgagcgcaucgacaagguccucaacgagaagugcuccgccuacaccguggagcugggcaccgaggugaacgaguucgcgugcgucguggccgacgccgugaucaagacgcugcagccggucagcgagcuccugaccccccuggggaucgaccucgacgagugguccauggccaccuacuaccuguucgacgagagcggcgaguucaagcuggccucccacauguacugcagcuucuacccccccgacgaggacgaggaggagggggacugcgaggaggaggaguucgagccguccacccaguacgaguacggcacggaggacgacuaccagggcaagccccucgaguucggggcgaccagcgccgcccugcagcccgaggaggagcaggaggaggacuggcuggacgacgacucccagcagaccgugggccagcaggacgggagcgaggacaaccagaccacgaccauccagaccaucguggagguccagccccagcucgagauggagcugaccccgguggugcagacgaucgaggucaacuccuucagcggcuaccugaagcucaccgacaacguguacaucaagaacgccgacaucguggaggaggcgaagaaggucaagcccaccgugguggucaacgccgccaacguguaccugaagcacgggggcggcguggccggggcccugaacaaggcgaccaacaacgccaugcaggucgaguccgacgacuacaucgccacgaacggcccccucaagguggggggcagcugcguccuguccggccacaaccuggccaagcacugccuccacgugguggggcccaacgucaacaagggcgaggacauccagcugcugaagagcgccuacgagaacuucaaccagcacgaggugcuccuggcgccgcugcucuccgccgggaucuucggcgccgaccccauccacagccugcgggugugcgucgacaccgugcgcaccaacguguaccuggccgucuucgacaagaaccucuacgacaagcugguguccagcuuccuggagaugaagagcgagaagcagguggagcagaagaucgccgagauccccaaggaggaggucaagcccuucaucaccgaguccaagccgagcguggagcagcggaagcaggacgacaagaagaucaaggcgugcguggaggaggucacgaccacccucgaggagaccaaguuccugacggagaaccugcuccuguacaucgacaucaacgggaaccugcaccccgacuccgccacccucgugagcgacaucgacaucaccuuccugaagaaggacgcccccuacaucgugggcgacgucgugcaggagggcgugcugaccgccgucgugauccccacgaagaaggccgggggcaccaccgagaugcucgcgaaggcccugcgcaaggugccgaccgacaacuacaucacgaccuaccccgggcagggccugaacggguacaccgucgaggaggccaagaccgugcucaagaagugcaaguccgccuucuacauccugcccagcaucaucuccaacgagaagcaggagauccugggcaccgugagcuggaaccuccgggagaugcuggcgcacgccgaggagacgcgcaagcugaugcccgucugcguggagaccaaggccaucguguccaccauccagcggaaguacaagggcaucaagauccaggagggggucguggacuacggcgcccgcuucuacuucuacaccagcaagacgaccguggccucccugaucaacacccucaacgaccugaacgagacccuggucacgaugccgcucggguacgugacccacggccugaaccuggaggaggcggcccgguacaugcgcagccucaaggugcccgccaccgucuccgugagcucccccgacgccgugaccgccuacaacggguaccugacgagcuccagcaagacccccgaggagcacuucaucgagaccaucucccuggcgggcagcuacaaggacuggagcuacuccggccagagcacccagcucgggaucgaguuccugaagcggggcgacaaguccgucuacuacaucagcaacccgacgaccuuccaccuggacggggaggugaucaccuucgacaaccucaagacccugcugucccuccgcgaggugcggacgaucaaggucuucaccaccguggacaacaucaaccugcacacccagguggucgacaugagcaugacguacggccagcaguucggccccaccuaccuggacggggccgacgugaccaagaucaagccccacaacucccacgagggcaagaccuucuacgugcucccgaacgacgacacgcugcgcgucgaggccuucgaguacuaccacaccaccgaccccagcuuccuggggcgguacauguccgcccucaaccacaccaagaaguggaaguacccccaggugaacggccugacgagcaucaagugggccgacaacaacugcuaccuggcgaccgcccuccugacccugcagcagaucgagcucaaguucaaccccccggcccugcaggacgccuacuaccgcgcgcgggccggggaggccgccaacuucugcgcccugauccucgcguacugcaacaagaccgugggcgagcugggcgacguccgcgagacgauguccuaccuguuccagcacgccaaccucgacagcugcaagcgggugcugaacgucgugugcaagaccugcgggcagcagcagaccacccugaagggcguggaggccgucauguacauggggacccucuccuacgagcaguucaagaagggcgugcagauccccugcacgugcgggaagcaggccaccaaguaccuggugcagcaggagagccccuucgucaugauguccgcccccccggcgcaguacgagcugaagcacggcaccuucaccugcgccagcgaguacacgggcaacuaccagugcgggcacuacaagcacaucaccuccaaggagacccucuacugcaucgacggcgcccugcugaccaagagcagcgaguacaaggggcccaucacggacguguucuacaaggagaacuccuacaccaccaccaucaagcccgugacguacaagcucgacggcgucgugugcaccgagaucgaccccaagcuggacaacuacuacaagaaggacaacagcuacuucaccgagcagccgaucgaccuggugcccaaccagcccuaccccaacgccuccuucgacaacuucaaguucgucugcgacaacaucaaguucgccgacgaccucaaccagcugaccggguacaagaagccggcgagccgcgagcugaaggugacguucuuccccgaccucaacggcgacguggucgccaucgacuacaagcacuacacccccuccuucaagaagggcgccaagcugcugcacaagcccaucguguggcacgugaacaacgccaccaacaaggcgaccuacaagccgaacacguggugcauccggugccucuggagcaccaagcccgucgagaccuccaacagcuucgacgugcugaaguccgaggacgcccaggggauggacaaccuggccugcgaggaccucaagcccgugagcgaggaggucguggagaaccccaccauccagaaggacgugcuggagugcaacgucaagacgaccgagguggugggcgacaucauccugaagccggccaacaacucccucaagaucaccgaggaggucgggcacaccgaccugauggccgcguacguggacaacagcucccugacgaucaagaagcccaacgagcucagccgcgugcugggccugaagacccucgccacccacgggcuggccgccgucaacuccgugcccugggacaccaucgccaacuacgcgaagccguuccugaacaagguggucagcacgaccaccaacaucgugacccgcugccucaaccgggugugcacgaacuacaugcccuacuucuucacccugcugcuccagcugugcaccuucacccgcuccaccaacagccggaucaaggccuccaugcccacgaccaucgccaagaacaccgucaagagcgugggcaaguucugccuggaggccagcuucaacuaccucaagucccccaacuucagcaagcugaucaacaucaucaucugguuccugcuccuguccgugugccugggcagccucaucuacuccaccgccgcgcuggggguccugaugagcaaccucggcaugccguccuacugcacgggguaccgcgagggcuaccugaacagcaccaacgugaccaucgccaccuacugcacgggcuccauccccugcagcgugugccuguccgggcucgacagccuggacaccuaccccucccuggagaccauccagaucaccaucagcuccuucaagugggaccucacggccuucggccuggucgccgagugguuccuggccuacauccucuucacccgguucuucuacgugcuggggcuggcggccaucaugcagcucuucuucagcuacuucgccgugcacuucaucuccaacagcuggcugauguggcugaucaucaaccugguccagauggcccccaucuccgcgauggugcgcauguacaucuucuucgccagcuucuacuacguguggaagagcuacguccacgugguggacggcugcaacuccagcaccugcaugaugugcuacaagcggaaccgcgccacccgggucgagugcacgaccaucgugaacgggguccgccgguccuucuacguguacgccaacggcggcaagggguucugcaagcuccacaacuggaacugcgugaacugcgacaccuucugcgccggcagcaccuucaucuccgacgaggucgcgcgcgaccugagccugcaguucaagcggccgaucaaccccacggaccaguccagcuacaucguggacuccgugaccgucaagaacgggagcauccaccucuacuucgacaaggccggccagaagaccuacgagcgccacucccugagccacuucgugaaccuggacaaccuccgggccaacaacaccaaggggucccugcccaucaacgugaucgucuucgacggcaagagcaagugcgaggaguccagcgccaaguccgccagcguguacuacucccagcugaugugccagcccauccuccugcuggaccaggcgcucgugagcgacgucggcgacagcgccgagguggccgugaagauguucgacgccuacgucaacacguucuccagcaccuucaacgugccgauggagaagcugaagacccugguggccaccgcggaggccgagcucgccaagaacgucucccuggacaacgugcugagcacguucaucuccgccgcgcgccagggguucguggacagcgacgucgagaccaaggacgugguggagugccucaagcugucccaccagagcgacaucgaggucaccggcgacuccugcaacaacuacaugcugaccuacaacaagguggagaacaugacgccccgggaccucggggccugcaucgacugcagcgcccgccacaucaacgcccagguggccaagucccacaacaucgcgcugaucuggaacgucaaggacuucaugagccuguccgagcagcuccggaagcagauccgcagcgccgccaagaagaacaaccugcccuucaagcugaccugcgccaccacccgccagguggugaacgucgugacgaccaagaucgcccucaagggcggguga

SEQ ID NO: 17725 - RNA, 5841 nt, Artificial Sequence
  SARS-CoV-2__MT856452.1__non-structural protein 3 (NSP3) CDS gc
auggcccccaccaaggugaccuucggcgacgacacggucaucgaggugcagggguacaagagcgugaacaucaccuucgagcuggacgagcgcaucgacaagguccucaacgagaagugcuccgccuacaccguggagcugggcaccgaggugaacgaguucgcgugcgucguggccgacgccgugaucaagacgcugcagccggucagcgagcuccugaccccccuggggaucgaccucgacgagugguccauggccaccuacuaccuguucgacgagagcggcgaguucaagcuggccucccacauguacugcagcuucuacccccccgacgaggacgaggaggagggggacugcgaggaggaggaguucgagccguccacccaguacgaguacggcacggaggacgacuaccagggcaagccccucgaguucggggcgaccagcgccgcccugcagcccgaggaggagcaggaggaggacuggcuggacgacgacucccagcagaccgugggccagcaggacgggagcgaggacaaccagaccacgaccauccagaccaucguggagguccagccccagcucgagauggagcugaccccgguggugcagacgaucgaggucaacuccuucagcggcuaccugaagcucaccgacaacguguacaucaagaacgccgacaucguggaggaggcgaagaaggucaagcccaccgugguggucaacgccgccaacguguaccugaagcacgggggcggcguggccggggcccugaacaaggcgaccaacaacgccaugcaggucgaguccgacgacuacaucgccacgaacggcccccucaagguggggggcagcugcguccuguccggccacaaccuggccaagcacugccuccacgugguggggcccaacgucaacaagggcgaggacauccagcugcugaagagcgccuacgagaacuucaaccagcacgaggugcuccuggcgccgcugcucuccgccgggaucuucggcgccgaccccauccacagccugcgggugugcgucgacaccgugcgcaccaacguguaccuggccgucuucgacaagaaccucuacgacaagcugguguccagcuuccuggagaugaagagcgagaagcagguggagcagaagaucgccgagauccccaaggaggaggucaagcccuucaucaccgaguccaagccgagcguggagcagcggaagcaggacgacaagaagaucaaggcgugcguggaggaggucacgaccacccucgaggagaccaaguuccugacggagaaccugcuccuguacaucgacaucaacgggaaccugcaccccgacuccgccacccucgugagcgacaucgacaucaccuuccugcgcaaggacgcccccuacaucgugggcgacgucgugcaggagggcgugcugaccgccgucgugauccccacgaagaaggccgggggcaccaccgagaugcucgcgaaggcccugcggaaggugccgaccgacaacuacaucacgaccuaccccgggcagggccugaacggguacaccgucgaggaggccaagaccgugcucaagaagugcaaguccgccuucuacauccugcccagcaucaucuccaacgagaagcaggagauccugggcaccgugagcuggaaccuccgcgagaugcuggcgcacgccgaggagacgcggaagcugaugcccgucugcguggagaccaaggccaucguguccaccauccagcgcaaguacaagggcaucaagauccaggagggggucguggacuacggcgcccgguucuacuucuacaccagcaagacgaccguggccucccugaucaacacccucaacgaccugaacgagacccuggucacgaugccgcucggguacgugacccacggccugaaccuggaggaggcggcccgcuacaugcggagccucaaggugcccgccaccgucuccgugagcucccccgacgccgugaccgccuacaacggguaccugacgagcuccagcaagacccccgaggagcacuucaucgagaccaucucccuggcgggcagcuacaaggacuggagcuacuccggccagagcacccagcucgggaucgaguuccugaagcgcggcgacaaguccgucuacuacacgagcaacccgaccaccuuccaccuggacggggaggugaucaccuucgacaaccucaagacgcugcugucccuccgggaggugcgcaccaucaaggucuucaccaccguggacaacaucaaccugcacacgcagguggucgacaugagcaugaccuacggccagcaguucggccccaccuaccuggacggggccgacgugaccaagaucaagccccacaacucccacgagggcaagacguucuacgugcucccgaacgacgacacccugcgggucgaggccuucgaguacuaccacaccaccgaccccagcuuccuggggcgcuacauguccgcccucaaccacacgaagaaguggaaguacccccaggugaacggccugaccagcaucaagugggccgacaacaacugcuaccuggcgaccgcccuccugacccugcagcagaucgagcucaaguucaaccccccggcccugcaggacgccuacuaccgggcgcgcgccggggaggccgccaacuucugcgcccugauccucgcguacugcaacaagacggugggcgagcugggcgacguccgggagaccauguccuaccuguuccagcacgccaaccucgacagcugcaagcgcgugcugaacgucgugugcaagaccugcgggcagcagcagaccacccugaagggcguggaggccgucauguacauggggacgcucuccuacgagcaguucaagaagggcgugcagauccccugcaccugcgggaagcaggccaccaaguaccuggugcagcaggagagccccuucgucaugauguccgcccccccggcgcaguacgagcugaagcacggcaccuucacgugcgccagcgaguacaccggcaacuaccagugcgggcacuacaagcacaucaccuccaaggagacccucuacugcaucgacggcgcccugcugacgaagagcagcgaguacaaggggcccaucaccgacguguucuacaaggagaacuccuacaccaccacgaucaagcccgugaccuacaagcucgacggcgucgugugcaccgagaucgaccccaagcuggacaacuacuacaagaaggacaacagcuacuucaccgagcagccgaucgaccuggugcccaaccagcccuaccccaacgccuccuucgacaacuucaaguucgucugcgacaacaucaaguucgccgacgaccucaaccagcugacgggguacaagaagccggcgagccgggagcugaaggugaccuucuuccccgaccucaacggcgacguggucgccaucgacuacaagcacuacacccccuccuucaagaagggcgccaagcugcugcacaagcccaucguguggcacgugaacaacgccaccaacaaggcgacguacaagccgaacaccuggugcauccgcugccucuggagcaccaagcccgucgagaccuccaacagcuucgacgugcugaaguccgaggacgcccaggggauggacaaccuggccugcgaggaccucaagcccgugagcgaggaggucguggagaaccccacgauccagaaggacgugcuggagugcaacgucaagaccaccgagguggugggcgacaucauccugaagccggccaacaacucccucaagaucaccgaggaggucgggcacacggaccugauggccgcguacguggacaacagcucccugaccaucaagaagcccaacgagcucagccgcgugcugggccugaagacccucgccacccacgggcuggccgccgucaacuccgugcccugggacacgaucgccaacuacgcgaagccguuccugaacaagguggucagcaccaccaccaacaucgugacgcggugccucaaccgcgugugcaccaacuacaugcccuacuucuucacccugcugcuccagcugugcaccuucacccgguccacgaacagccgcaucaaggccuccaugcccaccaccaucgccaagaacaccgucaagagcgugggcaaguucugccuggaggccagcuucaacuaccucaagucccccaacuucagcaagcugaucaacaucaucaucugguuccugcuccuguccgugugccugggcagccucaucuacuccacggccgcgcuggggguccugaugagcaaccucggcaugccguccuacugcaccggguaccgggagggcuaccugaacagcaccaacgugaccaucgccacguacugcaccggcuccauccccugcagcgugugccuguccgggcucgacagccuggacaccuaccccucccuggagaccauccagaucacgaucagcuccuucaagugggaccucaccgccuucggccuggucgccgagugguuccuggccuacauccucuucacccgcuucuucuacgugcuggggcuggcggccaucaugcagcucuucuucagcuacuucgccgugcacuucaucuccaacagcuggcugauguggcugaucaucaaccugguccagauggcccccaucuccgcgauggugcggauguacaucuucuucgccagcuucuacuacguguggaagagcuacguccacgugguggacggcugcaacuccagcaccugcaugaugugcuacaagcgcaaccgggccacgcgcgucgagugcaccaccaucgugaacgggguccggcgcuccuucuacguguacgccaacggcggcaagggguucugcaagcuccacaacuggaacugcgugaacugcgacaccuucugcgccggcagcacguucaucuccgacgaggucgcgcgggaccugagccugcaguucaagcgcccgaucaaccccaccgaccaguccagcuacaucguggacuccgugaccgucaagaacgggagcauccaccucuacuucgacaaggccggccagaagaccuacgagcggcacucccugagccacuucgugaaccuggacaaccuccgcgccaacaacacgaaggggucccugcccaucaacgugaucgucuucgacggcaagagcaagugcgaggaguccagcgccaaguccgccagcguguacuacucccagcugaugugccagcccauccuccugcuggaccaggcgcucgugagcgacgucggcgacagcgccgagguggccgugaagauguucgacgccuacgucaacaccuucuccagcaccuucaacgugccgauggagaagcugaagacccugguggccacggcggaggccgagcucgccaagaacgucucccuggacaacgugcugagcaccuucaucuccgccgcgcggcagggguucguggacagcgacgucgagaccaaggacgugguggagugccucaagcugucccaccagagcgacaucgaggucaccggcgacuccugcaacaacuacaugcugacguacaacaagguggagaacaugaccccccgcgaccucggggccugcaucgacugcagcgcccggcacaucaacgcccagguggccaagucccacaacaucgcgcugaucuggaacgucaaggacuucaugagccuguccgagcagcuccgcaagcagauccgcagcgccgccaagaagaacaaccugcccuucaagcugaccugcgccaccacgcggcagguggugaacgucgugaccaccaagaucgcccucaagggcggguga

SEQ ID NO: 17726 - RNA, 5841 nt, Artificial Sequence
  SARS-CoV-2__MT856453.1__non-structural protein 3 (NSP3) CDS gc
auggcccccaccaaggugaccuucggcgacgacacggucaucgaggugcagggguacaagagcgugaacaucaccuucgagcuggacgagcgcaucgacaagguccucaacgagaagugcuccgccuacaccguggagcugggcaccgaggugaacgaguucgcgugcgucguggccgacgccgugaucaagacgcugcagccggucagcgagcuccugaccccccuggggaucgaccucgacgagugguccauggccaccuacuaccuguucgacgagagcggcgaguucaagcuggccucccacauguacugcagcuucuacccccccgacgaggacgaggaggagggggacugcgaggaggaggaguucgagccguccacccaguacgaguacggcacggaggacgacuaccagggcaagccccucgaguucggggcgaccagcgccgcccugcagcccgaggaggagcaggaggaggacuggcuggacgacgacucccagcagaccgugggccagcaggacgggagcgaggacaaccagaccacgaccauccagaccaucguggagguccagccccagcucgagauggagcugaccccgguggugcagacgaucgaggucaacuccuucagcggcuaccugaagcucaccgacaacguguacaucaagaacgccgacaucguggaggaggcgaagaaggucaagcccaccgugguggucaacgccgccaacguguaccugaagcacgggggcggcguggccggggcccugaacaaggcgaccaacaacgccaugcaggucgaguccgacgacuacaucgccacgaacggcccccucaagguggggggcagcugcguccuguccggccacaaccuggccaagcacugccuccacgugguggggcccaacgucaacaagggcgaggacauccagcugcugaagagcgccuacgagaacuucaaccagcacgaggugcuccuggcgccgcugcucuccgccgggaucuucggcgccgaccccauccacagccugcgggugugcgucgacaccgugcgcaccaacguguaccuggccgucuucgacaagaaccucuacgacaagcugguguccagcuuccuggagaugaagagcgagaagcagguggagcagaagaucgccgagauccccaaggaggaggucaagcccuucaucaccgaguccaagccgagcguggagcagcggaagcaggacgacaagaagaucaaggcgugcguggaggaggucacgaccacccucgaggagaccaaguuccugacggagaaccugcuccuguacaucgacaucaacgggaaccugcaccccgacuccgccacccucgugagcgacaucgacaucaccuuccugaagaaggacgcccccuacaucgugggcgacgucgugcaggagggcgugcugaccgccgucgugauccccacgaagaaggccgggggcaccaccgagaugcucgcgaaggcccugcgcaaggugccgaccgacaacuacaucacgaccuaccccgggcagggccugaacggguacaccgucgaggaggccaagaccgugcucaagaagugcaaguccgccuucuacauccugcccagcaucaucuccaacgagaagcaggagauccugggcaccgugagcuggaaccuccgggagaugcuggcgcacgccgaggagacgcgcaagcugaugcccgucugcguggagaccaaggccaucguguccaccauccagcggaaguacaagggcaucaagauccaggagggggucguggacuacggcgcccgcuucuacuucuacaccagcaagacgaccguggccucccugaucaacacccucaacgaccugaacgagacccuggucacgaugccgcucggguacgugacccacggccugaaccuggaggaggcggcccgguacaugcgcagccucaaggugcccgccaccgucuccgugagcucccccgacgccgugaccgccuacaacggguaccugacgagcuccagcaagacccccgaggagcacuucaucgagaccaucucccuggcgggcagcuacaaggacuggagcuacuccggccagagcacccagcucgggaucgaguuccugaagcggggcgacaaguccgucuacuacacgagcaacccgaccaccuuccaccuggacggggaggugaucaccuucgacaaccucaagacgcugcugucccuccgcgaggugcggaccaucaaggucuucaccaccguggacaacaucaaccugcacacgcagguggucgacaugagcaugaccuacggccagcaguucggccccaccuaccuggacggggccgacgugaccaagaucaagccccacaacucccacgagggcaagacguucuacgugcucccgaacgacgacacccugcgcgucgaggccuucgaguacuaccacaccaccgaccccagcuuccuggggcgguacauguccgcccucaaccacacgaagaaguggaaguacccccaggugaacggccugaccagcaucaagugggccgacaacaacugcuaccuggcgaccgcccuccugacccugcagcagaucgagcucaaguucaaccccccggcccugcaggacgccuacuaccgcgcgcgggccggggaggccgccaacuucugcgcccugauccucgcguacugcaacaagacggugggcgagcugggcgacguccgcgagaccauguccuaccuguuccagcacgccaaccucgacagcugcaagcgggugcugaacgucgugugcaagaccugcgggcagcagcagaccacccugaagggcguggaggccgucauguacauggggacgcucuccuacgagcaguucaagaagggcgugcagauccccugcaccugcgggaagcaggccaccaaguaccuggugcagcaggagagccccuucgucaugauguccgcccccccggcgcaguacgagcugaagcacggcaccuucacgugcgccagcgaguacaccggcaacuaccagugcgggcacuacaagcacaucaccuccaaggagacccucuacugcaucgacggcgcccugcugacgaagagcagcgaguacaaggggcccaucaccgacguguucuacaaggagaacuccuacaccaccacgaucaagcccgugaccuacaagcucgacggcgucgugugcaccgagaucgaccccaagcuggacaacuacuacaagaaggacaacagcuacuucaccgagcagccgaucgaccuggugcccaaccagcccuaccccaacgccuccuucgacaacuucaaguucgucugcgacaacaucaaguucgccgacgaccucaaccagcugacgggguacaagaagccggcgagccgcgagcugaaggugaccuucuuccccgaccucaacggcgacguggucgccaucgacuacaagcacuacacccccuccuucaagaagggcgccaagcugcugcacaagcccaucguguggcacgugaacaacgccaccaacaaggcgacguacaagccgaacaccuggugcauccggugccucuggagcaccaagcccgucgagaccuccaacagcuucgacgugcugaaguccgaggacgcccaggggauggacaaccuggccugcgaggaccucaagcccgugagcgaggaggucguggagaaccccacgauccagaaggacgugcuggagugcaacgucaagaccaccgagguggugggcgacaucauccugaagccggccaacaacucccucaagaucaccgaggaggucgggcacacggaccugauggccgcguacguggacaacagcucccugaccaucaagaagcccaacgagcucagccgcgugcugggccugaagacccucgccacccacgggcuggccgccgucaacuccgugcccugggacacgaucgccaacuacgcgaagccguuccugaacaagguggucagcaccaccaccaacaucgugacgcgcugccucaaccgggugugcaccaacuacaugcccuacuucuucacccugcugcuccagcugugcaccuucacccgcuccacgaacagccggaucaaggccuccaugcccaccaccaucgccaagaacaccgucaagagcgugggcaaguucugccuggaggccagcuucaacuaccucaagucccccaacuucagcaagcugaucaacaucaucaucugguuccugcuccuguccgugugccugggcagccucaucuacuccacggccgcgcuggggguccugaugagcaaccucggcaugccguccuacugcaccggguaccgcgagggcuaccugaacagcaccaacgugaccaucgccacguacugcaccggcuccauccccugcagcgugugccuguccgggcucgacagccuggacaccuaccccucccuggagaccauccagaucacgaucagcucccucaagugggaccugaccgccuucggccuggucgccgagugguuccucgccuacauccuguucacccgguucuucuacgugcuggggcucgcggccaucaugcagcuguucuucagcuacuucgccgugcacuucaucuccaacagcuggcugauguggcugaucaucaaccucguccagauggcccccaucuccgcgauggugcgcauguacaucuucuucgccagcuucuacuacguguggaagagcuacguccacgugguggacggcugcaacuccagcaccugcaugaugugcuacaagcggaaccgcgccacgcgggucgagugcaccaccaucgugaacgggguccgccgguccuucuacguguacgccaacggcggcaagggguucugcaagcugcacaacuggaacugcgugaacugcgacaccuucugcgccggcagcacguucaucuccgacgaggucgcgcgcgaccugagccuccaguucaagcggccgaucaaccccaccgaccaguccagcuacaucguggacuccgugaccgucaagaacgggagcauccaccuguacuucgacaaggccggccagaagaccuacgagcgccacucccugagccacuucgugaaccucgacaaccugcgggccaacaacacgaaggggucccugcccaucaacgugaucgucuucgacggcaagagcaagugcgaggaguccagcgccaaguccgccagcguguacuacucccagcucaugugccagcccauccugcugcucgaccaggcgcuggugagcgacgucggcgacagcgccgagguggccgugaagauguucgacgccuacgucaacaccuucuccagcaccuucaacgugccgauggagaagcugaagacccucguggccacggcggaggccgagcuggccaagaacgucucccuggacaacgugcucagcaccuucaucuccgccgcgcgccagggguucguggacagcgacgucgagaccaaggacgugguggagugccugaagcugucccaccagagcgacaucgaggucaccggcgacuccugcaacaacuacaugcucacguacaacaagguggagaacaugaccccccgggaccugggggccugcaucgacugcagcgcccgccacaucaacgcccagguggccaagucccacaacaucgcgcugaucuggaacgucaaggacuucaugagccucuccgagcagcugcggaagcagauccgcagcgccgccaagaagaacaaccugcccuucaagcucaccugcgccaccacgcgccagguggugaacgucgugaccaccaagaucgcccugaagggcggguga

SEQ ID NO: 17727 - RNA, 5841 nt, Artificial Sequence
  SARS-CoV-2__MT856456.1__non-structural protein 3 (NSP3) CDS gc
auggcccccaccaaggugaccuucggcgacgacacggucaucgaggugcagggguacaagagcgugaacaucaccuucgagcuggacgagcgcaucgacaagguccucaacgagaagugcuccgccuacaccguggagcugggcaccgagguggacgaguucgcgugcgucguggccgacgccgugaucaagacgcugcagccggucagcgagcuccugaccccccuggggaucgaccucgacgagugguccauggccaccuacuaccuguucgacgagagcggcgaguucaagcuggccucccacauguacugcagcuucuacccccccgacgaggacgaggaggagggggacugcgaggaggaggaguucgagccguccacccaguacgaguacggcacggaggacgacuaccagggcaagccccucgaguucggggcgaccagcgccgcccugcagcccgaggaggagcaggaggaggacuggcuggacgacgacucccagcagaccgugggccagcaggacgggagcgaggacaaccagaccacgaccauccagaccaucguggagguccagccccagcucgagauggagcugaccccgguggugcagacgaucgaggucaacuccuucagcggcuaccugaagcucaccgacaacguguacaucaagaacgccgacaucguggaggaggcgaagaaggucaagcccaccgugguggucaacgccgccaacguguaccugaagcacgggggcggcguggccggggcccugaacaaggcgaccaacaacgccaugcaggucgaguccgacgacuacaucgccacgaacggcccccucaagguggggggcagcugcguccuguccggccacaaccuggccaagcacugccuccacgugguggggcccaacgucaacaagggcgaggacauccagcugcugaagagcgccuacgagaacuucaaccagcacgaggugcuccuggcgccgcugcucuccgccgggaucuucggcgccgaccccauccacagccugcgggugugcgucgacaccgugcgcaccaacguguaccuggccgucuucgacaagaaccucuacgacaagcugguguccagcuuccuggagaugaagagcgagaagcagguggagcagaagaucgccgagauccccaaggaggaggucaagcccuucaucaccgaguccaagccgagcguggagcagcggaagcaggacgacaagaagaucaaggcgugcguggaggaggucacgaccacccucgaggagaccaaguuccugacggagaaccugcuccuguacaucgacaucaacgggaaccugcaccccgacuccgccacccucgugagcgacaucgacaucaccuuccugaagaaggacgcccccuacaucgugggcgacgucgugcaggagggcgugcugaccgccgucgugauccccacgaagaaggccgggggcaccaccgagaugcucgcgaaggcccugcgcaaggugccgaccgacaacuacaucacgaccuaccccgggcagggccugaacggguacaccgucgaggaggccaagaccgugcucaagaagugcaaguccgccuucuacauccugcccagcaucaucuccaacgagaagcaggagauccugggcaccgugagcuggaaccuccgggagaugcuggcgcacgccgaggagacgcgcaagcugaugcccgucugcguggagaccaaggccaucguguccaccauccagcggaaguacaagggcaucaagauccaggagggggucguggacuacggcgcccgcuucuacuucuacaccagcaagacgaccguggccucccugaucaacacccucaacgaccugaacgagacccuggucacgaugccgcucggguacgugacccacggccugaaccuggaggaggcggcccgguacaugcgcagccucaaggugcccgccaccgucuccgugagcucccccgacgccgugaccgccuacaacggguaccugacgagcuccagcaagacccccgaggagcacuucaucgagaccauccugcucgcgggcuccuacaaggacuggagcuacagcggccaguccacccagcuggggaucgaguuccugaagcggggcgacaagagcgucuacuacacguccaacccgaccaccuuccaccucgacggggaggugaucaccuucgacaaccugaagacgcugcucagccugcgcgaggugcggaccaucaaggucuucaccaccguggacaacaucaaccugcacacgcagguggucgacauguccaugaccuacggccagcaguucggccccaccuaccucgacggggccgacgugaccaagaucaagccccacaacagccacgagggcaagacguucuacgugcugccgaacgacgacacccugcgcgucgaggccuucgaguacuaccacaccaccgaccccuccuuccucgggcgguacaugagcgcccugaaccacacgaagaaguggaaguacccccaggugaacggccugaccuccaucaagugggccgacaacaacugcuaccucgcgaccgcccugcugacccuccagcagaucgagcugaaguucaaccccccggcccugcaggacgccuacuaccgcgcgcgggccggggaggccgccaacuucugcgcccucauccuggcguacugcaacaagacggugggcgagcugggcgacguccgcgagaccaugagcuaccucuuccagcacgccaaccuggacuccugcaagcgggugcugaacgucgugugcaagaccugcgggcagcagcagaccacccucaagggcguggaggccgucauguacauggggacgcugagcuacgagcaguucaagaagggcgugcagauccccugcaccugcgggaagcaggccaccaaguaccuggugcagcaggagucccccuucgucaugaugagcgcccccccggcgcaguacgagcucaagcacggcaccuucacgugcgccuccgaguacaccggcaacuaccagugcgggcacuacaagcacaucaccagcaaggagacccuguacugcaucgacggcgcccugcucacgaaguccagcgaguacaaggggcccaucaccgacguguucuacaaggagaacagcuacaccaccacgaucaagcccgugaccuacaagcuggacggcgucgugugcaccgagaucgaccccaagcuggacaacuacuacaagaaggacaacuccuacuucaccgagcagccgaucgaccucgugcccaaccagcccuaccccaacgccagcuucgacaacuucaaguucgucugcgacaacaucaaguucgccgacgaccugaaccagcugacgggguacaagaagccggcgucccgcgagcucaaggugaccuucuuccccgaccugaacggcgacguggucgccaucgacuacaagcacuacacccccagcuucaagaagggcgccaagcugcuccacaagcccaucguguggcacgugaacaacgccaccaacaaggcgacguacaagccgaacaccuggugcauccggugccugugguccaccaagcccgucgagaccagcaacuccuucgacgugcugaagagcgaggacgcccaggggauggacaaccucgccugcgaggaccugaagcccguguccgaggaggucguggagaaccccacgauccagaaggacgugcuggagugcaacgucaagaccaccgagguggugggcgacaucauccucaagccggccaacaacagccugaagaucaccgaggaggucgggcacacggaccugauggccgcguacguggacaacuccagccucaccaucaagaagcccaacgagcugucccgcgugcugggccucaagacccuggccacccacgggcuggccgccgucaacagcgugcccugggacacgaucgccaacuacgcgaagccguuccucaacaagguggucuccaccaccaccaacaucgugacgcgcugccugaaccgggugugcaccaacuacaugcccuacuucuucacccugcuccugcagcugugcaccuucacccgcagcacgaacucccggaucaaggccagcaugcccaccaccaucgccaagaacaccgucaaguccgugggcaaguucugccucgaggccagcuucaacuaccugaagagccccaacuucuccaagcugaucaacaucaucaucugguuccuccugcugagcgugugccucggcucccugaucuacagcacggccgcgcuggggguccucauguccaaccugggcaugccgagcuacugcaccggguaccgcgagggcuaccugaacuccaccaacgugaccaucgccacguacugcaccggcagcauccccugcuccgugugccucagcgggcuggacucccuggacaccuaccccagccucgagaccauccagaucacgaucuccagcuucaagugggaccugaccgccuucggccuggucgccgagugguuccucgccuacauccuguucacccgguucuucuacgugcuggggcucgcggccaucaugcagcuguucuucuccuacuucgccgugcacuucaucagcaacuccuggcugauguggcugaucaucaaccucguccagauggcccccaucagcgcgauggugcgcauguacaucuucuucgccuccuucuacuacguguggaagagcuacguccacgugguggacggcugcaacagcuccaccugcaugaugugcuacaagcggaaccgcgccacgcgggucgagugcaccaccaucgugaacgggguccgccggagcuucuacguguacgccaacggcggcaagggguucugcaagcugcacaacuggaacugcgugaacugcgacaccuucugcgccggcuccacguucaucagcgacgaggucgcgcgcgaccugucccuccaguucaagcggccgaucaaccccaccgaccagagcuccuacaucguggacagcgugaccgucaagaacggguccauccaccuguacuucgacaaggccggccagaagaccuacgagcgccacagccugucccacuucgugaaccucgacaaccugcgggccaacaacacgaaggggagccugcccaucaacgugaucgucuucgacggcaaguccaagugcgaggagagcuccgccaagagcgccuccguguacuacagccagcucaugugccagcccauccugcugcucgaccaggcgcugguguccgacgucggcgacagcgccgagguggccgugaagauguucgacgccuacgucaacaccuucagcuccaccuucaacgugccgauggagaagcugaagacccucguggccacggcggaggccgagcuggccaagaacgucagccuggacaacgugcucuccaccuucaucagcgccgcgcgccagggguucguggacuccgacgucgagaccaaggacgugguggagugccugaagcugagccaccaguccgacaucgaggucaccggcgacagcugcaacaacuacaugcucacguacaacaagguggagaacaugaccccccgggaccugggggccugcaucgacugcuccgcccgccacaucaacgcccagguggccaagagccacaacaucgcgcugaucuggaacgucaaggacuucaugucccucagcgagcagcugcggaagcagauccgcuccgccgccaagaagaacaaccugcccuucaagcucaccugcgccaccacgcgccagguggugaacgucgugaccaccaagaucgcccugaagggcggguga

SEQ ID NO: 17728 - RNA, 5841 nt, Artificial Sequence
  SARS-CoV-2__MT856680.1__non-structural protein 3 (NSP3) CDS gc
auggcccccaccaaggugaccuucggcgacgacacggucaucgaggugcagggguacaagagcgugaacaucaccuucgagcuggacgagcgcaucgacaagguccucaacgagaagugcuccgccuacaccguggagcugggcaccgaggugaacgaguucgcgugcgucguggccgacgccgugaucaagacgcugcagccggucagcgagcuccugaccccccuggggaucgaccucgacgagugguccauggccaccuacuaccuguucgacgagagcggcgaguucaagcuggccucccacauguacugcagcuucuacccccccgacgaggacgaggaggagggggacugcgaggaggaggaguucgagccguccacccaguacgaguacggcacggaggacgacuaccagggcaagccccucgaguucggggcgaccagcgccgcccugcagcccgaggaggagcaggaggaggacuggcuggacgacgacucccagcagaccgugggccagcaggacgggagcgaggacaaccagaccacgaccauccagaccaucguggagguccagccccagcucgagauggagcugaccccgguggugcagacgaucgaggucaacuccuucagcggcuaccugaagcucaccgacaacguguacaucaagaacgccgacaucguggaggaggcgaagaaggucaagcccaccgugguggucaacgccgccaacguguaccugaagcacgggggcggcguggccggggcccugaacaaggcgaccaacaacgccaugcaggucgaguccgacgacuacaucgccacgaacggcccccucaagguggggggcagcugcguccuguccggccacaaccuggccaagcacugccuccacgugguggggcccaacgucaacaagggcgaggacauccagcugcugaagagcgccuacgagaacuucaaccagcacgaggugcuccuggcgccgcugcucuccgccgggaucuucggcgccgaccccauccacagccugcgggugugcgucgacaccgugcgcaccaacguguaccuggccgucuucgacaagaaccucuacgacaagcugguguccagcuuccuggagaugaagagcgagaagcagguggagcagaagaucgccgagauccccaaggaggaggucaagcccuucaucaccgaguccaagccgagcguggagcagcggaagcaggacgacaagaagaucaaggcgugcguggaggaggucacgaccacccucgaggagaccaaguuccugacggagaaccugcuccuguacaucgacaucaacgggaaccugcaccccgacuccgccacccucgugagcgacaucgacaucaccuuccugaagaaggacgcccccuacaucgugggcgacgucgugcaggagggcgugcugaccgccgucgugauccccacgaagaaggccgggggcaccaccgagaugcucgcgaaggcccugcgcaaggugccgaccgacaacuacaucacgaccuaccccgggcagggccugaacggguacaccgucgaggaggccaagaccgugcucaagaagugcaaguccgccuucuacauccugcccagcaucaucuccaacgagaagcaggagauccugggcaccgugagcuggaaccuccgggagaugcuggcgcacgccgaggagacgcgcaagcugaugcccgucugcguggagaccaaggccaucguguccaccauccagcggaaguacaagggcaucaagauccaggagggggucguggacuacggcgcccgcuucuacuucuacaccagcaagacgaccguggccucccugaucaacacccucaacgaccugaacgagacccuggucacgaugccgcucggguacgugacccacggccugaaccuggaggaggcggcccgguacaugcgcagccucaaggugcccgccaccgucuccgugagcucccccgacgccgugaccgccuacaacggguaccugacgagcuccagcaagacccccgaggagcacuucaucgagaccaucucccuggcgggcagcuacaaggacuggagcuacuccggccagagcacccagcucgggaucgaguuccugaagcggggcgacaaguccgucuacuacacgagcaacccgaccaccuuccaccuggacggggaggugaucaccuucgacaaccucaagacgcugcugucccuccgcgaggugcggaccaucaaggucuucaccaccguggacaacaucaaccugcacacgcagguggucgacaugagcaugaccuacggccagcaguucggccccaccuaccuggacggggccgacgugaccaagaucaagccccacaacucccacgagggcaagacguucuacgugcucccgaacgacgacacccugcgcgucgaggccuucgaguacuaccacaccaccgaccccagcuuccuggggcgguacauguccgcccucaaccacacgaagaaguggaaguacccccaggugaacggccugaccagcaucaagugggccgacaacaacugcuaccuggcgaccgcccuccugacccugcagcagaucgagcucaaguucaaccccccggcccugcaggacgccuacuaccgcgcgcgggccggggaggccgccaacuucugcgcccugauccucgcguacugcaacaagacggugggcgagcugggcgacguccgcgagaccauguccuaccuguuccagcacgccaaccucgacagcugcaagcgggugcugaacgucgugugcaagaccugcgggcagcagcagaccacccugaagggcguggaggccgucauguacauggggacgcucuccuacgagcaguucaagaagggcgugcagauccccugcaccugcgggaagcaggccaccaaguaccuggugcagcaggagagccccuucgucaugauguccgcccccccggcgcaguacgagcugaagcacggcaccuucacgugcgccagcgaguacaccggcaacuaccagugcgggcacuacaagcacaucaccuccaaggagacccucuacugcaucgacggcgcccugcugacgaagagcagcgaguacaaggggcccaucaccgacguguucuacaaggagaacuccuacaccaccacgaucaagcccgugaccuacaagcucgacggcgucgugugcaccgagaucgaccccaagcuggacaacuacuacaagaaggacaacagcuacuucaccgagcagccgaucgaccuggugcccaaccagcccuaccccaacgccuccuucgacaacuucaaguucgucugcgacaacaucaaguucgccgacgaccucaaccagcugacgggguacaagaagccggcgagccgcgagcugaaggugaccuucuuccccgaccucaacggcgacguggucgccaucgacuacaagcacuacacccccuccuucaagaagggcgccaagcugcugcacaagcccaucguguggcacgugaacaacgccaccaacaaggcgacguacaagccgaacaccuggugcauccggugccucuggagcaccaagcccgucgagaccuccaacagcuucgacgugcugaaguccgaggacgcccaggggauggacaaccuggccugcgaggaccucaagcccgugagcgaggaggucguggagaaccccacgauccagaaggacgugcuggagugcaacgucaagaccaccgagguggugggcgacaucauccugaagccggccaacaacucccucaagaucaccgaggaggucgggcacacggaccugauggccgcguacguggacaacagcucccugaccaucaagaagcccaacgagcucagccgcgugcugggccugaagacccucgccacccacgggcuggccgccgucaacuccgugcccugggacacgaucgccaacuacgcgaagccguuccugaacaagguggucagcaccaccaccaacaucgugacgcgcugccucaaccgggugugcaccaacuacaugcccuacuucuucacccugcugcuccagcugugcaccuucacccgcuccacgaacagccggaucaaggccuccaugcccaccaccaucgccaagaacaccgucaagagcgugggcaaguucugccuggaggccagcuucaacuaccucaagucccccaacuucagcaagcugaucaacaucaucaucugguuccugcuccuguccgugugccugggcagccucaucuacuccacggccgcgcuggggguccugaugagcaaccucggcaugccguccuacugcaccggguaccgcgagggcuaccugaacagcaccaacgugaccaucgccacguacugcaccggcuccauccccugcagcgugugccuguccgggcucgacagccuggacaccuaccccucccuggagaccauccagaucacgaucagcuccuucaagugggaccucaccgccuucggccuggucgccgagugguuccuggccuacauccucuucacccgguucuucuacgugcuggggcuggcggccaucaugcagcucuucuucagcuacuucgccgugcacuucaucuccaacagcuggcugauguggcugaucaucaaccugguccagauggcccccaucuccgcgauggugcgcauguacaucuucuucgccagcuucuacuacguguggaagagcuacguccacgugguggacggcugcaacuccagcaccugcaugaugugcuacaagcggaaccgcgccacgcgggucgagugcaccaccaucgugaacgggguccgccgguccuucuacguguacgccaacggcggcaagggguucugcaagcuccacaacuggaacugcgugaacugcgacaccuucugcgccggcagcacguucaucuccgacgaggucgcgcgcgaccugagccugcaguucaagcggccgaucaaccccaccgaccaguccagcuacaucguggacuccgugaccgucaagaacgggagcauccaccucuacuucgacaaggccggccagaagaccuacgagcgccacucccugagccacuucgugaaccuggacaaccuccgggccaacaacacgaaggggucccugcccaucaacgugaucgucuucgacggcaagagcaagugcgaggaguccagcgccaaguccgccagcguguacuacucccagcugaugugccagcccauccuccugcuggaccaggcgcucgugagcgacgucggcgacagcgccgagguggccgugaagauguucgacgccuacgucaacaccuucuccagcaccuucaacgugccgaucgagaagcugaagacccugguggccacggcggaggccgagcucgccaagaacgucucccuggacaacgugcugagcaccuucaucuccgccgcgcgccagggguucguggacagcgacgucgagaccaaggacgugguggagugccucaagcugucccaccagagcgacaucgaggucaccggcgacuccugcaacaacuacaugcugacguacaacaagguggagaacaugaccccccgggaccucggggccugcaucgacugcagcgcccgccacaucaacgcccagguggccaagucccacaacaucgcgcugaucuggaacgucaaggacuucaugagccuguccgagcagcuccggaagcagauccgcagcgccgccaagaagaacaaccugcccuucaagcugaccugcgccaccacgcgccagguggugaacgucgugaccaccaagaucgcccucaagggcggguga

SEQ ID NO: 17729 - RNA, 5841 nt, Artificial Sequence
  SARS-CoV-2__MT856685.1__non-structural protein 3 (NSP3) CDS gc
auggcccccaccaaggugaccuucggcgacgacacggucaucgaggugcagggguacaagagcgugaacaucaccuucgagcuggacgagcgcaucgacaagguccucaacgagaagugcuccgccuacaccguggagcugggcaccgaggugaacgaguucgcgugcgucguggccgacgccgugaucaagacgcugcagccggucagcgagcuccugaccccccuggggaucgaccucgacgagugguccauggccaccuacuaccuguucgacgagagcggcgaguucaagcuggccucccacauguacugcagcuucuacccccccgacgaggacgaggaggagggggacugcgaggaggaggaguucgagccguccacccaguacgaguacggcacggaggacgacuaccagggcaagccccucgaguucggggcgaccagcgccgcccugcagcccgaggaggagcaggaggaggacuggcuggacgacgacucccagcagaccgugggccagcaggacgggagcgaggacaaccagaccacgaccauccagaccaucguggagguccagccccagcucgagauggagcugaccccgguggugcagacgaucgaggucaacuccuucagcggcuaccugaagcucaccgacaacguguacaucaagaacgccgacaucguggaggaggcgaagaaggucaagcccaccgugguggucaacgccgccaacguguaccugaagcacgggggcggcguggccggggcccugaacaaggcgaccaacaacgccaugcaggucgaguccgacgacuacaucgccacgaacggcccccucaagguggggggcagcugcguccuguccggccacaaccuggccaagcacugccuccacgugguggggcccaacgucaacaagggcgaggacauccagcugcugaagagcgccuacgagaacuucaaccagcacgaggugcuccuggcgccgcugcucuccgccgggaucuucggcgccgaccccauccacagccugcgggugugcgucgacaccgugcgcaccaacguguaccuggccgucuucgacaagaaccucuacgacaagcugguguccagcuuccuggagaugaagagcgagaagcagguggagcagaagaucgccgagauccccaaggaggaggucaagcccuucaucaccgaguccaagccgagcguggagcagcggaagcaggacgacaagaagaucaaggcgugcguggaggaggucacgaccacccucgaggagaccaaguuccugacggagaaccugcuccuguacaucgacaucaacgggaaccugcaccccgacuccgccacccucgugagcgacaucgacaucaccuuccugaagaaggacgcccccuacaucgugggcgacgucgugcaggagggcgugcugaccgccgucgugauccccacgaagaaggccgggggcaccaccgagaugcucgcgaaggcccugcgcaaggugccgaccgacaacuacaucacgaccuaccccgggcagggccugaacggguacaccgucgaggaggccaagaccgugcucaagaagugcaaguccgccuucuacauccugcccagcaucaucuccaacgagaagcaggagauccugggcaccgugagcuggaaccuccgggagaugcuggcgcacgccgaggagacgcgcaagcugaugcccgucugcguggagaccaaggccaucguguccaccauccagcggaaguacaagggcaucaagauccaggagggggucguggacuacggcgcccgcuucuacuucuacaccagcaagacgaccguggccucccugaucaacacccucaacgaccugaacgagacccuggucacgaugccgcucggguacgugacccacggccugaaccuggaggaggcggcccgguacaugcgcagccucaaggugcccgccaccgucuccgugagcucccccgacgccgugaccgccuacaacggguaccugacgagcuccagcaagacccccgaggagcacuucaucgagaccaucucccuggcgggcagcuacaaggacuggagcuacuccggccagagcacccagcucgggaucgaguuccugaagcggggcgacaaguccgucuacuacacgagcaacccgaccaccuuccaccuggacggggaggugaucaccuucgacaaccucaagacgcugcugucccuccgcgaggugcggaccaucaaggucuucaccaccguggacaacaucaaccugcacacgcagguggucgacaugagcaugaccuacggccagcaguucggccccaccuaccuggacggggccgacgugaccaagaucaagccccacaacucccacgagggcaagacguucuacgugcucccgaacgacgacacccugcgcgucgaggccuucgaguacuaccacaccaccgaccccagcuuccuggggcgguacauguccgcccucaaccacacgaagaaguggaaguacccccaggugaacggccugaccagcaucaagugggccgacaacaacugcuaccuggcgaccgcccuccugacccugcagcagaucgagcucaaguucaaccccccggcccugcaggacgccuacuaccgcgcgcgggccggggaggccgccaacuucugcgcccugauccucgcguacugcaacaagacggugggcgagcugggcgacguccgcgagaccauguccuaccuguuccagcacgccaaccucgacagcugcaagcgggugcugaacgucgugugcaagaccugcgggcagcagcagaccacccugaagggcguggaggccgucauguacauggggacgcucuccuacgagcaguucaagaagggcgugcagauccccugcaccugcgggaagcaggccaccaaguaccuggugcagcaggagagccccuucgucaugauguccgcccccccggcgcaguacgagcugaagcacggcaccuucacgugcgccagcgaguacaccggcaacuaccagugcgggcacuacaagcacaucaccuccaaggagacccucuacugcaucgacggcgcccugcugacgaagagcagcgaguacaaggggcccaucaccgacguguucuacaaggagaacuccuacaccaccacgaucaagcccgugaccuacaagcucgacggcgucgugugcaccgagaucgaccccaagcuggacaacuacuacaagaaggacaacagcuacuucaccgagcagccgaucgaccuggugcccaaccagcccuaccccaacgccuccuucgacaacuucaaguucgucugcgacaacaucaaguucgccgacgaccucaaccagcugacgggguacaagaagccggcgagccgcgagcugaaggugaccuucuuccccgaccucaacggcgacguggucgccaucgacuacaagcacuacacccccuccuucaagaagggcgccaagcugcugcacaagcccaucguguggcacgugaacaacgccaccaacaaggcgacguacaagccgaacaccuggugcauccggugccucuggagcaccaagcccgucgagaccuccaacagcuucgacgugcugaaguccgaggacgcccaggggauggacaaccuggccugcgaggaccucaagcccgugagcgaggaggucguggagaaccccacgauccagaaggacgugcuggagugcaacgucaagaccaccgagguggugggcgacaucauccugaagccggccaacaacucccucaagaucaccgaggaggucgggcacacggaccugauggccgcguacguggacaacagcucccugaccaucaagaagcccaacgagcucagccgcgugcugggccugaagacccucgccacccacgggcuggccgccgucaacuccgugcccugggacacgaucgccaacuacgcgaagcuguuccucaacaagguggucagcaccaccaccaacaucgugacgcgcugccugaaccgggugugcaccaacuacaugccguacuucuucacccugcuccugcagcugugcaccuucacccgcuccacgaacagccggaucaaggccuccaugcccaccaccaucgccaagaacaccgucaagagcgugggcaaguucugccucgaggccagcuucaacuaccugaagucccccaacuucagcaagcugaucaacaucaucaucugguuccuccugcuguccgugugccucggcagccugaucuacuccacggccgcgcuggggguccucaugagcaaccugggcaugcccuccuacugcaccggguaccgcgagggcuaccugaacagcaccaacgugaccaucgccacguacugcaccggcuccaucccgugcagcgugugccucuccgggcuggacagccuggacaccuaccccucccucgagaccauccagaucacgaucagcuccuucaagugggaccugaccgccuucggccuggucgccgagugguuccucgccuacauccuguucacccgguucuucuacgugcuggggcucgcggccaucaugcagcuguucuucagcuacuucgccgugcacuucaucuccaacagcuggcugauguggcugaucaucaaccucguccagauggcccccaucuccgcgauggugcgcauguacaucuucuucgccagcuucuacuacguguggaagagcuacguccacgugguggacggcugcaacuccagcaccugcaugaugugcuacaagcggaaccgcgccacgcgggucgagugcaccaccaucgugaacgggguccgccgguccuucuacguguacgccaacggcggcaagggguucugcaagcugcacaacuggaacugcgugaacugcgacaccuucugcgccggcagcacguucaucuccgacgaggucgcgcgcgaccugagccuccaguucaagcggcccaucaacccgaccgaccaguccagcuacaucguggacuccgugaccgucaagaacgggagcauccaccuguacuucgacaaggccggccagaagaccuacgagcgccacucccugagccacuucgugaaccucgacaaccugcgggccaacaacacgaaggggucccugcccaucaacgugaucgucuucgacggcaagagcaagugcgaggaguccagcgccaaguccgccagcguguacuacucccagcucaugugccagcccauccugcugcucgaccaggcgcuggugagcgacgucggcgacagcgccgagguggccgugaagauguucgacgccuacgucaacaccuucuccagcaccuucaacgugcccauggagaagcugaagacccucguggccacggcggaggccgagcuggccaagaacgucucccuggacaacgugcucagcaccuucaucuccgccgcgcgccagggguucguggacagcgacgucgagaccaaggacgugguggagugccugaagcugucccaccagagcgacaucgaggucaccggcgacuccugcaacaacuacaugcucacguacaacaagguggagaacaugaccccgcgggaccugggggccugcaucgacugcagcgcccgccacaucaacgcccagguggccaagucccacaacaucgcgcugaucuggaacgucaaggacuucaugagccucuccgagcagcugcggaagcagauccgcagcgccgccaagaagaacaaccugcccuucaagcucaccugcgccaccacgcgccagguggugaacgucgugaccaccaagaucgcccugaagggcggguga

SEQ ID NO: 17730 - RNA, 5841 nt, Artificial Sequence
  SARS-CoV-2__MT846005.1__non-structural protein 3 (NSP3) CDS gc
auggcccccaccaaggugaccuucggcgacgacacggucaucgaggugcagggguacaagagcgugaacaucaccuucgagcuggacgagcgcaucgacaagguccucaacgagaagugcuccgccuacaccguggagcugggcaccgaggugaacgaguucgcgugcgucguggccgacgccgugaucaagacgcugcagccggucagcgagcuccugaccccccuggggaucgaccucgacgagugguccauggccaccuacuaccuguucgacgagagcggcgaguucaagcuggccucccacauguacugcagcuucuacccccucgacgaggacgaggaggagggggacugcgaggaggaggaguucgagcccuccacccaguacgaguacggcacggaggacgacuaccagggcaagccgcuggaguucggggcgaccagcgccgcccugcagcccgaggaggagcaggaggaggacuggcucgacgacgacucccagcagaccgugggccagcaggacgggagcgaggacaaccagaccacgaccauccagaccaucguggagguccagccccagcuggagauggagcugacccccguggugcagacgaucgaggucaacuccuucagcggcuaccucaagcugaccgacaacguguacaucaagaacgccgacaucguggaggaggcgaagaaggucaagccgaccgugguggucaacgccgccaacguguaccugaagcacgggggcggcguggccggggcccucaacaaggcgaccaacaacgccaugcaggucgaguccgacgacuacaucgccacgaacggcccccugaagguggggggcagcugcguccuguccggccacaaccucgccaagcacuuccugcacgugguggggcccaacgucaacaagggcgaggacauccagcugcucaagagcgccuacgagaacuucaaccagcacgaggugcugcuggcgccccuccuguccgccgggaucuucggcgccgacccgauccacagccugcgggugugcgucgacaccgugcgcaccaacguguaccucgccgucuucgacaagaaccuguacgacaagcugguguccagcuuccucgagaugaagagcgagaagcagguggagcagaagaucgccgagauccccaaggaggaggucaagcccuucaucaccgaguccaagcccagcguggagcagcggaagcaggacgacaagaagaucaaggcgugcguggaggaggucacgaccacccuggaggagaccaaguuccugacggagaaccuccugcuguacaucgacaucaacgggaaccuccacccggacuccgccacccuggugagcgacaucgacaucaccuuccugaagaaggacgcccccuacaucgugggcgacgucgugcaggagggcgugcucaccgccgucgugauccccacgaagaaggccgggggcaccaccgagaugcuggcgaaggcccugcgcaaggugcccaccgacaacuacaucacgaccuacccggggcagggccucaacggguacaccgucgaggaggccaagaccgugcugaagaagugcaaguccgccuucuacauccugcccagcaucaucuccaacgagaagcaggagauccucggcaccgugagcuggaaccugcgggagaugcuggcgcacgccgaggagacgcgcaagcugaugcccgucugcguggagaccaaggccaucguguccaccauccagcggaaguacaagggcaucaagauccaggagggggucguggacuacggcgcccgcuucuacuucuacaccagcaagacgaccguggccucccucaucaacacccugaacgaccugaacgagacccucgucacgaugccccugggguacgugacccacggccugaaccucgaggaggcggcccgguacaugcgcagccugaaggugccggccaccgucuccgugagcucccccgacgccgugaccgccuacaacggguaccugacgagcuccagcaagacccccgaggagcacuucaucgagaccaucucccucgcgggcagcuacaaggacuggagcuacuccggccagagcacccagcuggggaucgaguuccugaagcggggcgacaaguccgucuacuacacgagcaaccccaccaccuuccaccucgacggggaggugaucaccuucgacaaccugaagacgcugcucucccugcgcgaggugcggaccaucaaggucuucaccaccguggacaacaucaaccugcacacgcagguggucgacaugagcaugaccuacggccagcaguucggcccgaccuaccucgacggggccgacgugaccaagaucaagccccacaacucccacgagggcaagacguucuacgugcugcccaacgacgacacccugcgcgucgaggccuucgaguacuaccacaccaccgacccgagcuuccucgggcgguacauguccgcccugaaccacacgaagaaguggaaguacccccaggugaacggccugaccagcaucaagugggccgacaacaacugcuaccucgcgaccgcccugcugacccuccagcagaucgagcugaaguucaacccccccgcccugcaggacgccuacuaccgcgcgcgggccggggaggccgccaacuucugcgcccucauccuggcguacugcaacaagacggugggcgagcugggcgacguccgcgagaccauguccuaccucuuccagcacgccaaccuggacagcugcaagcgggugcugaacgucgugugcaagaccugcgggcagcagcagaccacccucaagggcguggaggccgucauguacauggggacgcuguccuacgagcaguucaagaagggcgugcagaucccgugcaccugcgggaagcaggccaccaaguaccuggugcagcaggagagccccuucgucaugauguccgccccccccgcgcaguacgagcucaagcacggcaccuucacgugcgccagcgaguacaccggcaacuaccagugcgggcacuacaagcacaucaccuccaaggagacccuguacugcaucgacggcgcccugcucacgaagagcagcgaguacaaggggccgaucaccgacguguucuacaaggagaacuccuacaccaccacgaucaagcccgugaccuacaagcuggacggcgucgugugcaccgagaucgaccccaagcuggacaacuacuacaagaaggacaacagcuacuucaccgagcagcccaucgaccucgugccgaaccagcccuaccccaacgccuccuucgacaacuucaaguucgucugcgacaacaucaaguucgccgacgaccugaaccagcugacgggguacaagaagcccgcgagccgcgagcucaaggugaccuucuucccggaccugaacggcgacguggucgccaucgacuacaagcacuacacccccuccuucaagaagggcgccaagcugcuccacaagcccaucguguggcacgugaacaacgccaccaacaaggcgacguacaagcccaacaccuggugcauccggugccuguggagcaccaagccggucgagaccuccaacagcuucgacgugcugaaguccgaggacgcccaggggauggacaaccucgccugcgaggaccugaagcccgugagcgaggaggucguggagaaccccacgauccagaaggacgugcuggagugcaacgucaagaccaccgagguggugggcgacaucauccucaagcccgccaacaacucccugaagaucaccgaggaggucgggcacacggaccugauggccgcguacguggacaacagcucccucaccaucaagaagccgaacgagcugagccgcgugcugggccucaagacccuggccacccacgggcuggccgccgucaacuccgugcccugggacacgaucgccaacuacgcgaagcccuuccucaacaagguggucagcaccaccaccaacaucgugacgcgcugccugaaccgggugugcaccaacuacaugccguacuucuucacccugcuccugcagcugugcaccuucacccgcuccacgaacagccggaucaaggccuccaugcccaccaccaucgccaagaacaccgucaagagcgugggcaaguucugccucgaggccagcuucaacuaccugaagucccccaacuucagcaagcugaucaacaucaucaucugguuccuccugcuguccgugugccucggcagccugaucuacuccacggccgcgcuggggguccucaugagcaaccugggcaugcccuccuacugcaccggguaccgcgagggcuaccugaacagcaccaacgugaccaucgccacguacugcaccggcuccaucccgugcagcgugugccucuccgggcuggacagccuggacaccuaccccucccucgagaccauccagaucacgaucagcuccuucaagugggaccugaccgccuucggccuggucgccgagugguuccucgccuacauccuguucacccgguucuucuacgugcuggggcucgcggccaucaugcagcuguucuucagcuacuucgccgugcacuucaucuccaacagcuggcugauguggcugaucaucaaccucguccagauggcccccaucuccgcgauggugcgcauguacaucuucuucgccagcuucuacuacguguggaagagcuacguccacgugguggacggcugcaacuccagcaccugcaugaugugcuacaagcggaaccgcgccacgcgggucgagugcaccaccaucgugaacgggguccgccgguccuucuacguguacgccaacggcggcaagggguucugcaagcugcacaacuggaacugcgugaacugcgacaccuucugcgccggcagcacguucaucuccgacgaggucgcgcgcgaccugagccuccaguucaagcggcccaucaacccgaccgaccaguccagcuacaucguggacuccgugaccgucaagaacgggagcauccaccuguacuucgacaaggccggccagaagaccuacgagcgccacucccugagccacuucgugaaccucgacaaccugcgggccaacaacacgaaggggucccugcccaucaacgugaucgucuucgacggcaagagcaagugcgaggaguccagcgccaaguccgccagcguguacuacucccagcucaugugccagcccauccugcugcucgaccaggcgcuggugagcgacgucggcgacagcgccgagguggccgugaagauguucgacgccuacgucaacaccuucuccagcaccuucaacgugcccauggagaagcugaagacccucguggccacggcggaggccgagcuggccaagaacgucucccuggacaacgugcucagcaccuucaucuccgccgcgcgccagggguucguggacagcgacgucgagaccaaggacgugguggagugccugaagcugucccaccagagcgacaucgaggucaccggcgacuccugcaacaacuacaugcucacguacaacaagguggagaacaugaccccgcgggaccugggggccugcaucgacugcagcgcccgccacaucaacgcccagguggccaagucccacaacaucgcgcugaucuggaacgucaaggacuucaugagccucuccgagcagcugcggaagcagauccgcagcgccgccaagaagaacaaccugcccuucaagcucaccugcgccaccacgcgccagguggugaacgucgugaccaccaagaucgcccugaagggcggguga

SEQ ID NO: 17731 - RNA, 5841 nt, Artificial Sequence
  SARS-CoV-2__MT846006.1__non-structural protein 3 (NSP3) CDS gc
auggcccccaccaaggugaccuucggcgacgacacggucaucgaggugcagggguacaagagcgugaacaucaccuucgagcuggacgagcgcaucgacaagguccucaacgagaagugcuccgccuacaccguggagcugggcaccgaggugaacgaguucgcgugcgucguggccgacgccgugaucaagacgcugcagccggucagcgagcuccugaccccccuggggaucgaccucgacgagugguccauggccaccuacuaccuguucgacgagagcggcgaguucaagcuggccucccacauguacugcagcuucuacccccccgacgaggacgaggaggagggggacugcgaggaggaggaguucgagccguccacccaguacgaguacggcacggaggacgacuaccagggcaagccccucgaguucggggcgaccagcgccgcccugcagcccgaggaggagcaggaggaggacuggcuggacgacgacucccagcagaccgugggccagcaggacgggagcgaggacaaccagaccacgaccauccagaccaucguggagguccagccccagcucgagauggagcugaccccgguggugcagacgaucgaggucaacuccuucagcggcuaccugaagcucaccgacaacguguacaucaagaacgccgacaucguggaggaggcgaagaaggucaagcccaccgugguggucaacgccgccaacguguaccugaagcacgggggcggcguggccggggcccugaacaaggcgaccaacaacgccaugcaggucgaguccgacgacuacaucgccacgaacggcccccucaagguggggggcagcugcguccuguccggccacaaccuggccaagcacugccuccacgugguggggcccaacgucaacaagggcgaggacauccagcugcugaagagcgccuacgagaacuucaaccagcacgaggugcuccuggcgccgcugcucuccgccgggaucuucggcgccgaccccauccacagccugcgggugugcgucgacaccgugcgcaccaacguguaccuggccgucuucgacaagaaccucuacgacaagcugguguccagcuuccuggagaugaagagcgagaagcagguggagcagaagaucgccgagauccccaaggaggaggucaagcccuucaucaccgaguccaagccgagcguggagcagcggaagcaggacgacaagaagaucaaggcgugcguggaggaggucacgaccacccucgaggagaccaaguuccugacggagaaccugcuccuguacaucgacaucaacgggaaccugcaccccgacuccgccacccucgugagcgacaucgacaucaccuuccugaagaaggacgcccccuacaucgugggcgacgucgugcaggagggcgugcugaccgccgucgugauccccacgaagaaggccgggggcaccaccgagaugcucgcgaaggcccugcgcaaggugccgaccgacaacuacaucacgaccuaccccgggcagggccugaacggguacaccgucgaggaggccaagaccgugcucaagaagugcaaguccgccuucuacauccugcccagcaucaucuccaacgagaagcaggagauccugggcaccgugagcuggaaccuccgggagaugcuggcgcacgccgaggagacgcgcaagcugaugcccgucugcguggagaccaaggccaucguguccaccauccagcggaaguacaagggcaucaagauccaggagggggucguggacuacggcgcccgcuucuacuucuacaccagcaagacgaccguggccucccugaucaacacccucaacgaccugaacgagacccuggucacgaugccgcucggguacgugacccacggccugaaccuggaggaggcggcccgguacaugcgcagccucaaggugcccgccaccgucuccgugagcucccccgacgccgugaccgccuacaacggguaccugacgagcuccagcaagacccccgaggagcacuucaucgagaccaucucccuggcgggcagcuacaaggacuggagcuacuccggccagagcacccagcucgggaucgaguuccugaagcggggcgacaaguccgucuacuacacgagcaacccgaccaccuuccaccuggacggggaggugaucaccuucgacaaccucaagacgcugcugucccuccgcgaggugcggaccaucaaggucuucaccaccguggacaacaucaaccugcacacgcagguggucgacaugagcaugaccuacggccagcaguucggccccaccuaccuggacggggccgacgugaccaagaucaagccccacaacucccacgagggcaagacguucuacgugcucccgaacgacgacacccugcgcgucgaggccuucgaguacuaccacaccaccgaccccagcuuccuggggcgguacauguccgcccucaaccacacgaagaaguggaaguacccccaggugaacggccugaccagcaucaagugggccgacaacaacugcuaccuggcgaccgcccuccugacccugcagcagaucgagcucaaguucaaccccccggcccugcaggacgccuacuaccgcgcgcgggccggggaggccgccaacuucugcgcccugauccucgcguacugcaacaagacggugggcgagcugggcgacguccgcgagaccauguccuaccuguuccagcacgccaaccucgacagcugcaagcgggugcugaacgucgugugcaagaccugcgggcagcagcagaccacccugaagggcguggaggccgucauguacauggggacgcucuccuacgagcaguucaagaagggcgugcagauccccugcaccugcgggaagcaggccaccaaguaccuggugcagcaggagagccccuucgucaugauguccgcccccccggcgcaguacgagcugaagcacggcaccuucacgugcgccagcgaguacaccggcaacuaccagugcgggcacuacaagcacaucaccuccaaggagacccucuacugcaucgacggcgcccugcugacgaagagcagcgaguacaaggggcccaucaccgacguguucuacaaggagaacuccuacaccaccacgaucaagcccgugaccuacaagcucgacggcgucgugugcaccgagaucgaccccaagcuggacaacuacuacaagaaggacaacagcuacuucaccgagcagccgaucgaccuggugcccaaccagcccuaccccaacgccuccuucgacaacuucaaguucgucugcgacaacaucaaguucgccgacgaccucaaccagcugacgggguacaagaagccggcgagccgcgagcugaaggugaccuucuuccccgaccucaacggcgacguggucgccaucgacuacaagcacuacacccccuccuucaagaagggcgccaagcugcugcacaagcccaucguguggcacgugaacaacgccaccaacaaggcgacguacaagccgaacaccuggugcauccggugccucuggagcaccaagcccgucgagaccuccaacagcuucgacgugcugaaguccgaggacgcccaggggauggacaaccuggccugcgaggaccucaagcccgugagcgaggaggucguggagaaccccacgauccagaaggacgugcuggagugcaacgucaagaccaccgagguggugggcgacaucauccugaagccggccaacaacucccucaagaucaccgaggaggucgggcacacggaccugauggccgcguacguggacaacagcucccugaccaucaagaagcccaacgagcucagccgcgugcugggccugaagacccucgccacccacgggcuggccgccgucaacuccgugcccugggacacgaucgccaacuacgcgaagccguuccugaacaagguggucagcaccaccaccaacaucgugacgcgcugccucaaccgggugugcaccaacuacaugcccuacuucuucacccugcugcuccagcugugcaccuucacccgcuccacgaacagccggaucaaggccuccaugcccaccaccaucgccaagaacaccgucaagagcgugggcaaguucugccuggaggccagcuucaacuaccucaagucccccaacuucagcaagcugaucaacaucaucaucugguuccugcuccuguccgugugccugggcagccucaucuacuccacggccgcgcuggggguccugaugagcaaccucggcaugccguccuacugcaccggguaccgcgagggcuaccugaacagcaccaacgugaccaucgccacguacugcaccggcuccauccccugcagcgugugccuguccgggcucgacagccuggacaccuaccccucccuggagaccauccagaucacgaucagcuccuucaagugggaccucaccgccuucggccuggucgccgagugguuccuggccuacauccucuucacccgguucuucuacgugcuggggcuggcggccaucaugcagcucuucuucagcuacuucgccgugcacuucaucuccaacagcuggcugauguggcugaucaucaaccugguccagauggcccccaucuccgcgauggugcgcauguacaucuucuucgccagcuucuacuacguguggaagagcuacguccacgugguggacggcugcaacuccagcaccugcaugaugugcuacaagcggaaccgcgccacgcgggucgagugcaccaccaucgugaacgggguccgccgguccuucuacguguacgccaacggcggcaagggguucugcaagcuccacaacuggaacugcgugaacugcgacaccuucugcgccggcagcacguucaucuccgacgaggucgcgcgcgaccugagccugcaguucaagcggccgaucaaccccaccgaccaguccagcuacaucguggacuccgugaccgucaagaacgggagcauccaccucuacuucgacaaggccggccagaagaccuacgagcgccacucccugagccacuucgugaaccuggacaaccuccgggccaacaacacgaaggggucccugcccaucaacgugaucgucuucgacggcaagagcaagugcgaggaguccagcgccaaguccgccagcguguacuacucccagcugaugugccagcccauccuccugcuggaccaggcgcucgugagcgacgucggcgacagcgccgagguggccgugaagauguucgacgccuacgucaacaccuucuccagcaccuucaacgugccgauggagaagcugaagacccugguggccacggcggaggccgagcucgccaagaacgucucccuggacaacgugcugagcaccuucaucuccgccgcgcgccagggguucguggacagcgacgucgagaccaaggacgugguggagugccucaagcugucccaccagagcgacaucgaggucaccggcgacuccugcaacaacuacaugcugacguacaacaagguggagaacaugaccccccgggaccucggggccugcaucgacugcagcgcccgccacaucaacgcccagguggccaagucccacaacaucgcgcugaucuggaacgucaaggacuucaugagccuguccgagcagcuccggaagcagauccgcagcgccgccaagaagaacaaccugcccuucaagcugaccugcgccaccacgcgccagguggugaacgucgugaccaccaagguggcccucaagggcggguga

SEQ ID NO: 17732 - RNA, 5841 nt, Artificial Sequence
  SARS-CoV-2__MT846012.1__non-structural protein 3 (NSP3) CDS gc
auggcccccaccaaggugaccuucggcgacgacacggucaucgaggugcagggguacaagagcgugaacaucaccuucgagcuggacgagcgcaucgacaagguccucaacgagaagugcuccgccuacaccguggagcugggcaccgaggugaacgaguucgcgugcgucguggccgacgccgugaucaagacgcugcagccggucagcgagcuccugaccccccuggggaucgaccucgacgagugguccauggccaccuacuaccuguucgacgagagcggcgaguucaagcuggccucccacauguacugcagcuucuacccccccgacgaggacgaggaggagggggacugcgaggaggaggaguucgagccguccacccaguacgaguacggcacggaggacgacuaccagggcaagccccucgaguucggggcgaccagcgccgcccugcagcuggaggaggagcaggaggaggacuggcucgacgacgacucccagcagaccgugggccagcaggacgggagcgaggacaaccacaccacgaccauccagaccaucguggagguccagccccagcuggagauggagcugacccccguggugcagacgaucgaggucaacuccuucagcggcuaccucaagcugaccgacaacguguacaucaagaacgccgacaucguggaggaggcgaagaaggucaagccgaccgugguggucaacgccgccaacguguaccugaagcacgggggcggcguggccggggcccucaacaaggcgaccaacaacgccaugcaggucgaguccgacgacuacaucgccacgaacggcccccugaagguggggggcagcugcguccuguccggccacaaccucgccaagcacugccugcacgugguggggcccaacgucaacaagggcgaggacauccagcugcucaagagcgccuacgagaacuucaaccagcacgaggugcugcuggcgccccuccuguccgccgggaucuucggcgccgacccgauccacagccugcgggugugcgucgacaccgugcgcaccaacguguaccucgccgucuucgacaagaaccuguacgacaagcugguguccagcuuccucgagaugaagagcgagaagcagguggagcagaagaucgccgagauccccaaggaggaggucaagcccuucaucaccgaguccaagcccagcguggagcagcggaagcaggacgacaagaagaucaaggcgugcguggaggaggucacgaccacccuggaggagaccaaguuccugacggagaaccuccugcuguacaucgacaucaacgggaaccuccacccggacuccgccacccuggugagcgacaucgacaucaccuuccugaagaaggacgcccccuacaucgugggcgacgucgugcaggagggcgugcucaccgccgucgugauccccacgaagaaggccgggggcaccaccgagaugcuggcgaaggcccugcgcaaggugcccaccgacaacuacaucacgaccuacccggggcagggccucaacggguacaccgucgaggaggccaagaccgugcugaagaagugcaaguccgccuucuacauccugcccagcaucaucuccaacgagaagcaggagauccucggcaccgugagcuggaaccugcgggagaugcuggcgcacgccgaggagacgcgcaagcugaugcccgucugcguggagaccaaggccaucguguccaccauccagcggaaguacaagggcaucaagauccaggagggggucguggacuacggcgcccgcuucuacuucuacaccagcaagacgaccguggccucccucaucaacacccugaacgaccugaacgagacccucgucacgaugccccugggguacgugacccacggccugaaccucgaggaggcggcccgguacaugcgcagccugaaggugccggccaccgucuccgugagcucccccgacgccgugaccgccuacaacggguaccugacgagcuccagcaagacccccgaggagcacuucaucgagaccaucucccucgcgggcagcuacaaggacuggagcuacuccggccagagcacccagcuggggaucgaguuccugaagcggggcgacaaguccgucuacuacacgagcaaccccaccaccuuccaccucgacggggaggugaucaccuucgacaaccugaagacgcugcucucccugcgcgaggugcggaccaucaaggucuucaccaccguggacaacaucaaccugcacacgcagguggucgacaugagcaugaccuacggccagcaguucggcccgaccuaccucgacggggccgacgugaccaagaucaagccccacaacucccacgagggcaagacguucuacgugcugcccaacgacgacacccugcgcgucgaggccuucgaguacuaccacaccaccgacccgagcuuccucgggcgguacauguccgcccugaaccacacgaagaaguggaaguacccccaggugaacggccugaccagcaucaagugggccgacaacaacugcuaccucgcgaccgcccugcugacccuccagcagaucgagcugaaguucaacccccccgcccugcaggacgccuacuaccgcgcgcgggccggggaggccgccaacuucugcgcccucauccuggcguacugcaacaagacggugggcgagcugggcgacguccgcgagaccauguccuaccucuuccagcacgccaaccuggacagcugcaagcgggugcugaacgucgugugcaagaccugcgggcagcagcagaccacccucaagggcguggaggccgucauguacauggggacgcuguccuacgagcaguucaagaagggcgugcagaucccgugcaccugcgggaagcaggccaccaaguaccuggugcagcaggagagccccuucgucaugauguccgccccccccgcgcaguacgagcucaagcacggcaccuucacgugcgccagcgaguacaccggcaacuaccagugcgggcacuacaagcacaucaccuccaaggagacccuguacugcaucgacggcgcccugcucacgaagagcagcgaguacaaggggccgaucaccgacguguucuacaaggagaacuccuacaccaccacgaucaagcccgugaccuacaagcuggacggcgucgugugcaccgagaucgaccccaagcuggacaacuacuacaagaaggacaacagcuacuucaccgagcagcccaucgaccucgugccgaaccagcccuaccccaacgccuccuucgacaacuucaaguucgucugcgacaacaucaaguucgccgacgaccugaaccagcugacgggguacaagaagcccgcgagccgcgagcucaaggugaccuucuucccggaccugaacggcgacguggucgccaucgacuacaagcacuacacccccuccuucaagaagggcgccaagcugcuccacaagcccaucguguggcacgugaacaacgccaccaacaaggcgacguacaagcccaacaccuggugcauccggugccuguggagcaccaagccggucgagaccuccaacagcuucgacgugcugaaguccgaggacgcccaggggauggacaaccucgccugcgaggaccugaagcccgugagcgaggaggucguggagaaccccacgauccagaaggacgugcuggagugcaacgucaagaccaccgagguggugggcgacaucauccucaagcccgccaacaacucccugaagaucaccgaggaggucgggcacacggaccugauggccgcguacguggacaacagcucccucaccaucaagaagccgaacgagcugagccgcgugcugggccucaagacccuggccacccacgggcuggccgccgucaacuccgugcccugggacacgaucgccaacuacgcgaagcccuuccucaacaagguggucagcaccaccaccaacaucgugacgcgcugccugaaccgggugugcaccaacuacaugccguacuucuucacccugcuccugcagcugugcaccuucacccgcuccacgaacagccggaucaaggccuccaugcccaccaccaucgccaagaacaccgucaagagcgugggcaaguucugccucgaggccagcuucaacuaccugaagucccccaacuucagcaagcugaucaacaucaucaucugguuccuccugcuguccgugugccucggcagccugaucuacuccacggccgcgcuggggguccucaugagcaaccugggcaugcccuccuacugcaccggguaccgcgagggcuaccugaacagcaccaacgugaccaucgccacguacugcaccggcuccaucccgugcagcgugugccucuccgggcuggacagccuggacaccuaccccucccucgagaccauccagaucacgaucagcuccuucaagugggaccugaccgccuucggccuggucgccgagugguuccucgccuacauccuguucacccgguucuucuacgugcuggggcucgcggccaucaugcagcuguucuucagcuacuucgccgugcacuucaucuccaacagcuggcugauguggcugaucaucaaccucguccagauggcccccaucuccgcgauggugcgcauguacaucuucuucgccagcuucuacuacguguggaagagcuacguccacgugguggacggcugcaacuccagcaccugcaugaugugcuacaagcggaaccgcgccacgcgggucgagugcaccaccaucgugaacgggguccgccgguccuucuacguguacgccaacggcggcaagggguucugcaagcugcacaacuggaacugcgugaacugcgacaccuucugcgccggcagcacguucaucuccgacgaggucgcgcgcgaccugagccuccaguucaagcggcccaucaacccgaccgaccaguccagcuacaucguggacuccgugaccgucaagaacgggagcauccaccuguacuucgacaaggccggccagaagaccuacgagcgccacucccugagccacuucgugaaccucgacaaccugcgggccaacaacacgaaggggucccugcccaucaacgugaucgucuucgacggcaagagcaagugcgaggaguccagcgccaaguccgccagcguguacuacucccagcucaugugccagcccauccugcugcucgaccaggcgcuggugagcgacgucggcgacagcgccgagguggccgugaagauguucgacgccuacgucaacaccuucuccagcaccuucaacgugcccauggagaagcugaagacccucguggccacggcggaggccgagcuggccaagaacgucucccuggacaacgugcucagcaccuucaucuccgccgcgcgccagggguucguggacagcgacgucgagaccaaggacgugguggagugccugaagcugucccaccagagcgacaucgaggucaccggcgacuccugcaacaacuacaugcucacguacaacaagguggagaacaugaccccgcgggaccugggggccugcaucgacugcagcgcccgccacaucaacgcccagguggccaagucccacaacaucgcgcugaucuggaacgucaaggacuucaugagccucuccgagcagcugcggaagcagauccgcagcgccgccaagaagaacaaccugcccuucaagcucaccugcgccaccacgcgccagguggugaacgucgugaccaccaagaucgcccugaagggcggguga

SEQ ID NO: 17733 - RNA, 5841 nt, Artificial Sequence
  SARS-CoV-2__MT846413.1__non-structural protein 3 (NSP3) CDS gc
auggcccccaccaaggugaccuucggcgacgacacggucaucgaggugcagggguacaagagcgugaacaucaccuucgagcuggacgagcgcaucgacaagguccucaacgagaagugcuccgccuacaccguggagcugggcaccgaggugaacgaguucgcgugcgucguggccgacgccgugaucaagacgcugcagccggucagcgagcuccugaccccccuggggaucgaccucgacgagugguccauggccaccuacuaccuguucgacgagagcggcgaguucaagcuggccucccacauguacugcagcuucuacccccccgacgaggacgaggaggagggggacugcgaggaggaggaguucgagccguccacccaguacgaguacggcacggaggacgacuaccagggcaagccccucgaguucggggcgaccagcgccgcccugcagcccgaggaggagcaggaggaggacuggcuggacgacgacucccagcagaccgugggccagcaggacgggagcgaggacaaccagaccacgaccauccagaccaucguggagguccagccccagcucgagauggagcugaccccgguggugcagacgaucgaggucaacuccuucagcggcuaccugaagcucaccgacaacguguacaucaagaacgccgacaucguggaggaggcgaagaaggucaagcccaccgugguggucaacgccgccaacguguaccugaagcacgggggcggcguggccggggcccugaacaaggcgaccaacaacgccaugcaggucgaguccgacgacuacaucgccacgaacggcccccucaagguggggggcagcugcguccuguccggccacaaccuggccaagcacugccuccacgugguggggcccaacgucaacaagggcgaggacauccagcugcugaagagcgccuacgagaacuucaaccagcacgaggugcuccuggcgccgcugcucuccgccgggaucuucggcgccgaccccauccacagccugcgggugugcgucgacaccgugcgcaccaacguguaccuggccgucuucgacaagaaccucuacgacaagcugguguccagcuuccuggagaugaagagcgagaagcagguggagcagaagaucgccgagauccccaaggaggaggucaagcccuucaucaccgaguccaagccgagcguggagcagcggaagcaggacgacaagaagaucaaggcgugcguggaggaggucacgaccacccucgaggagaccaaguuccugacggagaaccugcuccuguacaucgacaucaacgggaaccugcaccccgacuccgccacccucgugagcgacaucgacaucaccuuccugaagaaggacgcccccuacaucgccggcgacgugguccaggagggcgugcugaccgccguggucauccccacgaagaaggcggggggcaccaccgagaugcucgccaaggcccugcgcaaggugccgaccgacaacuacaucacgaccuaccccgggcagggccugaacggguacaccguggaggaggccaagaccguccucaagaagugcaaguccgcguucuacauccugcccagcaucaucuccaacgagaagcaggagauccugggcaccgugagcuggaaccuccgggagaugcuggcccacgccgaggagacgcgcaagcugaugcccgugugcgucgagaccaaggccaucguguccaccauccagcggaaguacaagggcaucaagauccaggaggggguggucgacuacggcgcccgcuucuacuucuacaccagcaagacgaccguggcgucccugaucaacacccucaacgaccugaacgagacccuggugacgaugccgcucggguacgucacccacggccugaaccuggaggaggccgcccgguacaugcgcagccucaaggugcccgccaccguguccgucagcucccccgacgccgugaccgcguacaacggguaccugacgagcuccagcaagacccccgaggagcacuucaucgagaccaucucccuggccggcagcuacaaggacuggagcuacuccggccagagcacccagcucgggaucgaguuccugaagcggggcgacaaguccguguacuacacgagcaacccgaccaccuuccaccuggacggggaggucaucaccuucgacaaccucaagacgcugcugucccuccgcgaggugcggaccaucaagguguucaccaccgucgacaacaucaaccugcacacgcaggugguggacaugagcaugaccuacggccagcaguucggccccaccuaccuggacggggccgacgucaccaagaucaagccccacaacucccacgagggcaagacguucuacgugcucccgaacgacgacacccugcgcguggaggccuucgaguacuaccacaccaccgaccccagcuuccuggggcgguacauguccgcccucaaccacacgaagaaguggaaguacccccaggucaacggccugaccagcaucaagugggcggacaacaacugcuaccuggccaccgcccuccugacccugcagcagaucgagcucaaguucaaccccccggcccugcaggacgcguacuaccgcgcccgggccggggaggccgccaacuucugcgcgcugauccucgccuacugcaacaagacggugggcgagcugggcgacgugcgcgagaccauguccuaccuguuccagcacgccaaccucgacagcugcaagcggguccugaacguggucugcaagaccugcgggcagcagcagaccacccugaagggcguggaggccgugauguacauggggacgcucuccuacgagcaguucaagaagggcguccagauccccugcaccugcgggaagcaggccaccaaguaccuggugcagcaggagagccccuucgugaugauguccgcgcccccggcccaguacgagcugaagcacggcaccuucacgugcgccagcgaguacaccggcaacuaccagugcgggcacuacaagcacaucaccuccaaggagacccucuacugcaucgacggcgcccugcugacgaagagcagcgaguacaaggggcccaucaccgacgucuucuacaaggagaacuccuacaccaccacgaucaagcccgugaccuacaagcucgacggcguggucugcaccgagaucgaccccaagcuggacaacuacuacaagaaggacaacagcuacuucaccgagcagccgaucgaccuggugcccaaccagcccuaccccaacgccuccuucgacaacuucaaguucgugugcgacaacaucaaguucgcggacgaccucaaccagcugacgggguacaagaagccggccagccgcgagcugaaggucaccuucuuccccgaccucaacggcgacgugguggccaucgacuacaagcacuacacccccuccuucaagaagggcgccaagcugcugcacaagcccaucgucuggcacgugaacaacgcgaccaacaaggccacguacaagccgaacaccuggugcauccggugccucuggagcaccaagcccguggagaccuccaacagcuucgacguccugaaguccgaggacgcccaggggauggacaaccuggccugcgaggaccucaagcccgugagcgaggagguggucgagaaccccacgauccagaaggacgugcuggagugcaacgugaagaccaccgaggucgugggcgacaucauccugaagccggccaacaacucccucaagaucaccgaggagguggggcacacggaccugauggcggccuacgucgacaacagcucccugaccaucaagaagcccaacgagcucagccgcgugcugggccugaagacccucgccacccacgggcuggccgccgugaacuccguccccugggacacgaucgcgaacuacgccaagccguuccugaacaagguggugagcaccaccaccaacaucgucacgcgcugccucaaccgggugugcaccaacuacaugcccuacuucuucacccugcugcuccagcugugcaccuucacccgcuccacgaacagccggaucaaggccuccaugcccaccaccaucgccaagaacaccgugaagagcgucggcaaguucugccuggaggccagcuucaacuaccucaagucccccaacuucagcaagcugaucaacaucaucaucugguuccugcuccuguccgugugccugggcagccucaucuacuccacggcggcccugggggugcugaugagcaaccucggcaugccguccuacugcaccggguaccgcgagggcuaccugaacagcaccaacgucaccaucgccacguacugcaccggcuccauccccugcagcgugugccuguccgggcucgacagccuggacaccuaccccucccuggagaccauccagaucacgaucagcuccuucaagugggaccucaccgccuucggccugguggccgagugguuccuggcguacauccucuucacccgguucuucuacguccuggggcuggccgccaucaugcagcucuucuucagcuacuucgccgugcacuucaucuccaacagcuggcugauguggcugaucaucaaccuggugcagauggcgcccaucuccgccaugguccgcauguacaucuucuucgccagcuucuacuacguguggaagagcuacgugcacgucguggacggcugcaacuccagcaccugcaugaugugcuacaagcggaaccgcgccacgcggguggagugcaccaccaucgucaacggggugcgccgguccuucuacgucuacgccaacggcggcaagggguucugcaagcuccacaacuggaacugcgugaacugcgacaccuucugcgcgggcagcacguucaucuccgacgagguggcccgcgaccugagccugcaguucaagcggccgaucaaccccaccgaccaguccagcuacaucgucgacuccgugaccgugaagaacgggagcauccaccucuacuucgacaaggccggccagaagaccuacgagcgccacucccugagccacuucgucaaccuggacaaccuccgggccaacaacacgaaggggucccugcccaucaacgugaucguguucgacggcaagagcaagugcgaggaguccagcgccaaguccgcgagcgucuacuacucccagcugaugugccagcccauccuccugcuggaccaggcccucgugagcgacgugggcgacagcgccgaggucgccgugaagauguucgacgccuacgugaacaccuucuccagcaccuucaacgucccgauggagaagcugaagacccugguggcgacggccgaggccgagcucgccaagaacgugucccuggacaacguccugagcaccuucaucuccgcggcccgccagggguucguggacagcgacguggagaccaaggacgucguggagugccucaagcugucccaccagagcgacaucgaggugaccggcgacuccugcaacaacuacaugcugacguacaacaaggucgagaacaugaccccccgggaccucggggccugcaucgacugcagcgcccgccacaucaacgcccagguggcgaagucccacaacaucgcccugaucuggaacgugaaggacuucaugagccuguccgagcagcuccggaagcagauccgcagcgccgccaagaagaacaaccugcccuucaagcugaccugcgccaccacgcgccaggucgugaacguggucaccaccaagaucgcgcucaagggcggguga

SEQ ID NO: 17734 - RNA, 5841 nt, Artificial Sequence
  SARS-CoV-2__MT846428.1__non-structural protein 3 (NSP3) CDS gc
auggcccccaccaaggugaccuucggcgacgacacggucaucgaggugcagggguacaagagcgugaacaucaccuucgagcuggacgagcgcaucgacaagguccucaacgagaagugcuccgccuacaccguggagcugggcaccgaggugaacgaguucgcgugcgucguggccgacgccgugaucaagacgcugcagccggucagcgagcuccugaccccccuggggaucgaccucgacgagugguccauggccaccuacuaccuguucgacgagagcggcgaguucaagcuggccucccacauguacugcagcuucuacccccccgacgaggacgaggaggagggggacugcgaggaggaggaguucgagccguccacccaguacgaguacggcacggaggacgacuaccagggcaagccccucgaguucggggcgaccagcgccgcccugcagcccgaggaggagcaggaggaggacuggcuggacgacgacucccagcagaccgugggccagcaggacgggagcgaggacaaccagaccacgaccauccagaccaucguggagguccagccccagcucgagauggagcugaccccgguggugcagacgaucgaggucaacuccuucagcggcuaccugaagcucaccgacaacguguacaucaagaacgccgacaucguggaggaggcgaagaaggucaagcccaccgugguggucaacgccgccaacguguaccugaagcacgggggcggcguggccggggcccugaacaaggcgaccaacaacgccaugcaggucgaguccgacgacuacaucgccacgaacggcccccucaagguggggggcagcugcguccuguccggccacaaccuggccaagcacugccuccacgugguggggcccaacgucaacaagggcgaggacauccagcugcugaagagcgccuacgagaacuucaaccagcacgaggugcuccuggcgccgcugcucuccgccgggaucuucggcgccgaccccauccacagccugcgggugugcgucgacaccgugcgcaccaacguguaccuggccgucuucgacaagaaccucuacgacaagcugguguccagcuuccuggagaugaagagcgagaagcagguggagcagaagaucgccgagauccccaaggaggaggucaagcccuucaucaccgaguccaagccgagcguggagcagcggaagcaggacgacaagaagaucaaggcgugcguggaggaggucacgaccacccucgaggagaccaaguuccugacggagaaccugcuccuguacaucgacaucaacgggaaccugcaccccgacuccgccacccucgugagcgacaucgacaucaccuuccugaagaaggacgcccccuacaucgugggcgacgucgugcaggagggcgugcugaccgccgucgugauccccacgaagaaggccgggggcaccaccgagaugcucgcgaaggcccugcgcaaggugccgaccgacaacuacaucacgaccuaccccgggcagggccugaacggguacaccgucgaggaggccaagaccgugcucaagaagugcaaguccgccuucuacauccugcccagcaucaucuccaacgagaagcaggagauccugggcaccgugagcuggaaccuccgggagaugcuggcgcacgccgaggagacgcgcaagcugaugcccgucugcguggagaccaaggccaucguguccaccauccagcggaaguacaagggcaucaagauccaggagggggucguggacuacggcgcccgcuucuacuucuacaccagcaagacgaccguggccucccugaucaacacccucaacgaccugaacgagacccuggucacgaugccgcucggguacgugacccacggccugaaccuggaggaggcggcccgguacaugcgcagccucaaggugcccgccaccgucuccgugagcucccccgacgccgugaccgccuacaacggguaccugacgagcuccagcaagacccccgaggagcacuucaucgagaccaucucccuggcgggcagcuacaaggacuggagcuacuccggccagagcacccagcucgggaucgaguuccugaagcggggcgacaaguccgucuacuacacgagcaacccgaccaccuuccaccuggacggggaggugaucaccuucgacaaccucaagacgcugcugucccuccgcgaggugcggaccaucaaggucuucaccaccguggacaacaucaaccugcacacgcagguggucgacaugagcaugaccuacggccagcaguucggccccaccuaccuggacggggccgacgugaccaagaucaagccccacaacucccacgagggcaagacguucuacgugcucccgaacgacgacacccugcgcgucgaggccuucgaguacuaccacaccaccgaccccagcuuccuggggcgguacauguccgcccucaaccacacgaagaaguggaaguacccccaggugaacggccugaccagcaucaagugggccgacaacaacugcuaccuggcgaccgcccuccugacccugcagcagaucgagcucaaguucaaccccccggcccugcaggacgccuacuaccgcgcgcgggccggggaggccgccaacuucugcgcccugauccucgcguacugcaacaagacggugggcgagcugggcgacguccgcgagaccauguccuaccuguuccagcacgccaaccucgacagcugcaagcgggugcugaacgucgugugcaagaccugcgggcagcagcagaccacccugaagggcguggaggccgucauguacauggggacgcucuccuacgagcaguucaagaagggcgugcagauccccugcaccugcgggaagcaggccaccaaguaccuggugcagcaggagagccccuucgucaugauguccgcccccccggcgcaguacgagcugaagcacggcaccuucacgugcgccagcgaguacaccggcaacuaccagugcgggcacuacaagcacaucaccuccaaggagacccucuacugcaucgacggcgcccugcugacgaagagcagcgaguacaaggggcccaucaccgacguguucuacaaggagaacuccuacaccaccacgaucaagcccgugaccuacaagcucgacggcgucgugugcaccgagaucgaccccaagcuggacaacuacuacaagaaggacaacagcuacuucaccgagcagccgaucgaccuggugcccaaccagcccuaccccaacgccuccuucgacaacuucaaguucgucugcgacaacaucaaguucgccgacgaccucaaccagcugacgggguacaagaagccggcgagccgcgagcugaaggugaccuucuuccccgaccucaacggcgacguggucgccaucgacuacaagcacuacacccccuccuucaagaagggcgccaagcugcugcacaagcccaucguguggcacgugaacaacgccaccaacaaggcgacguacaagccgaacaccuggugcacccggugccucuggagcaccaagcccgucgagacguccaacagcuucgacgugcugaaguccgaggacgcccaggggauggacaaccuggccugcgaggaccucaagcccgugagcgaggaggucguggagaaccccaccauccagaaggacgugcuggagugcaacgucaagaccaccgagguggugggcgacaucauccugaagccggccaacaacucccucaagaucacggaggaggucgggcacaccgaccugauggccgcguacguggacaacagcucccugaccaucaagaagcccaacgagcucagccgcgugcugggccugaagacccucgccacgcacgggcuggccgccgucaacuccgugcccugggacaccaucgccaacuacgcgaagccguuccugaacaagguggucagcaccaccacgaacaucgugacccgcugccucaaccgggugugcaccaacuacaugcccuacuucuucacccugcugcuccagcugugcaccuucacgcgcuccaccaacagccggaucaaggccuccaugcccaccaccaucgccaagaacacggucaagagcgugggcaaguucugccuggaggccagcuucaacuaccucaagucccccaacuucagcaagcugaucaacaucaucaucugguuccugcuccuguccgugugccugggcagccucaucuacuccaccgccgcgcuggggguccugaugagcaaccucggcaugccguccuacugcaccggguaccgcgagggcuaccugaacagcaccaacgugacgaucgccaccuacugcaccggcuccauccccugcagcgugugccuguccgggcucgacagccuggacaccuaccccucccuggagacgauccagaucaccaucagcuccuucaagugggaccucaccgccuucggccuggucgccgagugguuccuggccuacauccucuucacccgguucuucuacgugcuggggcuggcggccaucaugcagcucuucuucagcuacuucgccgugcacuucaucuccaacagcuggcugauguggcugaucaucaaccugguccagauggcccccaucuccgcgauggugcgcauguacaucuucuucgccagcuucuacuacguguggaagagcuacguccacgugguggacggcugcaacuccagcacgugcaugaugugcuacaagcggaaccgcgccacccgggucgagugcaccaccaucgugaacgggguccgccgguccuucuacguguacgccaacggcggcaagggguucugcaagcuccacaacuggaacugcgugaacugcgacacguucugcgccggcagcaccuucaucuccgacgaggucgcgcgcgaccugagccugcaguucaagcggccgaucaaccccaccgaccaguccagcuacaucguggacuccgugaccgucaagaacgggagcauccaccucuacuucgacaaggccggccagaagacguacgagcgccacucccugagccacuucgugaaccuggacaaccuccgggccaacaacaccaaggggucccugcccaucaacgugaucgucuucgacggcaagagcaagugcgaggaguccagcgccaaguccgccagcguguacuacucccagcugaugugccagcccauccuccugcuggaccaggcgcucgugagcgacgucggcgacagcgccgagguggccgugaagauguucgacgccuacgucaacaccuucuccagcaccuucaacgugccgauggagaagcugaagacgcugguggccaccgcggaggccgagcucgccaagaacgucucccuggacaacgugcugagcaccuucaucuccgccgcgcgccagggguucguggacagcgacgucgagaccaaggacgugguggagugccucaagcugucccaccagagcgacaucgaggucacgggcgacuccugcaacaacuacaugcugaccuacaacaagguggagaacaugaccccccgggaccucggggccugcaucgacugcagcgcccgccacaucaacgcccagguggccaagucccacaacaucgcgcugaucuggaacgucaaggacuucaugagccuguccgagcagcuccggaagcagauccgcagcgccgccaagaagaacaaccugcccuucaagcugaccugcgccacgacccgccagguggugaacgucgugaccaccaagaucgcccucaagggcggguga

SEQ ID NO: 17735 - RNA, 5841 nt, Artificial Sequence
  SARS-CoV-2__MT846430.1__non-structural protein 3 (NSP3) CDS gc
auggcccccaccaaggugaccuucggcgacgacacggucaucgaggugcagggguacaagagcgugaacaucaccuucgagcuggacgagcgcaucgacaagguccucaacgagaagugcuccgccuacaccguggagcugggcaccgaggugaacgaguucgcgugcgucguggccgacgccgugaucaagacgcugcagccggucagcgagcuccugaccccccuggggaucgaccucgacgagugguccauggccaccuacuaccuguucgacgagagcggcgaguucaagcuggccucccacauguacugcagcuucuacccccccgacgaggacgaggaggagggggacugcgaggaggaggaguucgagccguccacccaguacgaguacggcacggaggacgacuaccagggcaagccccucgaguucggggcgaccagcgccgcccugcagcccgaggaggagcaggaggaggacuggcuggacgacgacucccagcagaccgugggccagcaggacgggagcgaggacaaccagaccacgaccauccagaccaucguggagguccagccccagcucgagauggagcugaccccgguggugcagacgaucgaggucaacuccuucagcggcuaccugaagcucaccgacaacguguacaucaagaacgccgacaucguggaggaggcgaagaaggucaagcccaccgugguggucaacgccgccaacguguaccugaagcacgggggcggcguggccggggcccugaacaaggcgaccaacaacgccaugcaggucgaguccgacgacuacaucgccacgaacggcccccucaagguggggggcagcugcguccuguccggccacaaccuggccaagcacugccuccacgugguggggcccaacgucaacaagggcgaggacauccagcugcugaagagcgccuacgagaacuucaaccagcacgaggugcuccuggcgccgcugcucuccgccgggaucuucggcgccgaccccauccacagccugcgggugugcgucgacaccgugcgcaccaacguguaccuggccgucuucgacaagaaccucuacgacaagcugguguccagcuuccuggagaugaagagcgagaagcagguggagcagaagaucgccgagauccccaaggaggaggucaagcccuucaucaccgaguccaagccgagcguggagcagcggaagcaggacgacaagaagaucaaggcgugcguggaggaggucacgaccacccucgaggagaucaaguuccugaccgagaaccugcuccuguacaucgacaucaacgggaaccugcaccccgacuccgccacgcucgugagcgacaucgacaucaccuuccugaagaaggacgcccccuacaucgugggcgacgucgugcaggagggcgugcugaccgccgucgugauccccaccaagaaggccgggggcacgaccgagaugcucgcgaaggcccugcgcaaggugccgaccgacaacuacaucaccacguaccccgggcagggccugaacggguacaccgucgaggaggccaagaccgugcucaagaagugcaaguccgccuucuacauccugcccagcaucaucuccaacgagaagcaggagauccugggcaccgugagcuggaaccuccgggagaugcuggcgcacgccgaggagacccgcaagcugaugcccgucugcguggagacgaaggccaucguguccaccauccagcggaaguacaagggcaucaagauccaggagggggucguggacuacggcgcccgcuucuacuucuacaccagcaagaccacgguggccucccugaucaacacccucaacgaccugaacgagacccuggucaccaugccgcucggguacgugacgcacggccugaaccuggaggaggcggcccgguacaugcgcagccucaaggugcccgccaccgucuccgugagcucccccgacgccgugaccgccuacaacggguaccugaccagcuccagcaagacgcccgaggagcacuucaucgagaccaucucccuggcgggcagcuacaaggacuggagcuacuccggccagagcacccagcucgggaucgaguuccugaagcggggcgacaaguccgucuacuacaccagcaacccgacgaccuuccaccuggacggggaggugaucaccuucgacaaccucaagacccugcugucccuccgcgaggugcggacgaucaaggucuucaccaccguggacaacaucaaccugcacacccagguggucgacaugagcaugacguacggccagcaguucggccccaccuaccuggacggggccgacgugaccaagaucaagccccacaacucccacgagggcaagaccuucuacgugcucccgaacgacgacacgcugcgcgucgaggccuucgaguacuaccacaccaccgaccccagcuuccuggggcgguacauguccgcccucaaccacaccaagaaguggaaguacccccaggugaacggccugacgagcaucaagugggccgacaacaacugcuaccuggcgaccgcccuccugacccugcagcagaucgagcucaaguucaaccccccggcccugcaggacgccuacuaccgcgcgcgggccggggaggccgccaacuucugcgcccugauccucgcguacugcaacaagaccgugggcgagcugggcgacguccgcgagacgauguccuaccuguuccagcacgccaaccucgacagcugcaagcgggugcugaacgucgugugcaagaccugcgggcagcagcagaccacccugaagggcguggaggccgucauguacauggggacccucuccuacgagcaguucaagaagggcgugcagauccccugcacgugcgggaagcaggccaccaaguaccuggugcagcaggagagccccuucgucaugauguccgcccccccggcgcaguacgagcugaagcacggcaccuucaccugcgccagcgaguacacgggcaacuaccagugcgggcacuacaagcacaucaccuccaaggagacccucuacugcaucgacggcgcccugcugaccaagagcagcgaguacaaggggcccaucacggacguguucuacaaggagaacuccuacaccaccaccaucaagcccgugacguacaagcucgacggcgucgugugcaccgagaucgaccccaagcuggacaacuacuacaagaaggacaacagcuacuucaccgagcagccgaucgaccuggugcccaaccagcccuaccccaacgccuccuucgacaacuucaaguucgucugcgacaacaucaaguucgccgacgaccucaaccagcugaccggguacaagaagccggcgagccgcgagcugaaggugacguucuuccccgaccucaacggcgacguggucgccaucgacuacaagcacuacacccccuccuucaagaagggcgccaagcugcugcacaagcccaucguguggcacgugaacaacgccaccaacaaggcgaccuacaagccgaacacguggugcauccggugccucuggagcaccaagcccgucgagaccuccaacagcuucgacgugcugaaguccgaggacgcccaggggauggacaaccuggccugcgaggaccucaagcccgugagcgaggaggucguggagaaccccaccauccagaaggacgugcuggagugcaacgucaagacgaccgagguggugggcgacaucauccugaagccggccaacaacucccucaagaucaccgaggaggucgggcacaucgaccugauggccgcguacguggacaacagcucccugaccaucaagaagcccaacgagcucagccgcgugcugggccugaagacgcucgccacccacgggcuggccgccgucaacuccgugcccugggacaccaucgccaacuacgcgaagccguuccugaacaagguggucagcaccacgaccaacaucgugacccgcugccucaaccgggugugcaccaacuacaugcccuacuucuucacgcugcugcuccagcugugcaccuucacccgcuccaccaacagccggaucaaggccuccaugcccaccacgaucgccaagaacaccgucaagagcgugggcaaguucugccuggaggccagcuucaacuaccucaagucccccaacuucagcaagcugaucaacaucaucaucugguuccugcuccuguccgugugccugggcagccucaucuacuccaccgccgcgcuggggguccugaugagcaaccucggcaugccguccuacugcaccggguaccgcgagggcuaccugaacagcacgaacgugaccaucgccaccuacugcaccggcuccauccccugcagcgugugccuguccgggcucgacagccuggacacguaccccucccuggagaccauccagaucaccaucagcuccuucaagugggaccucaccgccuucggccuggucgccgagugguuccuggccuacauccucuucacgcgguucuucuacgugcuggggcuggcggccaucaugcagcucuucuucagcuacuucgccgugcacuucaucuccaacagcuggcugauguggcugaucaucaaccugguccagauggcccccaucuccgcgauggugcgcauguacaucuucuucgccagcuucuacuacguguggaagagcuacguccacgugguggacggcugcaacuccagcaccugcaugaugugcuacaagcggaaccgcgccacccgggucgagugcaccacgaucgugaacgggguccgccgguccuucuacguguacgccaacggcggcaagggguucugcaagcuccacaacuggaacugcgugaacugcgacaccuucugcgccggcagcaccuucaucuccgacgaggucgcgcgcgaccugagccugcaguucaagcggccgaucaaccccaccgaccaguccagcuacaucguggacuccgugacggucaagaacgggagcauccaccucuacuucgacaaggccggccagaagaccuacgagcgccacucccugagccacuucgugaaccuggacaaccuccgggccaacaacaccaaggggucccugcccaucaacgugaucgucuucgacggcaagagcaagugcgaggaguccagcgccaaguccgccagcguguacuacucccagcugaugugccagcccauccuccugcuggaccaggcgcucgugagcgacgucggcgacagcgccgagguggccgugaagauguucgacgccuacgucaacaccuucuccagcacguucaacgugccgauggagaagcugaagacccugguggccaccgcggaggccgagcucgccaagaacgucucccuggacaacgugcugagcaccuucaucuccgccgcgcgccagggguucguggacagcgacgucgagacgaaggacgugguggagugccucaagcugucccaccagagcgacaucgaggucaccggcgacuccugcaacaacuacaugcugaccuacaacaagguggagaacaugaccccccgggaccucggggccugcaucgacugcagcgcccgccacaucaacgcccagguggccaagucccacaacaucgcgcugaucuggaacgucaaggacuucaugagccuguccgagcagcuccggaagcagauccgcagcgccgccaagaagaacaaccugcccuucaagcugacgugcgccaccacccgccagguggugaacgucgugaccacgaagaucgcccucaagggcggguga

SEQ ID NO: 17736 - RNA, 5841 nt, Artificial Sequence
  SARS-CoV-2__MT846469.1__non-structural protein 3 (NSP3) CDS gc
auggcccccaccaaggugaccuucggcgacgacacggucaucgaggugcagggguacaagagcgugaacaucaccuucgagcuggacgagcgcaucgacaagguccucaacgagaagugcuccgccuacaccguggagcugggcaccgaggugaacgaguucgcgugcgucguggccgacgccgugaucaagacgcugcagccggucagcgagcuccugaccccccuggggaucgaccucgacgagugguccauggccaccuacuaccuguucgacgagagcggcgaguucaagcuggccucccacauguacugcagcuucuacccccccgacgaggacgaggaggagggggacugcgaggaggaggaguucgagccguccacccaguacgaguacggcacggaggacgacuaccagggcaagccccucgaguucggggcgaccagcgccgcccugcagcccgaggaggagcaggaggaggacuggcuggacgacgacucccagcagaccgugggccagcaggacgggagcgaggacaaccagaccacgaccauccagaccaucguggagguccagccccagcucgagauggagcugaccccgguggugcagacgaucgaggucaacuccuucagcggcuaccugaagcucaccgacaacguguacaucaagaacgccgacaucguggaggaggcgaagaaggucaagcccaccgugguggucaacgccgccaacguguaccugaagcacgggggcggcguggccggggcccugaacaaggcgaccaacaacgccaugcaggucgaguccgacgacuacaucgccacgaacggcccccucaagguggggggcagcugcguccuguccggccacaaccuggccaagcacugccuccacgugguggggcccaacgucaacaagggcgaggacauccagcugcugaagagcgccuacgagaacuucaaccagcacgaggugcuccuggcgccgcugcucuccgccgggaucuucggcgccgaccccauccacagccugcgggugugcgucgacaccgugcgcaccaacguguaccuggccgucuucgacaagaaccucuacgacaagcugguguccagcuuccuggagaugaagagcgagaagcagguggagcagaagaucgccgagauccccaaggaggaggucaagcccuucaucaccgaguccaagccgagcguggagcagcggaagcaggacgacaagaagaucaaggcgugcguggaggaggucacgaccacccucgaggagaccaaguuccugacggagaaccugcuccuguacaucgacaucaacgggaaccugcaccccgacuccgccacccucgugagcgacaucgacaucaccuuccugaagaaggacgcccccuacaucgugggcgacgucgugcaggagggcgugcugaccgccgucgugauccccacgaagaaggccgggggcaccaccgagaugcucgcgaaggcccugcgcaaggugccgaccgacaacuacaucacgaccuaccccgggcagggccugaacggguacaccgucgaggaggccaagaccgugcucaagaagugcaaguccgccuucuacauccugcccagcaucaucuccaacgagaagcaggagauccugggcaccgugagcuggucccuccgggagaugcuggcgcacgccgaggagacgcgcaagcugaugcccgucugcguggagaccaaggccaucgugagcaccauccagcggaaguacaagggcaucaagauccaggagggggucguggacuacggcgcccgcuucuacuucuacaccuccaagacgaccguggccagccugaucaacacccucaacgaccugaacgagacccuggucacgaugccgcucggguacgugacccacggccugaaccuggaggaggcggcccgguacaugcgcucccucaaggugcccgccaccgucagcguguccagccccgacgccgugaccgccuacaacggguaccugacguccagcuccaagacccccgaggagcacuucaucgagaccaucagccuggcgggcagcuacaaggacugguccuacagcggccaguccacccagcucgggaucgaguuccugaagcggggcgacaagagcgucuacuacacguccaacccgaccaccuuccaccuggacggggaggugaucaccuucgacaaccucaagacgcugcugagccuccgcgaggugcggaccaucaaggucuucaccaccguggacaacaucaaccugcacacgcagguggucgacauguccaugaccuacggccagcaguucggccccaccuaccuggacggggccgacgugaccaagaucaagccccacaacagccacgagggcaagacguucuacgugcucccgaacgacgacacccugcgcgucgaggccuucgaguacuaccacaccaccgaccccuccuuccuggggcgguacaugagcgcccucaaccacacgaagaaguggaaguacccccaggugaacggccugaccuccaucaagugggccgacaacaacugcuaccuggcgaccgcccuccugacccugcagcagaucgagcucaaguucaaccccccggcccugcaggacgccuacuaccgcgcgcgggccggggaggccgccaacuucugcgcccugauccucgcguacugcaacaagacggugggcgagcugggcgacguccgcgagaccaugagcuaccuguuccagcacgccaaccucgacuccugcaagcgggugcugaacgucgugugcaagaccugcgggcagcagcagaccacccugaagggcguggaggccgucauguacauggggacgcucagcuacgagcaguucaagaagggcgugcagauccccugcaccugcgggaagcaggccaccaaguaccuggugcagcaggagucccccuucgucaugaugagcgcccccccggcgcaguacgagcugaagcacggcaccuucacgugcgccuccgaguacaccggcaacuaccagugcgggcacuacaagcacaucaccagcaaggagacccucuacugcaucgacggcgcccugcugacgaagagcuccgaguacaaggggcccaucaccgacguguucuacaaggagaacagcuacaccaccacgaucaagcccgugaccuacaagcucgacggcgucgugugcaccgagaucgaccccaagcuggacaacuacuacaagaaggacaacuccuacuucaccgagcagccgaucgaccuggugcccaaccagcccuaccccaacgccagcuucgacaacuucaaguucgucugcgacaacaucaaguucgccgacgaccucaaccagcugacgggguacaagaagccggcgucccgcgagcugaaggugaccuucuuccccgaccucaacggcgacguggucgccaucgacuacaagcacuacacccccagcuucaagaagggcgccaagcugcugcacaagcccaucguguggcacgugaacaacgccaccaacaaggcgacguacaagccgaacaccuggugcauccggugccucugguccaccaagcccgucgagaccagcaacuccuucgacgugcugaagagcgaggacgcccaggggauggacaaccuggccugcgaggaccucaagcccguguccgaggaggucguggagaaccccacgauccagaaggacgugcuggagugcaacgucaagaccaccgagguggugggcgacaucauccugaagccggccaacaacagccucaagaucaccgaggaggucgggcacacggaccugauggccgcguacguggacaacuccagccugaccaucaagaagcccaacgagcucucccgcgugcugggccugaagacccucgccacccacgggcuggccgccgucaacagcgugcccugggacacgaucgccaacuacgcgaagccguuccugaacaagguggucuccaccaccaccaacaucgugacgcgcugccucaaccgggugugcaccaacuacaugcccuacuucuucacccugcugcuccagcugugcaccuucacccgcagcacgaacucccggaucaaggccagcaugcccaccaccaucgccaagaacaccgucaagagcgugggcaaguucugccuggaggccuccuucaacuaccucaagagccccaacuucuccaagcugaucaacaucaucaucugguuccugcuccugagcgugugccugggcucccucaucuacagcacggccgcgcuggggguccugauguccaaccucggcaugccgagcuacugcaccggguaccgcgagggcuaccugaacuccaccaacgugaccaucgccacguacugcaucggcagcauccccugcuccgugugccugagcgggcucgacucccuggacaccuaccccagccuggagaccauccagaucaccaucuccagcuucaagugggaccucacggccuucggccuggucgccgagugguuccuggccuacauccucuucacccgguucuucuacgugcuggggcuggcggccaucaugcagcucuucuucuccuacuucgccgugcacuucaucagcaacuccuggcugauguggcugaucaucaaccugguccagauggcccccaucagcgcgauggugcgcauguacaucuucuucgccagcuucuacuacguguggaaguccuacguccacgugguggacggcugcaacagcuccaccugcaugaugugcuacaagcggaaccgcgccacccgggucgagugcacgaccaucgugaacgggguccgccggagcuucuacguguacgccaacggcggcaagggguucugcaagcuccacaacuggaacugcgugaacugcgacaccuucugcgccggcuccaccuucaucagcgacgaggucgcgcgcgaccugucccugcaguucaagcggccgaucaaccccacggaccagagcuccuacaucguggacagcgugaccgucaagaacggguccauccaccucuacuucgacaaggccggccagaagaccuacgagcgccacagccugucccacuucgugaaccuggacaaccuccgggccaacaacaccaaggggagccugcccaucaacgugaucgucuucgacggcaaguccaagugcgaggagagcuccgccaagagcgccuccguguacuacagccagcugaugugccagcccauccuccugcuggaccaggcgcucgugagcgacgucggcgacuccgccgagguggccgugaagauguucgacgccuacgucaacacguucagcuccaccuucaacgugccgauggagaagcugaagacccugguggccaccgcggaggccgagcucgccaagaacgucagccuggacaacgugcuguccacguucaucagcgccgcgcgccagggguucguggacuccgacgucgagaccaaggacgugguggagugccucaagcugagccaccaguccgacaucgaggucaccggcgacagcugcaacaacuacaugcugaccuacaacaagguggagaacaugacgccccgggaccucggggccugcaucgacugcuccgcccgccacaucaacgcccagguggccaagagccacaacaucgcgcugaucuggaacgucaaggacuucaugucccugagcgagcagcuccggaagcagauccgcuccgccgccaagaagaacaaccugcccuucaagcugaccugcgccaccacccgccagguggugaacgucgugacgaccaagaucgcccucaagggcggguga

SEQ ID NO: 17737 - RNA, 5841 nt, Artificial Sequence
  SARS-CoV-2__MT846483.1__non-structural protein 3 (NSP3) CDS gc
auggcccccaccaaggugaccuucggcgacgacacggucaucgaggugcagggguacaagagcgugaacaucaccuucgagcuggacgagcgcaucgacaagguccucaacgagaagugcuccgccuacaccguggagcugggcaccgaggugaacgaguucgcgugcgucguggccgacgccgugaucaagacgcugcagccggucagcgagcuccugaccccccuggggaucgaccucgacgagugguccauggccaccuacuaccuguucgacgagagcggcgaguucaagcuggccucccacauguacugcagcuucuacccccccgacgaggacgaggaggagggggacugcgaggaggaggaguucgagccguccacccaguacgaguacggcacggaggacgacuaccagggcaagccccucgaguucggggcgaccagcgccgcccugcagcccgaggaggagcaggaggaggacuggcuggacgacgacucccagcagaccgugggccagcaggacgggagcgaggacaaccagaccacgaccauccagaccaucguggagguccagccccagcucgagauggagcugaccccgguggugcagacgaucgaggucaacuccuucagcggcuaccugaagcucaccgacaacguguacaucaagaacgccgacaucguggaggaggucaagaaggugaagcccaccguggucgugaacgcggccaacguguaccugaagcacgggggcggcgucgccggggcccugaacaaggccaccaacaacgcgaugcagguggaguccgacgacuacaucgccacgaacggcccccucaaggucgggggcagcugcgugcuguccggccacaaccuggccaagcacugccuccacguggucgggcccaacgugaacaagggcgaggacauccagcugcugaagagcgccuacgagaacuucaaccagcacgaggugcuccuggccccgcugcucuccgcggggaucuucggcgccgaccccauccacagccugcgggucugcguggacaccgugcgcaccaacgucuaccuggccguguucgacaagaaccucuacgacaagcugguguccagcuuccuggagaugaagagcgagaagcaggucgagcagaagaucgccgagauccccaaggaggaggugaagcccuucaucaccgaguccaagccgagcguggagcagcggaagcaggacgacaagaagaucaaggccugcgucgaggaggugacgaccacccucgaggagaccaaguuccugacggagaaccugcuccuguacaucgacaucaacgggaaccugcaccccgacuccgcgacccucgugagcgacaucgacaucaccuuccugaagaaggacgcccccuacaucgucggcgacguggugcaggagggcguccugaccgccguggugauccccacgaagaaggccgggggcaccaccgagaugcucgccaaggcgcugcgcaaggucccgaccgacaacuacaucacgaccuaccccgggcagggccugaacggguacaccguggaggaggccaagaccgugcucaagaagugcaaguccgccuucuacauccugcccagcaucaucuccaacgagaagcaggagauccugggcaccgucagcuggaaccuccgggagaugcuggcccacgcggaggagacgcgcaagcugaugcccgugugcguggagaccaaggccaucgucuccaccauccagcggaaguacaagggcaucaagauccaggagggggugguggacuacggcgcccgcuucuacuucuacaccagcaagacgaccgucgccucccugaucaacacccucaacgaccugaacgagacccuggugacgaugccgcucggguacgugacccacggccugaaccuggaggaggccgcgcgguacaugcgcagccucaagguccccgccaccguguccgugagcucccccgacgccgucaccgccuacaacggguaccugacgagcuccagcaagacccccgaggagcacuucaucgagaccaucucccuggccggcagcuacaaggacuggagcuacuccggccagagcacccagcucgggaucgaguuccugaagcggggcgacaaguccguguacuacacgagcaacccgaccaccuuccaccuggacggggaggugaucaccuucgacaaccucaagacgcugcugucccuccgcgagguccggaccaucaagguguucaccaccguggacaacaucaaccugcacacgcaggucguggacaugagcaugaccuacggccagcaguucggccccaccuaccuggacggggcggacgugaccaagaucaagccccacaacucccacgagggcaagacguucuacguccucccgaacgacgacacccugcgcguggaggccuucgaguacuaccacaccaccgaccccagcuuccuggggcgguacauguccgcccucaaccacacgaagaaguggaaguacccccaggugaacggccugaccagcaucaagugggccgacaacaacugcuaccuggccaccgcgcuccugacccugcagcagaucgagcucaaguucaaccccccggcccugcaggacgccuacuaccgcgcccgggcgggggaggccgccaacuucugcgcccugauccucgccuacugcaacaagacggucggcgagcugggcgacgugcgcgagaccauguccuaccuguuccagcacgcgaaccucgacagcugcaagcggguccugaacguggugugcaagaccugcgggcagcagcagaucacccugaagggcgucgaggccgugauguacauggggacccucuccuacgagcaguucaagaagggcgugcagauccccugcacgugcgggaagcaggccaccaaguaccugguccagcaggagagccccuucgugaugauguccgcccccccggcccaguacgagcugaagcacggcaccuucaccugcgcgagcgaguacacgggcaacuaccagugcgggcacuacaagcacaucaccuccaaggagacccucuacugcaucgacggcgcccugcugaccaagagcagcgaguacaaggggcccaucacggacguguucuacaaggagaacuccuacaccaccaccaucaagcccgucacguacaagcucgacggcguggugugcaccgagaucgaccccaagcuggacaacuacuacaagaaggacaacagcuacuucaccgagcagccgaucgaccugguccccaaccagcccuaccccaacgccuccuucgacaacuucaaguucgugugcgacaacaucaaguucgccgacgaccucaaccagcugaccggguacaagaagccggccagccgcgagcugaaggugacguucuuccccgaccucaacggcgacgucguggcgaucgacuacaagcacuacacccccuccuucaagaagggcgccaagcugcugcacaagcccaucguguggcacgucaacaacgccaccaacaaggccaccuacaagccgaacacguggugcauccggugccucuggagcaccaagcccguggagaccuccaacagcuucgacgugcugaaguccgaggacgcgcaggggauggacaaccuggccugcgaggaccucaagcccgucagcgaggaggugguggagaaccccaccauccagaaggacguccuggagugcaacgugaagacgaccgagguggucggcgacaucauccugaagccggccaacaacucccucaagaucaccgaggagguggggcacaccgaccugauggccgccuacguggacaacagcucccugacgaucaagaagcccaacgagcucagccgcguccugggccugaagacccucgcgacccacgggcuggccgccgugaacuccgugcccugggacaccaucgccaacuacgccaagccguuccugaacaaggucgugagcacgaccaccaacaucgugacccgcugccucaaccgggucugcacgaacuacaugcccuacuucuucacccugcugcuccagcugugcaccuucacccgcuccaccaacagccggaucaaggcguccaugcccacgaccaucgccaagaacaccgugaagagcgugggcaaguucugccuggaggccagcuucaacuaccucaagucccccaacuucagcaagcugaucaacaucaucaucugguuccugcuccuguccgucugccugggcagccucaucuacuccaccgccgcccugggggugcugaugagcaaccucggcaugccguccuacugcacgggguaccgcgagggcuaccugaacagcaccaacgugaccaucgcgaccuacugcacgggcuccauccccugcagcgucugccuguccgggcucgacagccuggacaccuaccccucccuggagaccauccagaucaccaucagcuccuucaagugggaccucacggccuucggccugguggccgagugguuccuggccuacauccucuucacccgguucuucuacgugcuggggcuggccgcgaucaugcagcucuucuucagcuacuucgccguccacuucaucuccaacagcuggcugauguggcugaucaucaaccuggugcagauggcccccaucuccgccauggugcgcauguacaucuucuucgcgagcuucuacuacgucuggaagagcuacgugcacguggucgacggcugcaacuccagcaccugcaugaugugcuacaagcggaaccgcgccacccggguggagugcacgaccaucgucaacggggugcgccgguccuucuacguguacgccaacggcggcaagggguucugcaagcuccacaacuggaacugcgucaacugcgacaccuucugcgccggcagcaccuucaucuccgacgagguggcccgcgaccugagccugcaguucaagcggccgaucaaccccacggaccaguccagcuacaucguggacuccgucaccgugaagaacgggagcauccaccucuacuucgacaaggcgggccagaagaccuacgagcgccacucccugagccacuucgugaaccuggacaaccuccgggccaacaacaccaaggggucccugcccaucaacgucaucguguucgacggcaagagcaagugcgaggaguccagcgccaaguccgccagcguguacuacucccagcugaugugccagcccauccuccugcuggaccaggcccucgucagcgacgugggcgacagcgcggagguggccgucaagauguucgacgccuacgugaacacguucuccagcaccuucaacgugccgauggagaagcugaagacccuggucgccaccgccgaggcggagcucgccaagaacgugucccuggacaacgugcugagcacguucaucuccgccgcccgccagggguucgucgacagcgacguggagaccaaggacguggucgagugccucaagcugucccaccagagcgacaucgaggugaccggcgacuccugcaacaacuacaugcugaccuacaacaagguggagaacaugacgccccgggaccucggggcgugcaucgacugcagcgcccgccacaucaacgcccaggucgccaagucccacaacaucgcccugaucuggaacgugaaggacuucaugagccuguccgagcagcuccggaagcagauccgcagcgcggccaagaagaacaaccugcccuucaagcugaccugcgccaccacccgccagguggucaacguggugacgaccaagaucgcccucaagggcggguga

SEQ ID NO: 17738 - RNA, 5841 nt, Artificial Sequence
  SARS-CoV-2__MT846505.1__non-structural protein 3 (NSP3) CDS gc
auggcccccaccaaggugaccuucggcgacgacacggucaucgaggugcagggguacaagagcgugaacaucaccuucgagcuggacgagcgcaucgacaagguccucaacgagaagugcuccgccuacaccguggagcugggcaccgaggugaacgaguucgcgugcgucguggccgacgccgugaucaagacgcugcagccggucagcgagcuccugaccccccuggggaucgaccucgacgagugguccauggccaccuacuaccuguucgacgagagcggcgaguucaagcuggccucccacauguacugcagcuucuacccccccgacgaggacgaggaggagggggacugcgaggaggaggaguucgagccguccacccaguacgaguacggcacggaggacgacuaccagggcaagccccucgaguucggggcgaccagcgccgcccugcagcccgaggaggagcaggaggaggacuggcuggacgacgacucccagcagaccgugggccagcaggacgggagcgaggacaaccagaccacgaccauccagaccaucguggagguccagccccagcucgagauggagcugaccccgguggugcagacgaucgaggucaacuccuucagcggcuaccugaagcucaccgacaacguguacaucaagaacgccgacaucguggaggaggcgaagaaggucaagcccaccgugguggucaacgccgccaacguguaccugaagcacgggggcggcguggccggggcccugaacaaggcgaccaacaacgccaugcaggucgaguccgacgacuacaucgccacgaacggcccccucaagguggggggcagcugcguccuguccggccacaaccuggccaagcacugccuccacgugguggggcccaacgucaacaagggcgaggacauccagcugcugaagagcgccuacgagaacuucaaccagcacgaggugcuccuggcgccgcugcucuccgccgggaucuucggcgccgaccccauccacagccugcgggugugcgucgacaccgugcgcaccaacguguaccuggccgucuucgacaagaaccucuacgacaagcugguguccagcuuccuggagaugaagagcgagaagcagguggagcagaagaucgccgagauccccaaggaggaggucaagcccuucaucaccgaguccaagccgagcguggagcagcggaagcaggacgacaagaagaucaaggcgugcguggaggaggucacgaccacccucgaggagaccaaguuccugacggagaaccugcuccuguacaucgacaucaacgggaaccugcaccccgacuccgccacccucgugagcgacaucgacaucaccuuccugaagaaggacgcccccuacaucgugggcgacgucgugcaggagggcgugcugaccgccgucgugauccccacgaagaaggccgggggcaccaccgagaugcucgcgaaggcccugcgcaaggugccgaccgacaacuacaucacgaccuaccccgggcagggccugaacggguacaccgucgaggaggccaagaccgugcucaagaagugcaaguccgccuucuacauccugcccagcaucaucuccaacgagaagcaggagauccugggcaccgugagcuggaaccuccgggagaugcuggcgcacgccgaggagacgcgcaagcugaugcccgucugcguggagaccaaggccaucguguccaccauccagcggaaguacaagggcaucaagauccaggagggggucguggacuacggcgcccgcuucuacuucuacaccagcaagacgaccguggccucccugaucaacacccucaacgaccugaacgagacccuggucacgaugccgcucggguacgugacccacggccugaaccuggaggaggcggcccgguacaugcgcagccucaaggugcccgccaccgucuccgugagcucccccgacgccgugaccgccuacaacggguaccugacgagcuccagcaagacccccgaggagcacuucaucgagaccaucucccuggcgggcagcuacaaggacuggagcuacuccggccagagcacccagcucgggaucgaguuccugaagcggggcgacaaguccgucuacuacacgagcaacccgaccaccuuccaccuggacggggaggugaucaccuucgacaaccucaagacgcugcugucccuccgcgaggugcggaccaucaaggucuucaccaccguggacaacaucaaccugcacacgcagguggucgacaugagcaugaccuacggccagcaguucggccccaccuaccuggacggggccgacgugaccaagaucaagccccacaacucccacgagggcaagacguucuacgugcucccgaacgacgacacccugcgcgucgaggccuucgaguacuaccacaccaccgaccccagcuuccuggggcgguacauguccgcccucaaccacacgaagaaguggaaguacccccaggugaacggccugaccagcaucaagugggccgacaacaacugcuaccuggcgaccgugcuccugacccugcagcagaucgagcucaaguucaaccccccggcccugcaggacgccuacuaccgcgcccgggcgggggaggccgccaacuucugcgcccugauccucgccuacugcaacaagacggucggcgagcugggcgacgugcgcgagaccauguccuaccuguuccagcacgcgaaccucgacagcugcaagcggguccugaacguggugugcaagaccugcgggcagcagcagaccacccugaagggcgucgaggccgugauguacauggggacgcucuccuacgagcaguucaagaagggcgugcagauccccugcaccugcgggaagcaggccaccaaguaccugguccagcaggagagccccuucgugaugauguccgcccccccggcccaguacgagcugaagcacggcaccuucacgugcgcgagcgaguacaccggcaacuaccagugcgggcacuacaagcacaucaccuccaaggagacccucuacugcaucgacggcgcccugcugacgaagagcagcgaguacaaggggcccaucaccgacguguucuacaaggagaacuccuacaccaccacgaucaagcccgucaccuacaagcucgacggcguggugugcaccgagaucgaccccaagcuggacaacuacuacaagaaggacaacagcuacuucaccgagcagccgaucgaccugguccccaaccagcccuaccccaacgccuccuucgacaacuucaaguucgugugcgacaacaucaaguucgccgacgaccucaaccagcugacgggguacaagaagccggccagccgcgagcugaaggugaccuucuuccccgaccucaacggcgacgucguggcgaucgacuacaagcacuacacccccuccuucaagaagggcgccaagcugcugcacaagcccaucguguggcacgucaacaacgccaccaacaaggccacguacaagccgaacaccuggugcauccggugccucuggagcaccaagcccguggagaccuccaacagcuucgacgugcugaaguccgaggacgcgcaggggauggacaaccuggccugcgaggaccucaagcccgucagcgaggaggugguggagaaccccacgauccagaaggacguccuggagugcaacgugaagaccaccgagguggucggcgacaucauccugaagccggccaacaacucccucaagaucaccgaggagguggggcacacggaccugauggccgccuacguggacaacagcucccugaccaucaagaagcccaacgagcucagccgcguccugggccugaagacccucgcgacccacgggcuggccgccgugaacuccgugcccugggacacgaucgccaacuacgccaagccguuccugaacaaggucgugagcaccaccaccaacaucgugacgcgcugccucaaccgggucugcaccaacuacaugcccuacuucuucacccugcugcuccagcugugcaccuucacccgcuccacgaacagccggaucaaggcguccaugcccaccaccaucgccaagaacaccgugaagagcgugggcaaguucugccuggaggccagcuucaacuaccucaagucccccaacuucagcaagcugaucaacaucaucaucugguuccugcuccuguccgucugccugggcagccucaucuacuccacggccgcccugggggugcugaugagcaaccucggcaugccguccuacugcaccggguaccgcgagggcuaccugaacagcaccaacgugaccaucgcgacguacugcaccggcuccauccccugcagcgucugccuguccgggcucgacagccuggacaccuaccccucccuggagaccauccagaucacgaucagcuccuucaagugggaccucaccgccuucggccugguggccgagugguuccuggccuacauccucuucacccgguucuucuacgugcuggggcuggccgcgaucaugcagcucuucuucagcuacuucgccguccacuucaucuccaacagcuggcugauguggcugaucaucaaccuggugcagauggcccccaucuccgccauggugcgcauguacaucuucuucgcgagcuucuacuacgucuggaagagcuacgugcacguggucgacggcugcaacuccagcaccugcaugaugugcuacaagcggaaccgcgccacgcggguggagugcaccaccaucgucaacggggugcgccgguccuucuacguguacgccaacggcggcaagggguucugcaagcuccacaacuggaacugcgucaacugcgacaccuucugcgccggcagcacguucaucuccgacgagguggcccgcgaccugagccugcaguucaagcggccgaucaaccccaccgaccaguccagcuacaucguggacuccgucaccgugaagaacgggagcauccaccucuacuucgacaaggcgggccagaagaccuacgagcgccacucccugagccacuucgugaaccuggacaaccuccgggccaacaacacgaaggggucccugcccaucaacgucaucguguucgacggcaagagcaagugcgaggaguccagcgccaaguccgccagcguguacuacucccagcugaugugccagcccauccuccugcuggaccaggcccucgucagcgacgugggcgacagcgcggagguggccgucaagauguucgacgccuacgugaacaccuucuccagcaccuucaacgugccgauggagaagcugaagacccuggucgccacggccgaggcggagcucgccaagaacgugucccuggacaacgugcugagcaccuucaucuccgccgcccgccagggguucgucgacagcgacguggagaccaaggacguggucgagugccucaagcugucccaccagagcgacaucgaggugaccggcgacuccugcaacaacuacaugcugacguacaacaagguggagaacaugaccccccgggaccucggggcgugcaucgacugcagcgcccgccacaucaacgcccaggucgccaagucccacaacaucgcccugaucuggaacgugaaggacuucaugagccuguccgagcagcuccggaagcagauccgcagcgcggccaagaagaacaaccugcccuucaagcugaccugcgccaccacgcgccagguggucaacguggugaccaccaagaucgcccucaagggcggguga

SEQ ID NO: 17739 - RNA, 5841 nt, Artificial Sequence
  SARS-CoV-2__MT846507.1__non-structural protein 3 (NSP3) CDS gc
auggcccccaccaaggugaccuucggcgacgacacggucaucgaggugcagggguacaagagcgugaacaucaccuucgagcuggacgagcgcaucgacaagguccucaacgagaagugcuccgccuacaccguggagcugggcaccgaggugaacgaguucgcgugcgucguggccgacgccgugaucaagacgcugcagccggucagcgagcuccugaccccccuggggaucgaccucgacgagugguccauggccaccuacuaccuguucgacgagagcggcgaguucaagcuggccucccacauguacugcagcuucuacccccccgacgaggacgaggaggagggggacugcgaggaggaggaguucgagccguccacccaguacgaguacggcacggaggacgacuaccagggcaagccccucgaguucggggcgaccagcgccgcccugcagcccgaggaggagcaggaggaggacuggcuggacgacgacucccagcagaccgugggccagcaggacgggagcgaggacaaccagaccacgaccauccagaccaucguggagguccagccccagcucgagauggagcugaccccgguggugcagacgaucgaggucaacuccuucagcggcuaccugaagcucaccgacaacguguacaucaagaacgccgacaucguggaggaggcgaagaaggucaagcccaccgugguggucaacgccgccaacguguaccugaagcacgggggcggcguggccggggcccugaacaaggcgaccaacaacgccaugcaggucgaguccgacgacuacaucgccacgaacggcccccucaagguggggggcagcugcguccuguccggccacaaccuggccaagcacugccuccacgugguggggcccaacgucaacaagggcgaggacauccagcugcugaagagcgccuacgagaacuucaaccagcacgaggugcuccuggcgccgcugcucuccgccgggaucuucggcgccgaccccauccacagccugcgggugugcgucgacaccgugcgcaccaacguguaccuggccgucuucgacaagaaccucuacgacaagcugguguccagcuuccuggagaugaagagcgagaagcagguggagcagaacaucgccgagauccccaaggaggaggucaagcccuucaucaccgaguccaagccgagcguggagcagcggaagcaggacgacaagaagaucaaggcgugcguggaggaggucacgaccacccucgaggagaccaaguuccugacggagaaccugcuccuguacaucgacaucaacgggaaccugcaccccgacuccgccacccucgugagcgacaucgacaucaccuuccugaagaaggacgcccccuacaucgugggcgacgucgugcaggagggcgugcugaccgccgucgugauccccacgaagaaggccgggggcaccaccgagaugcucgcgaaggcccugcgcaagguguccaccgacaacuacaucacgaccuacccggggcagggccugaacggguacaccgucgaggaggccaagaccgugcucaagaagugcaagagcgccuucuacauccugcccuccaucaucagcaacgagaagcaggagauccugggcaccguguccuggaaccuccgggagaugcuggcgcacgccgaggagacgcgcaagcugaugcccgucugcguggagaccaaggccaucgugagcaccauccagcggaaguacaagggcaucaagauccaggagggggucguggacuacggcgcccgcuucuacuucuacaccuccaagacgaccguggccagccugaucaacacccucaacgaccugaacgagacccuggucacgaugccccucggguacgugacccacggccugaaccuggaggaggcggcccgguacaugcgcucccucaaggugccggccaccgucagcguguccagccccgacgccgugaccgccuacaacggguaccugacguccagcuccaagacccccgaggagcacuucaucgagaccaucagccuggcgggcagcuacaaggacugguccuacagcggccaguccacccagcucgggaucgaguuccugaagcggggcgacaagagcgucuacuacacguccaaccccaccaccuuccaccuggacggggaggugaucaccuucgacaaccucaagacgcugcugagccuccgcgaggugcggaccaucaaggucuucaccaccguggacaacaucaaccugcacacgcagguggucgacauguccaugaccuacggccagcaguucggcccgaccuaccuggacggggccgacgugaccaagaucaagccccacaacagccacgagggcaagacguucuacgugcuccccaacgacgacacccugcgcgucgaggccuucgaguacuaccacaccaccgacccguccuuccuggggcgguacaugagcgcccucaaccacacgaagaaguggaaguacccccaggugaacggccugaccuccaucaagugggccgacaacaacugcuaccuggcgaccgcccuccugacccugcagcagaucgagcucaaguucaacccccccgcccugcaggacgccuacuaccgcgcgcgggccggggaggccgccaacuucugcgcccugauccucgcguacugcaacaagacggugggcgagcugggcgacguccgcgagaccaugagcuaccuguuccagcacgccaaccucgacuccugcaagcgggugcugaacgucgugugcaagaccugcgggcagcagcagaccacccugaagggcguggaggccgucauguacauggggacgcucagcuacgagcaguucaagaagggcgugcagaucccgugcaccugcgggaagcaggccaccaaguaccuggugcagcaggaguccagcuucgucaugauguccgccccccccgcgcaguacgagcugaagcacggcaccuucacgugcgccagcgaguacaccggcaacuaccagugcgggcacuacaagcacaucaccagcaaggagacccucuacugcaucgacggcgcccugcugacgaaguccagcgaguacaaggggcccaucaccgacguguucuacaaggagaacuccuacaccaccacgaucaagccggugaccuacaagcucgacggcgucgugugcaccgagaucgaccccaagcuggacaacuacuacaagaaggacaacagcuacuucaccgagcagcccaucgaccuggugcccaaccagccguaccccaacgccuccuucgacaacuucaaguucgucugcgacaacaucaaguucgccgacgaccucaaccagcugacgggguacaagaagcccgcgagccgcgagcugaaggugaccuucuuccccgaccucaacggcgacguggucgccaucgacuacaagcacuacaccccguccuucaagaagggcgccaagcugcugcacaagcccaucguguggcacgugaacaacgccaccaacaaggcgacguacaagcccaacaccuggugcauccggugccucuggagcaccaagcccgucgagaccuccaacagcuucgacgugcugaaguccgaggacgcccaggggauggacaaccuggccugcgaggaccucaagccggugagcgaggaggucguggagaaccccacgauccagaaggacgugcuggagugcaacgucaagaccaccgagguggugggcgacaucauccugaagcccgccaacaacucccucaagaucaccgaggaggucgggcacacggaccugauggccgcguacguggacaacagcucccugaccaucaagaagcccaacgagcucagccgcgugcugggccugaagacccucgccacccacgggcuggccgccgucaacuccgugccgugggacacgaucgccaacuacgcgaagcccuuccugaacaagguggucagcaccaccaccaacaucgugacgcgcugccucaaccgggugugcaccaacuacaugcccuacuucuucacccugcugcuccagcugugcaccuucacccgcuccacgaacagccggaucaaggccagcaugccgaccaccaucgccaagaacaccgucaaguccgugggcaaguucugccuggaggccagcuucaacuaccucaagucccccaacuucagcaagcugaucaacaucaucaucugguuccugcuccuguccgugugccugggcagccucaucuacuccacggccgcgcuggggguccugaugagcaaccucggcaugcccuccuacugcaccggguaccgcgagggcuaccugaacagcaccaacgugaccaucgccacguacugcaccggcuccauccccugcagcgugugccuguccgggcucgacagccuggacaccuacccgucccuggagaccauccagaucacgaucagcuccuucaagugggaccucaccgccuucggccuggucgccgagugguuccuggccuacauccucuucacccgguucuucuacgugcuggggcuggcggccaucaugcagcucuucuucagcuacuucgccgugcacuucaucuccaacagcuggcugauguggcugaucaucaaccugguccagauggcccccaucagcgcgauggugcgcauguacaucuucuucgccuccuucuacuacguguggaagagcuacguccacgugguggacggcugcaacuccagcaccugcaugaugugcuacaagcggaaccgcgccacgcgggucgagugcaccaccaucgugaacgggguccgccgguccuucuacguguacgccaacggcggcaagggguucugcaagcuccacaacuggaacugcgugaacugcgacaccuucugcgccggcagcacguucaucuccgacgaggucgcgcgcgaccugagccugcaguucaagcggcccaucaaccccaccgaccaguccagcuacaucguggacuccgugaccgucaagaacgggagcauccaccucuacuucgacaaggccggccagaagaccuacgagcgccacucccugagccacuucgugaacuucgacaaccugcgggccaacaacacgaaggggucccucccgaucaacgugaucgucuucgacggcaagagcaagugcgaggaguccagcgccaaguccgccagcguguacuacagccagcugaugugccagcccauccugcuccuggaccaggcgcugguguccgacgucggcgacagcgccgagguggccgugaagauguucgacgccuacgucaacaccuucuccagcaccuucaacgugcccauggagaagcucaagacccugguggccacggcggaggccgagcuggccaagaacgucucccucgacaacgugcugagcaccuucaucuccgccgcgcgccagggguucguggacagcgacgucgagaccaaggacgugguggagugccugaagcucucccaccagagcgacaucgaggucaccggcgacuccugcaacaacuacaugcugacguacaacaagguggagaacaugaccccccgggaccugggggccugcaucgacugcagcgcccgccacaucaacgcccagguggccaagucccacaacaucgcgcucaucuggaacgucaaggacuucaugagccuguccgagcagcugcggaagcagauccgcagcgccgccaagaagaacaaccucccguucaagcugaccugcgccaccacgcgccagguggugaacgucgugaccaccaagaucgcccugaagggcggguga

SEQ ID NO: 17740 - RNA, 5841 nt, Artificial Sequence
  SARS-CoV-2__MT846513.1__non-structural protein 3 (NSP3) CDS gc
auggcccccaccaaggugaccuucggcgacgacacggucaucgaggugcagggguacaagagcgugaacaucaccuucgagcuggacgagcgcaucgacaagguccucaacgagaagugcuccgccuacaccguggagcugggcaccgaggugaacgaguucgcgugcgucguggccgacgccgugaucaagacgcugcagccggucagcgagcuccugaccccccuggggaucgaccucgacgagugguccauggccaccuacuaccuguucgacgagagcggcgaguucaagcuggccucccacauguacugcagcuucuacccccccgacgaggacgaggaggagggggacugcgaggaggaggaguucgagccguccacccaguacgaguacggcacggaggacgacuaccagggcaagccccucgaguucggggcgaccagcgccgcccugcagcccgaggaggagcaggaggaggacuggcuggacgacgacucccagcagaccgugggccagcaggacgggagcgaggacaaccagaccacgaccauccagaccaucguggagguccagccccagcucgagauggagcugaccccgguggugcagacgaucgaggucaacuccuucagcggcuaccugaagcucaccgacaacguguacaucaagaacgccgacaucguggaggaggcgaagaaggucaagcccaccgugguggucaacgccgccaacguguaccugaagcacgggggcggcguggccggggcccugaacaaggcgaccaacaacgccaugcaggucgaguccgacgacuacaucgccacgaacggcccccucaagguggggggcagcugcguccuguccggccacaaccuggccaagcacugccuccacgugguggggcccaacgucaacaagggcgaggacauccagcugcugaagagcgccuacgagaacuucaaccagcacgaggugcuccuggcgccgcugcucuccgccgggaucuucggcgccgaccccauccacagccugcgggugugcgucgacaccgugcgcaccaacguguaccuggccgucuucgacaagaaccucuacgacaagcugguguccagcuuccuggagaugaagagcgagaagcagguggagcagaagaucgccgagauccccaaggaggaggucaagcccuucaucaccgaguccaagccgagcguggagcagcggaagcaggacgacaagaagaucaaggcgugcguggaggaggucacgaccacccucgaggagaccaaguuccugacggagaaccugcuccuguacaucgacaucaacgggaaccugcaccccgacuccgccacccucgugagcgacaucgacaucaccuuccugaagaaggacgcccccuacaucgugggcgacgucgugcaggagggcgugcugaccgccgucgugauccccacgaagaaggccgggggcaccaccgagaugcucgcgaaggcccugcgcaaggugccgaccgacaacuacaucacgaccuaccccgggcagggccugaacggguacaccgucgaggaggccaagaccgugcucaagaagugcaaguccgccuucuacauccugcccagcaucaucuccaacgagaagcaggagauccugggcaccgugagcuggaaccuccgggagaugcugacgcacgcggaggagacccgcaagcugaugcccgucugcguggagaccaaggccaucguguccaccauccagcggaaguacaagggcaucaagauccaggagggggucguggacuacggcgcccgcuucuacuucuacacgagcaagaccaccguggccucccugaucaacacccucaacgaccugaacgagacgcuggucaccaugccgcucggguacgugacccacggccugaaccuggaggaggccgcgcgguacaugcgcagccucaaggugcccgccaccgucuccgugagcucccccgacgccgugacggccuacaacggguaccugaccagcuccagcaagacccccgaggagcacuucaucgagaccaucucccuggccggcagcuacaaggacuggagcuacuccggccagagcacgcagcucgggaucgaguuccugaagcggggcgacaaguccgucuacuacaccagcaacccgaccaccuuccaccuggacggggaggugaucacguucgacaaccucaagacccugcugucccuccgcgaggugcggaccaucaaggucuucaccacgguggacaacaucaaccugcacacccagguggucgacaugagcaugaccuacggccagcaguucggccccaccuaccuggacggggcggacgugacgaagaucaagccccacaacucccacgagggcaagaccuucuacgugcucccgaacgacgacacccugcgcgucgaggccuucgaguacuaccacaccacggaccccagcuuccuggggcgguacauguccgcccucaaccacaccaagaaguggaaguacccccaggugaacggccugaccagcaucaagugggccgacaacaacugcuaccuggccaccgcgcuccugacgcugcagcagaucgagcucaaguucaaccccccggcccugcaggacgccuacuaccgcgcccgggcgggggaggccgccaacuucugcgcccugauccucgccuacugcaacaagaccgugggcgagcugggcgacguccgcgagaccauguccuaccuguuccagcacgcgaaccucgacagcugcaagcgggugcugaacgucgugugcaagaccugcgggcagcagcagaccacgcugaagggcguggaggccgucauguacauggggacccucuccuacgagcaguucaagaagggcgugcagauccccugcaccugcgggaagcaggccaccaaguaccuggugcagcaggagagccccuucgucaugauguccgcccccccggcccaguacgagcugaagcacggcacguucaccugcgcgagcgaguacaccggcaacuaccagugcgggcacuacaagcacaucaccuccaaggagacgcucuacugcaucgacggcgcccugcugaccaagagcagcgaguacaaggggcccaucaccgacguguucuacaaggagaacuccuacaccacgaccaucaagcccgugaccuacaagcucgacggcgucgugugcaccgagaucgaccccaagcuggacaacuacuacaagaaggacaacagcuacuucacggagcagccgaucgaccuggugcccaaccagcccuaccccaacgccuccuucgacaacuucaaguucgucugcgacaacaucaaguucgccgacgaccucaaccagcugaccggguacaagaagccggccagccgcgagcugaaggugaccuucuuccccgaccucaacggcgacguggucgcgaucgacuacaagcacuacacccccuccuucaagaagggcgccaagcugcugcacaagcccaucguguggcacgugaacaacgccacgaacaaggccaccuacaagccgaacaccuggugcauccggugccucuggagcaccaagcccgucgagacguccaacagcuucgacgugcugaaguccgaggacgcgcaggggauggacaaccuggccugcgaggaccucaagcccgugagcgaggaggucguggagaaccccaccauccagaaggacgugcuggagugcaacgucaagaccaccgagguggugggcgacaucauccugaagccggccaacaacucccucaagaucacggaggaggucgggcacaccgaccugauggccgccuacguggacaacagcucccugaccaucaagaagcccaacgagcucagccgcgugcugggccugaagacccucgcgacgcacgggcuggccgccgucaacuccgugcccugggacaccaucgccaacuacgccaagccguuccugaacaagguggucagcaccaccacgaacaucgugacccgcugccucaaccgggugugcaccaacuacaugcccuacuucuucacccugcugcuccagcugugcaccuucacgcgcuccaccaacagccggaucaaggcguccaugcccaccaccaucgccaagaacacggucaagagcgugggcaaguucugccuggaggccagcuucaacuaccucaagucccccaacuucagcaagcugaucaacaucaucaucugguuccugcuccuguccgugugccugggcagccucaucuacuccaccgccgcccuggggguccugaugagcaaccucggcaugccguccuacugcaccggguaccgcgagggcuaccugaacagcaccaacgugacgaucgcgaccuacugcaccggcuccauccccugcagcgugugccuguccgggcucgacagccuggacaccuaccccucccuggagacgauccagaucaccaucagcuccuucaagugggaccucaccgccuucggccuggucgccgagugguuccuggccuacauccucuucacccgguucuucuacgugcuggggcuggccgcgaucaugcagcucuucuucagcuacuucgccgugcacuucaucuccaacagcuggcugauguggcugaucaucaaccugguccagauggcccccaucuccgccauggugcgcauguacaucuucuucgcgagcuucuacuacguguggaagagcuacguccacgugguggacggcugcaacuccagcacgugcaugaugugcuacaagcggaaccgcgccacccgggucgagugcaccaccaucgugaacgggguccgccgguccuucuacguguacgccaacggcggcaagggguucugcaagcuccacaacuggaacugcgugaacugcgacacguucuacgccggcagcaccuucaucuccgacgaggucgcccgcgaccugagccugcaguucaagcggccgaucaaccccaccgaccaguccagcuacaucguggacuccgugaccgucaagaacgggagcauccaccucuacuucgacaaggcgggccagaagacguacgagcgccacucccugagccacuucgugaaccuggacaaccuccgggccaacaacaccaaggggucccugcccaucaacgugaucgucuucgacggcaagagcaagugcgaggaguccagcgccaaguccgccagcguguacuacucccagcugaugugccagcccauccuccugcuggaccaggcccucgugagcgacgucggcgacagcgcggagguggccgugaagauguucgacgccuacgucaacaccuucuccagcaccuucaacgugccgauggagaagcugaagacgcugguggccaccgccgaggcggagcucgccaagaacgucucccuggacaacgugcugagcaccuucaucuccgccgcccgccagggguucguggacagcgacgucgagaccaaggacgugguggagugccucaagcugucccaccagagcgacaucgaggucacgggcgacuccugcaacaacuacaugcugaccuacaacaagguggagaacaugaccccccgggaccucggggcgugcaucgacugcagcgcccgccacaucaacgcccagguggccaagucccacaacaucgcccugaucuggaacgucaaggacuucaugagccuguccgagcagcuccggaagcagauccgcagcgcggccaagaagaacaaccugcccuucaagcugaccugcgccacgacccgccagguggugaacgucgugaccaccaagaucgcccucaagggcggguga

SEQ ID NO: 17741 - RNA, 5841 nt, Artificial Sequence
  SARS-CoV-2__MT846520.1__non-structural protein 3 (NSP3) CDS gc
auggcccccaccaaggugaccuucggcgacgacacggucaucgaggugcagggguacaagagcgugaacaucaccuucgagcuggacgagcgcaucgacaagguccucaacgagaagugcuccgccuacaccguggagcugggcaccgaggugaacgaguucgcgugcgucguggccgacgccgugaucaagacgcugcagccggucagcgagcuccugaccccccuggggaucgaccucgacgagugguccauggccaccuacuaccuguucgacgagagcggcgaguucaagcuggccucccacauguacugcagcuucuacccccccgacgaggacgaggaggagggggacugcgaggaggaggaguucgagccguccacccaguacgaguacggcacggaggacgacuaccagggcaagccccucgaguucggggcgaccagcgccgcccugcagcccgaggaggagcaggaggaggacuggcuggacgacgacucccagcagaccgugggccagcaggacgggagcgaggacaaccagaccacgaccauccagaccaucguggagguccagccccagcucgagauggagcugaccccgguggugcagacgaucgaggucaacuccuucagcggcuaccugaagcucaccgacaacguguacaucaagaacgccgacaucguggaggaggcgaagaaggucaagcccaccgugguggucaacgccgccaacguguaccugaagcacgggggcggcguggccggggcccugaacaaggcgaccaacaacgccaugcaggucgaguccgacgacuacaucgccacgaacggcccccucaagguggggggcagcugcguccuguccggccacaaccuggccaagcacugccuccacgugguggggcccaacgucaacaagggcgaggacauccagcugcugaagagcgccuacgagaacuucaaccagcacgaggugcuccuggcgccgcugcucuccgccgggaucuucggcgccgaccccauccacagccugcgggugugcgucgacaccgugcgcaccaacguguaccuggccgucuucgacaagaaccucuacgacaagcugguguccagcuuccuggagaugaagagcgagaagcagguggagcagaagaucgccgagauccccaaggaggaggucaagcccuucaucaccgaguccaagccgagcguggagcagcggaagcaggacgacaagaagaucaaggcgugcguggaggaggucacgaccacccucgaggagaccaaguuccugacggagaaccugcuccuguacaucgacaucaacgggaaccugcaccccgacuccgccacccucgugagcgacaucgacaucaccuuccugaagaaggacgcccccuacaucgugggcgacgucgugcaggagggcgugcugaccgccgucgugauccccacgaagaaggccgggggcaccaccgagaugcucgcgaaggcccugcgcaaggugccgaccgacaacuacaucacgaccuaccccgggcagggccugaacggguacaccgucgaggaggccaagaccgugcucaagaagugcaaguccgccuucuacauccugcccagcaucaucuccaacgagaagcaggagauccugggcaccgugagcuggaaccuccgggagaugcuggcgcacgccgaggagacgcgcaagcugaugcccgucugcguggagaccaaggccaucguguccaccauccagcggaaguacaagggcaucaagauccaggagggggucguggacuacggcgcccgcuucuacuucuacaccagcaagacgaccguggccucccugaucaacacccucaacgaccugaacgagacccuggucacgaugccgcucggguacgugacccacggccugaaccuggaggaggcggcccgguacaugcgcagccucaaggugcccgccaccgucuccgugagcucccccgacgccgugaccgccuacaacggguaccugacgagcuccagcaagacccccgaggagcacuucaucgagaccaucucccuggcgggcagcuacaaggacuggagcuacuccggccagagcacccagcucgggaucgaguuccugaagcggggcgacaaguccgucuacuacacgagcaacccgaccaccuuccaccuggacggggaggugaucaccuucgacaaccucaagacgcugcugucccuccgcgaggugcggaccaucaaggucuucaccaccguggacaacaucaaccugcacacgcagguggucgacaugagcaugaccuacggccagcaguucggccccaccuaccuggacggggccgacgugaccaagaucaagccccacaacucccacgagggcaagacguucuacgugcucccgaacgacgacacccugcgcgucgaggccuucgaguacuaccacaccaccgaccccagcuuccuggggcgguacauguccgcccucaaccacacgaagaaguggaaguacccccaggugaacggccugaccagcaucaagugggccgacaacaacugcuaccuggcgaccgcccuccugacccugcagcagaucgagcucaaguucaaccccccggcccugcaggacgccuacuaccgcgcgcgggccggggaggccgccaacuucugcgcccugauccucgcguacugcaacaagacggugggcgagcugggcgacguccgcgagaccauguccuaccuguuccagcacgccaaccucgacagcugcaagcgggugcugaacgucgugugcaagaccugcgggcagcagcagaccacccugaagggcguggaggccgucauguacauggggacgcucuccuacgagcaguucaagaagggcgugcagauccccugcaccugcgggaagcaggccaccaaguaccuggugcagcaggagagccccuucgucaugauguccgcccccccggcgcaguacgagcugaagcacggcaccuucacgugcgccagcgaguacaccggcaacuaccagugcgggcacuacaagcacaucaccuccaaggagacccucuacugcaucgacggcgcccugcugacgaagagcagcgaguacaaggggcccaucaccgacguguucuacaaggagaacuccuacaccaccacgaucaagcccgugaccuacaagcucgacggcgucgugugcaccgagaucgaccccaagcuggacaacuacuacaagaaggacaacagcuacuucaccgagcagccgaucgaccuggugcccaaccagcccuaccccaacgccuccuucgacaacuucaaguucgucugcgacaacaucaaguucgccgacgaccucaaccagcugacgggguacaagaagccggcgagccgcgagcugaaggugaccuucuuccccgaccucaacggcgacguggucgccaucgacuacaagcacuacacccccuccuucaagaagggcgccaagcugcugcacaagcccaucguguggcacgugaacaacgccaccaacaaggcgacguacaagccgaacaccuggugcauccggugccucuggagcaccaagcccgucgagaccuccaacagcuucgacgugcugaaguccgaggacgcccaggggauggacaaccuggccugcgaggaccucaagcccgugagcgaggaggucguggagaaccccacgauccagaaggacgugcuggagugcaacgucaagaccaccgagguggugggcgacaucauccugaagccggccaacaacucccucaagaucaccgaggaggucgggcacacggaccugauggccgcguacguggacaacagcucccugaccaucaagaagcccaacgagcucagccgcgugcugggccugaagacccucgccacccacgggcuggccgccgucaacuccgugcccugggacacgaucgccaacuacgcgaagccguuccugaacaagguggucagcaccaccaccaacaucgugacgcgcugccucaaccgggugugcaccaacuacaugcccuacuucuucacccugcugcuccagcugugcaccuucacccgcuccacgaacagccggaucaaggccuccaugcccaccaccaucgucaagaacaccgugaagagcgugggcaaguucugccuggaggccagcuucaacuaccucaagucccccaacuucagcaagcugaucaacaucaucaucugguuccugcuccuguccgucugccugggcagccucaucuacuccacggccgcccugggggugcugaugagcaaccucggcaugccguccuacugcaccggguaccgcgagggcuaccugaacagcaccaacgugaccaucgcgacguacugcaccggcuccauccccugcagcgucugccuguccgggcucgacagccuggacaccuaccccucccuggagaccauccagaucacgaucagcuccuucaagugggaccucaccgccuucggccugguggccgagugguuccuggccuacauccucuucacccgguucuucuacgugcuggggcuggccgcgaucaugcagcucuucuucagcuacuucgccguccacuucaucuccaacagcuggcugauguggcugaucaucaaccuggugcagauggcccccaucuccgccauggugcgcauguacaucuucuucgcgagcuucuacuacgucuggaagagcuacgugcacguggucgacggcugcaacuccagcaccugcaugaugugcuacaagcggaaccgcgccacgcggguggagugcaccaccaucgucaacggggugcgccgguccuucuacguguacgccaacggcggcaagggguucugcaagcuccacaacuggaacugcgucaacugcgacaccuucugcgccggcagcacguucaucuccgacgagguggcccgcgaccugagccugcaguucaagcggccgaucaaccccaccgaccaguccagcuacaucguggacuccgucaccgugaagaacgggagcauccaccucuacuucgacaaggcgggccagaagaccuacgagcgccacucccugagccacuucgugaaccuggacaaccuccgggccaacaacacgaaggggucccugcccaucaacgucaucguguucgacggcaagagcaagugcgaggaguccagcgccaaguccgccagcguguacuacucccagcugaugugccagcccauccuccugcuggaccaggcccucgucagcgacgugggcgacagcgcggagguggccgucaagauguucgacgccuacgugaacaccuucuccagcaccuucaacgugccgauggagaagcugaagacccuggucgccacggccgaggcggagcucgccaagaacgugucccuggacaacgugcugagcaccuucaucuccgccgcccgccagggguucgucgacagcgacguggagaccaaggacguggucgagugccucaagcugucccaccagagcgacaucgaggugaccggcgacuccugcaacaacuacaugcugacguacaacaagguggagaacaugaccccccgggaccucggggcgugcaucgacugcagcgcccgccacaucaacgcccaggucgccaagucccacaacaucgcccugaucuggaacgugaaggacuucaugagccuguccgagcagcuccggaagcagauccgcagcgcggccaagaagaacaaccugcccuucaagcugaccugcgccaccacgcgccagguggucaacguggugaccaccaagaucgcccucaagggcggguga

SEQ ID NO: 17742 - RNA, 5841 nt, Artificial Sequence
  SARS-CoV-2__MT846521.1__non-structural protein 3 (NSP3) CDS gc
auggcccccaccaaggugaccuucggcgacgacacggucaucgaggugcagggguacaagagcgugaacaucaccuucgagcuggacgagcgcaucgacaagguccucaacgagaagugcuccgccuacaccguggagcugggcaccgaggugaacgaguucgcgugcgucguggccgacgccgugaucaagacgcugcagccggucagcgagcuccugaccccccuggggaucgaccucgacgagugguccauggccaccuacuaccuguucgacgagagcggcgaguucaagcuggccucccacauguacugcagcuucuacccccccgacgaggacgaggaggagggggacugcgaggaggaggaguucgagccguccacccaguacgaguacggcacggaggacgacuaccagggcaagccccucgaguucggggcgaccagcgccgcccugcagcccgaggaggagcaggaggaggacuggcuggacgacgacucccagcagaccgugggccagcaggacgggagcgaggacaaccagaccacgaccauccagaccaucguggagguccagccccagcucgagauggagcugaccccgguggugcagacgaucgaggucaacuccuucagcggcuaccugaagcucaccgacaacguguacaucaagaacgccgacaucguggaggaggcgaagaaggucaagcccaccgugguggucaacgccgccaacguguaccugaagcacgggggcggcguggccggggcccugaacaaggcgaccaacaacgccaugcaggucgaguccgacgacuacaucgccacgaacggcccccucaagguggggggcagcugcguccuguccggccacaaccuggccaagcacugccuccacgugguggggcccaacgucaacaagggcgaggacauccagcugcugaagagcgccuacgagaacuucaaccagcacgaggugcuccuggcgccgcugcucuccgccgggaucuucggcgccgaccccauccacagccugcgggugugcgucgacaccgugcgcaccaacguguaccuggccgucuucgacaagaaccucuacgacaagcugguguccagcuuccuggagaugaagagcgagaagcagguggagcagaagaucgccgagauccccaaggaggaggucaagcccuucaucaccgaguccaagccgagcguggagcagcggaagcaggacgacaagaagaucaaggcgugcguggaggaggucacgaccacccucgaggagaccaaguuccugacggagaaccugcuccuguacaucgacaucaacgggaaccugcaccccgacuccgccacccucgugagcgacaucgacaucaccuuccugaagaaggacgcccccuacaucgugggcgacgucgugcaggagggcgugcugaccgccgucgugauccccacgaagaaggccgggggcaccaccgagaugcucgcgaaggcccugcgcaaggugccgaccgacaacuacaucacgaccuaccccgggcagggccugaacggguacaccgucgaggaggccaagaccgugcucaagaagugcaaguccgccuucuacauccugcccagcaucaucuccaacgagaagcaggagauccugggcaccgugagcuggaaccuccgggagaugcugacgcacgcggaggagacccgcaagcugaugcccgucugcguggagaccaaggccaucguguccaccauccagcggaaguacaagggcaucaagauccaggagggggucguggacuacggcgcccgcuucuacuucuacacgagcaagaccaccguggccucccugaucaacacccucaacgaccugaacgagacgcuggucaccaugccgcucggguacgugacccacggccugaaccuggaggaggccgcgcgguacaugcgcagccucaaggugcccgccaccgucuccgugagcucccccgacgccgugacggccuacaacggguaccugaccagcuccagcaagacccccgaggagcacuucaucgagaccaucucccuggccggcagcuacaaggacuggagcuacuccggccagagcacgcagcucgggaucgaguuccugaagcggggcgacaaguccgucuacuacaccagcaacccgaccaccuuccaccuggacggggaggugaucacguucgacaaccucaagaccauccugucccugcgcgaggugcggaccaucaaggucuucaccacgguggacaacaucaaccuccacacccagguggucgacaugagcaugaccuacggccagcaguucggccccaccuaccuggacggggcggacgugacgaagaucaagccccacaacucccacgagggcaagaccuucuacgugcugccgaacgacgacacccuccgcgucgaggccuucgaguacuaccacaccacggaccccagcuuccuggggcgguacauguccgcccugaaccacaccaagaaguggaaguacccccaggugaacggccucaccagcaucaagugggccgacaacaacugcuaccuggccaccgcgcugcucacgcugcagcagaucgagcugaaguucaaccccccggcccuccaggacgccuacuaccgcgcccgggcgggggaggccgccaacuucugcgcccugauccuggccuacugcaacaagaccgugggcgagcucggcgacguccgcgagaccauguccuaccuguuccagcacgcgaaccuggacagcugcaagcgggugcucaacgucgugugcaagaccugcgggcagcagcagaccacgcugaagggcguggaggccgucauguacauggggacccuguccuacgagcaguucaagaagggcgugcagauccccugcaccugcgggaagcaggccaccaaguaccucgugcagcaggagagccccuucgucaugauguccgcccccccggcccaguacgagcugaagcacggcacguucaccugcgcgagcgaguacaccggcaacuaccagugcgggcacuacaagcacaucaccuccaaggagacgcuguacugcaucgacggcgcccuccugaccaagagcagcgaguacaaggggcccaucaccgacguguucuacaaggagaacuccuacaccacgaccaucaagcccgugaccuacaagcuggacggcgucgugugcaccgagaucgaccccaagcucgacaacuacuacaagaaggacaacagcuacuucacggagcagccgaucgaccuggugcccaaccagcccuaccccaacgccuccuucgacaacuucaaguucgucugcgacaacaucaaguucgccgacgaccugaaccagcucaccggguacaagaagccggccagccgcgagcugaaggugaccuucuuccccgaccugaacggcgacguggucgcgaucgacuacaagcacuacacccccuccuucaagaagggcgccaagcuccugcacaagcccaucguguggcacgugaacaacgccacgaacaaggccaccuacaagccgaacaccuggugcauccggugccuguggagcaccaagcccgucgagacguccaacagcuucgacgugcucaaguccgaggacgcgcaggggauggacaaccuggccugcgaggaccugaagcccgugagcgaggaggucguggagaaccccaccauccagaaggacgugcucgagugcaacgucaagaccaccgagguggugggcgacaucauccugaagccggccaacaacucccugaagaucacggaggaggucgggcacaccgaccucauggccgccuacguggacaacagcucccugaccaucaagaagcccaacgagcugagccgcgugcucggccugaagacccuggcgacgcacgggcucgccgccgucaacuccgugcccugggacaccaucgccaacuacgccaagccguuccugaacaagguggucagcaccaccacgaacaucgugacccgcugccugaaccgggugugcaccaacuacaugcccuacuucuucacccuccugcugcagcucugcaccuucacgcgcuccaccaacagccggaucaaggcguccaugcccaccaccaucgccaagaacacggucaagagcgugggcaaguucugccuggaggccagcuucaacuaccugaagucccccaacuucagcaagcucaucaacaucaucaucugguuccugcugcucuccgugugccugggcagccugaucuacuccaccgccgcccucgggguccugaugagcaaccugggcaugccguccuacugcaccggguaccgcgagggcuaccucaacagcaccaacgugacgaucgcgaccuacugcaccggcuccauccccugcagcgugugccuguccgggcuggacagccucgacaccuaccccucccuggagacgauccagaucaccaucagcuccuucaagugggaccugaccgccuucggccucgucgccgagugguuccuggccuacauccuguucacccgguucuucuacgugcucgggcuggccgcgaucaugcagcuguucuucagcuacuucgccgugcacuucaucuccaacagcuggcucauguggcugaucaucaaccugguccagauggcccccaucuccgccauggugcgcauguacaucuucuucgcgagcuucuacuacguguggaagagcuacguccacgugguggacggcugcaacuccagcacgugcaugaugugcuacaagcggaaccgcgccacccgggucgagugcaccaccaucgugaacgggguccgccgguccuucuacguguacgccaacggcggcaagggguucugcaagcugcacaacuggaacugcgugaacugcgacacguucugcgccggcagcaccuucaucuccgacgaggucgcccgcgaccucagccugcaguucaagcggccgaucaaccccaccgaccaguccagcuacaucguggacuccgugaccgucaagaacgggagcauccaccuguacuucgacaaggcgggccagaagacguacgagcgccacucccucagccacuucgugaaccuggacaaccugcgggccaacaacaccaaggggucccuccccaucaacgugaucgucuucgacggcaagagcaagugcgaggaguccagcgccaaguccgccagcguguacuacucccagcugaugugccagcccauccugcuccuggaccaggcccuggugagcgacgucggcgacagcgcggagguggccgugaagauguucgacgccuacgucaacaccuucuccagcaccuucaacgugccgauggagaagcucaagacgcugguggccaccgccgaggcggagcuggccaagaacgucucccucgacaacgugcugagcaccuucaucuccgccgcccgccagggguucguggacagcgacgucgagaccaaggacgugguggagugccugaagcucucccaccagagcgacaucgaggucacgggcgacuccugcaacaacuacaugcugaccuacaacaagguggagaacaugaccccccgggaccugggggcgugcaucgacugcagcgcccgccacaucaacgcccagguggccaagucccacaacaucgcccucaucuggaacgucaaggacuucaugagccuguccgagcagcugcggaagcagauccgcagcgcggccaagaagaacaaccuccccuucaagcugaccugcgccacgacccgccagguggugaacgucgugaccaccaagaucgcccugaagggcggguga

SEQ ID NO: 17743 - RNA, 5841 nt, Artificial Sequence
  SARS-CoV-2__MT846527.1__non-structural protein 3 (NSP3) CDS gc
auggcccccaccaaggugaccuucggcgacgacacggucaucgaggugcagggguacaagagcgugaacaucaccuucgagcuggacgagcgcaucgacaagguccucaacgagaagugcuccgccuacaccguggagcugggcaccgaggugaacgaguucgcgugcgucgugguggacgccgucaucaagacgcugcagccggugagcgagcuccugaccccccuggggaucgaccucgacgagugguccauggccaccuacuaccuguucgacgagagcggcgaguucaagcuggccucccacauguacugcagcuucuacccccccgacgaggacgaggaggagggggacugcgaggaggaggaguucgagccguccacccaguacgaguacggcacggaggacgacuaccagggcaagccccucgaguucggggccaccagcgcggcccugcagcccgaggaggagcaggaggaggacuggcuggacgacgacucccagcagaccgugggccagcaggacgggagcgaggacaaccagaccacgaccauccagaccaucgucgaggugcagccccagcucgagauggagcugaccccggugguccagacgaucgaggugaacuccuucagcggcuaccugaagcucaccgacaacguguacaucaagaacgccgacaucgucgaggaggccaagaaggugaagcccaccguggucgugaacgcggccaacguguaccugaagcacgggggcggcgucgccggggcccugaacaaggccaccaacaacgcgaugcagguggaguccgacgacuacaucgccacgaacggcccccucaaggucgggggcagcugcgugcuguccggccacaaccuggccaagcacugccuccacguggucgggcccaacgugaacaagggcgaggacauccagcugcugaagagcgccuacgagaacuucaaccagcacgaggugcuccuggccccgcugcucuccgcggggaucuucggcgccgaccccauccacagccugcgggucugcguggacaccgugcgcaccaacgucuaccuggccguguucgacaagaaccucuacgacaagcugguguccagcuuccuggagaugaagagcgagaagcaggucgagcagaagaucgccgagauccccaaggaggaggugaagcccuucaucaccgaguccaagccgagcguggagcagcggaagcaggacgacaagaagaucaaggccugcgucgaggaggugacgaccacccucgaggagaccaaguuccugacggagaaccugcuccuguacaucgacaucaacgggaaccugcaccccgacuccgcgacccucgugagcgacaucgacaucaccuuccugaagaaggacgcccccuacaucgucggcgacguggugcaggagggcguccugaccgccguggugauccccacgaagaaggccgggggcaccaccgagaugcucgccaaggcgcugcgcaaggucccgaccgacaacuacaucacgaccuaccccgggcagggccugaacggguacaccguggaggaggccaagaccgugcucaagaagugcaaguccgccuucuacauccugcccagcaucaucuccaacgagaagcaggagauccugggcaccgucagcuggaaccuccgggagaugcuggcccacgcggaggagacgcgcaagcugaugcccgugugcguggagaccaaggccaucgucuccaccauccagcggaaguacaagggcaucaagauccaggagggggugguggacuacggcgcccgcuucuacuucuacaccagcaagacgaccgucgccucccugaucaacacccucaacgaccugaacgagacccuggugacgaugccgcucggguacgugacccacggccugaaccuggaggaggccgcgcgguacaugcgcagccucaagguccccgccaccguguccgugagcucccccgacgccgucaccgccuacaacggguaccugacgagcuccagcaagacccccgaggagcacuucaucgagaccaucucccuggccggcagcuacaaggacuggagcuacuccggccagagcacccagcucgggaucgaguuccugaagcggggcgacaaguccguguacuacacgagcaacccgaccaccuuccaccuggacggggaggugaucaccuucgacaaccucaagacgcugcugucccuccgcgagguccggaccaucaagguguucaccaccguggacaacaucaaccugcacacgcaggucguggacaugagcaugaccuacggccagcaguucggccccaccuaccuggacggggcggacgugaccaagaucaagccccacaacucccacgagggcaagacguucuacguccucccgaacgacgacacccugcgcguggaggccuucgaguacuaccacaccaccgaccccagcuuccuggggcgguacauguccgcccucaaccacacgaagaaguggaaguacccccaggugaacggccugaccagcaucaagugggccgacaacaacugcuaccuggccaccgcgcuccugacccugcagcagaucgagcucaaguucaaccccccggcccugcaggacgccuacuaccgcgcccgggcgggggaggccgccaacuucugcgcccugauccucgccuacugcaacaagacggucggcgagcugggcgacgugcgcgagaccauguccuaccuguuccagcacgcgaaccucgacagcugcaagcggguccugaacguggugugcaagaccugcgggcagcagcagaccacccugaagggcgucgaggccgugauguacauggggacgcucuccuacgagcaguucaagaagggcgugcagauccccugcaccugcgggaagcaggccaccaaguaccugguccagcaggagagccccuucgugaugauguccgcccccccggcccaguacgagcugaagcacggcaccuucacgugcgcgagcgaguacaccggcaacuaccagugcgggcacuacaagcacaucaccuccaaggagacccucuacugcaucgacggcgcccugcugacgaagagcagcgaguacaaggggcccaucaccgacguguucuacaaggagaacuccuacaccaccacgaucaagcccgucaccuacaagcucgacggcguggugugcaccgagaucgaccccaagcuggacaacuacuacaagaaggacaacagcuacuucaccgagcagccgaucgaccugguccccaaccagcccuaccccaacgccuccuucgacaacuucaaguucgugugcgacaacaucaaguucgccgacgaccucaaccagcugacgggguacaagaagccggccagccgcgagcugaaggugaccuucuuccccgaccucaacggcgacgucguggcgaucgacuacaagcacuacacccccuccuucaagaagggcgccaagcugcugcacaagcccaucguguggcacgucaacaacgccaccaacaaggccacguacaagccgaacaccuggugcauccggugccucuggagcaccaagcccguggagaccuccaacagcuucgacgugcugaaguccgaggacgcgcaggggauggacaaccuggccugcgaggaccucaagcccgucagcgaggaggugguggagaaccccacgauccagaaggacguccuggagugcaacgugaagaccaccgagguggucggcgacaucauccugaagccggccaacaacucccucaagaucaccgaggagguggggcacacggaccugauggccgccuacguggacaacagcucccugaccaucaagaagcccaacgagcucagccgcguccugggccugaagacccucgcgacccacgggcuggccgccgugaacuccgugcccugggacacgaucgccaacuacgccaagccguuccugaacaaggucgugagcaccaccaccaacaucgugacgcgcugccucaaccgggucugcaccaacuacaugcccuacuucuucacccugcugcuccagcugugcaccuucacccgcuccacgaacagccggaucaaggcguccaugcccaccaccaucgccaagaacaccgugaagagcgugggcaaguucugccuggaggccagcuucaacuaccucaagucccccaacuucagcaagcugaucaacaucaucaucugguuccugcuccuguccgucugccugggcagccucaucuacuccacggccgcccugggggugcugaugagcaaccucggcaugccguccuacugcaccggguaccgcgagggcuaccugaacagcaccaacgugaccaucgcgacguacugcaccggcuccauccccugcagcgucugccuguccgggcucgacagccuggacaccuaccccucccuggagaccauccagaucacgaucagcuccuucaagugggaccucaccgccuucggccugguggccgagugguuccuggccuacauccucuucacccgguucuucuacgugcuggggcuggccgcgaucaugcagcucuucuucagcuacuucgccguccacuucaucuccaacagcuggcugauguggcugaucaucaaccuggugcagauggcccccaucuccgccauggugcgcauguacaucuucuucgcgagcuucuacuacgucuggaagagcuacgugcacguggucgacggcugcaacuccagcaccugcaugaugugcuacaagcggaaccgcgccacgcggguggagugcaccaccaucgucaacggggugcgccgguccuucuacguguacgccaacggcggcaagggguucugcaagcuccacaacuggaacugcgucaacugcgacaccuucugcgccggcagcacguucaucuccgacgagguggcccgcgaccugagccugcaguucaagcggccgaucaaccccaccgaccaguccagcuacaucguggacuccgucaccgugaagaacgggagcauccaccucuacuucgacaaggcgggccagaagaccuacgagcgccacucccugagccacuucgugaaccuggacaaccuccgggccaacaacacgaaggggucccugcccaucaacgucaucguguucgacggcaagagcaagugcgaggaguccagcgccaaguccgccagcguguacuacucccagcugaugugccagcccauccuccugcuggaccaggcccucgucagcgacgugggcgacagcgcggagguggccgucaagauguucgacgccuacgugaacaccuucuccagcaccuucaacgugccgauggagaagcugaagacccuggucgccacggccgaggcggagcucgccaagaacgugucccuggacaacgugcugagcaccuucaucuccgccgcccgccagggguucgucgacagcgacguggagaccaaggacguggucgagugccucaagcugucccaccagagcgacaucgaggugaccggcgacuccugcaacaacuacaugcugacguacaacaagguggagaacaugaccccccgggaccucggggcgugcaucgacugcagcgcccgccacaucaacgcccaggucgccaagucccacaacaucgcccugaucuggaacgugaaggacuucaugagccuguccgagcagcuccggaagcagauccgcagcgcggccaagaagaacaaccugcccuucaagcugaccugcgccaccacgcgccagguggucaacguggugaccaccaagaucgcccucaagggcggguga

SEQ ID NO: 17744 - RNA, 5841 nt, Artificial Sequence
  SARS-CoV-2__MT846547.1__non-structural protein 3 (NSP3) CDS gc
auggcccccaccaaggugaccuucggcgacgacacggucaucgaggugcagggguacaagagcgugaacaucaccuucgagcuggacgagcgcaucgacaagguccucaacgagaagugcuccgccuacaccguggagcugggcaccgaggugaacgaguucgcgugcgucguggccgacgccgugaucaagacgcugcagccggucagcgagcuccugaccucccuggggaucgaccucgacgaguggagcauggccaccuacuaccuguucgacgaguccggcgaguucaagcuggccagccacauguacugcuccuucuacccccccgacgaggacgaggaggagggggacugcgaggaggaggaguucgagcccagcacccaguacgaguacggcacggaggacgacuaccagggcaagccgcucgaguucggggcgaccuccgccgcccugcagcccgaggaggagcaggaggaggacuggcuggacgacgacagccagcagaccgugggccagcaggacggguccgaggacaaccagaccacgaccauccagaccaucguggagguccagccccagcucgagauggagcugacccccguggugcagacgaucgaggucaacagcuucuccggcuaccugaagcucaccgacaacguguacaucaagaacgccgacaucguggaggaggcgaagaaggucaagccgaccgugguggucaacgccgccaacguguaccugaagcacgggggcggcguggccggggcccugaacaaggcgaccaacaacgccaugcaggucgagagcgacgacuacaucgccacgaacggcccccucaagguggggggcuccugcguccugagcggccacaaccuggccaagcacugccuccacgugguggggcccaacgucaacaagggcgaggacauccagcugcugaaguccgccuacgagaacuucaaccagcacgaggugcuccuggcgccccugcucagcgccgggaucuucggcgccgacccgauccacucccugcgggugugcgucgacaccgugcgcaccaacguguaccuggccgucuucgacaagaaccucuacgacaagcuggugagcagcuuccuggagaugaaguccgagaagcagguggagcagaagaucgccgagauccccaaggaggaggucaagcccuucaucaccgagagcaagcccuccguggagcagcggaagcaggacgacaagaagaucaaggcgugcguggaggaggucacgaccacccucgaggagaccaaguuccugacggagaaccugcuccuguacaucgacaucaacgggaaccugcacccggacagcgccacccucguguccgacaucgacaucaccuuccugaagaaggacgugcccuacaucgucggcgacguggugcaggagggcguccugaccgccguggugauccccacgaagaaggccgggggcaccaccgagaugcucgccaaggcgcugcgcaagguccccaccgacaacuacaucacgaccuacccggggcagggccugaacggguacaccguggaggaggccaagaccgugcucaagaagugcaagagcgccuucuacauccugcccuccaucaucagcaacgagaagcaggagauccugggcaccgucuccuggaaccuccgggagaugcuggcccacgcggaggagacgcgcaagcugaugcccgugugcguggagaccaaggccaucgucagcaccauccagcggaaguacaagggcaucaagauccaggagggggugguggacuacggcgcccgcuucuacuucuacaccuccaagacgaccgucgccagccugaucaacacccucaacgaccugaacgagacccuggugacgaugccccucggguacgugacccacggccugaaccuggaggaggccgcgcgguacaugcgcucccucaaggucccggccaccgugagcguguccagccccgacgccgucaccgccuacaacggguaccugacguccagcuccaagacccccgaggagcacuucaucgagaccaucagccuggccggcagcuacaaggacugguccuacagcggccaguccacccagcucgggaucgaguuccugaagcggggcgacaagagcguguacuacacguccaaccccaccaccuuccaccuggacggggaggugaucaccuucgacaaccucaagacgcugcuggcgcuccgcgagguccggaccaucaagguguucaccaccguggacaacaucaaccugcacacgcaggucguggacaugagcaugaccuacggccagcaguucggcccgaccuaccuggacggggccgacgugaccaagaucaagccccacaacucccacgagggcaagacguucuacguccuccccaacgacgacacccugcgcguggaggccuucgaguacuaccacaccaccgacccgagcuuccuggggcgguacauguccgcccucaaccacacgaagaaguggaaguacccccaggugaacggccugaccagcaucaagugggccgacaacaacugcuaccuggcgaccgcccuccugacccugcagcagaucgagcucaaguucaacccccccgcccugcaggacgccuacuaccgcgcgcgggccggggaggccgccaacuucugcgcccugauccucgcguacugcaacaagacggucggcgagcugggcgacgugcgcgagaccauguccuaccuguuccagcacgccaaccucgacagcugcaagcggguccugaacguggugugcaagaccugcgggcagcagcagaccacccugaagggcgucgaggccgugauguacauggggacgcucuccuacgagcaguucaagaagggcgugcagaucccgugcaccugcgggaagcaggccaccaaguaccugguccagcaggagagccccuucgugaugauguccgccccccccgcgcaguacgagcugaagcacggcaccuucacgugcgccagcgaguacaccggcaacuaccagugcgggcacuacaagcacaucaccuccaaggagacccucuacugcaucgacggcgcccugcugacgaagagcagcgaguacaaggggccgaucaccgacguguucuacaaggagaacuccuacaccaccacgaucaagcccgucaccuacaagcucgacggcguggugugcaccgagaucgaccccaagcuggacaacuacuacaagaaggacaacagcuacuucaccgagcagcccaucgaccuggucccgaaccagcccuaccccaacgccuccuucgacaacuucaaguucgugugcgacaacaucaaguucgccgacgaccucaaccagcugacgggguacaagaagcccgcgagccgcgagcugaaggugaccuucuucccggaccucaacggcgacgucguggccaucgacuacaagcacuacacccccuccuucaagaagggcgccaagcugcugcacaagcccaucguguggcacgucaacaacgccaccaacaaggcgacguacaagcccaacaccuggugcauccggugccucuggagcaccaagccgguggagaccuccaacagcuucgacgugcugaaguccgaggacgcccaggggauggacaaccuggccugcgaggaccucaagcccgucagcgaggaggugguggagaaccccacgauccagaaggacguccuggagugcaacgugaagaccaccgagguggucggcgacaucauccugaagcccgccaacaacucccucaagaucaccgaggagguggggcacacggaccugauggccgcguacguggacaacagcucccugaccaucaagaagccgaacgagcucagccgcguccugggccugaagacccucgccacccacgggcuggccgccgugaacuccgugcccugggacacgaucgccaacuacgcgaagcccuuccugaacaaggucgugagcaccaccaccaacaucgugacgcgcugccucaaccgggucugcaccaacuacaugccguacuucuucacccugcugcuccagcugugcaccuucacccgcuccacgaacagccggaucaaggccuccaugcccaccaccaucgccaagaacaccgugaagagcgugggcaaguucugccuggaggccagcuucaacuaccucaagucccccaacuucagcaagcugaucaacaucaucaucugguuccugcuccuguccgucugccugggcagccucaucuacuccacggccgcgcugggggugcugaugagcaaccucggcaugcccuccuacugcaccggguaccgcgagggcuaccugaacagcaccaacgugaccaucgccaucuacugcacgggcuccaucccgugcagcgucugccuguccgggcucgacagccuggacaccuaccccucccuggagaccauccagaucaccaucagcuccuucaagugggaccucacggccuucggccugguggccgagugguuccuggccuacauccucuucacccgguucuucuacgugcuggggcuggcggccaucaugcagcucuucuucagcuacuucgccguccacuucaucuccaacagcuggcugauguggcugaucaucaaccuggugcagauggcccccaucuccgcgauggugcgcauguacaucuucuucgccagcuucuacuacgucuggaagagcuacgugcacguggucgacggcugcaacuccagcaccugcaugaugugcuacaagcggaaccgcgccacccggguggagugcacgaccaucgucaacggggugcgccgguccuucuacguguacgccaacggcggcaagggguucugcaagcuccacaacuggaacugcgucaacugcgacaccuucugcgccggcagcaccuucaucuccgacgagguggcgcgcgaccugagccugcaguucaagcggcccaucaacccgacggaccaguccagcuacaucguggacuccgucaccgugaagaacgggagcauccaccucuacuucgacaaggccggccagaagaccuacgagcgccacucccugagccacuucgugaaccuggacaaccuccgggccaacaacaccaaggggucccugcccaucaacgucaucguguucgacggcaagagcaagugcgaggaguccagcgccaaguccgccagcguguacuacucccagcugaugugccagcccauccuccugcuggaccaggcgcucgucagcgacgugggcgacagcgccgagguggccgucaagauguucgacgccuacgugaacacguucuccagcaccuucaacgugcccauggagaagcugaagacccuggucgccaccgcggaggccgagcucgccaagaacgugucccuggacaacgugcugagcacguucaucuccgccgcgcgccagggguucgucgacagcgacguggagaccaaggacguggucgagugccucaagcugucccaccagagcgacaucgaggugaccggcgacuccugcaacaacuacaugcugaccuacaacaagguggagaacaugacgccgcgggaccucggggccugcaucgacugcagcgcccgccacaucaacgcccaggucgccaagucccacaacaucgcgcugaucuggaacgugaaggacuucaugagccuguccgagcagcuccggaagcagauccgcagcgccgccaagaagaacaaccugcccuucaagcugaccugcgccaccacccgccagguggucaacguggugacgaccaagaucgcccucaagggcggguga

SEQ ID NO: 17745 - RNA, 5841 nt, Artificial Sequence
  SARS-CoV-2__MT846554.1__non-structural protein 3 (NSP3) CDS gc
auggcccccaccaaggugaccuucggcgacgacacggucaucgaggugcagggguacaagagcgugaacaucaccuucgagcuggacgagcgcaucgacaagguccucaacgagaagugcuccgccuacaccguggagcugggcaccgaggugaacgaguucgcgugcgucguggccgacgccgugaucaagacgcugcagccggucagcgagcuccugaccccccuggggaucgaccucgacgagugguccauggccaccuacuaccuguucgacgagagcggcgaguucaagcuggccucccacauguacugcagcuucuacccccccgacgaggacgaggaggagggggacugcgaggaggaggaguucgagccguccacccaguacgaguacggcacggaggacgacuaccagggcaagccccucgaguucggggcgaccagcgccgcccugcagcccgaggaggagcaggaggaggacuggcuggacgacgacucccagcagaccgugggccagcaggacgggagcgaggacaaccagaccacgaccauccagaccaucguggagguccagccccagcucgagauggagcugaccccgguggugcagacgaucgaggucaacuccuucagcggcuaccugaagcucaccgacaacguguacaucaagaacgccgacaucguggaggaggcgaagaaggucaagcccaccgugguggucaacgccgccaacguguaccugaagcacgggggcggcguggccggggcccugaacaaggcgaccaacaacgccaugcaggucgaguccgacgacuacaucgccacgaacggcccccucaagguggggggcagcugcguccuguccggccacaaccuggccaagcacugccuccacgugguggggcccaacgucaacaagggcgaggacauccagcugcugaagagcgccuacgagaacuucaaccagcacgaggugcuccuggcgccgcugcucuccgccgggaucuucggcgccgaccccauccacagccugcgggugugcgucgacaccgugcgcaccaacguguaccuggccgucuucgacaagaaccucuacgacaagcugguguccagcuuccuggagaugaagagcgagaagcagguggagcagaacaucgccgagauccccaaggaggaggucaagcccuucaucaccgaguccaagccgagcguggagcagcggaagcaggacgacaagaagaucaaggcgugcguggaggaggucacgaccacccucgaggagaccaaguuccugacggagaaccugcuccuguacaucgacaucaacgggaaccugcaccccgacuccgccacccucgugagcgacaucgacaucaccuuccugaagaaggacgcccccuacaucgugggcgacgucgugcaggagggcgugcugaccgccgucgugauccccacgaagaaggccgggggcaccaccgagaugcucgcgaaggcccugcgcaagguguccaccgacaacuacaucacgaccuacccggggcagggccugaacggguacaccgucgaggaggccaagaccgugcucaagaagugcaagagcgccuucuacauccugcccuccaucaucagcaacgagaagcaggagauccugggcaccguguccuggaaccuccgggagaugcuggcgcacgccgaggagacgcgcaagcugaugcccgucugcguggagaccaaggccaucgugagcaccauccagcggaaguacaagggcaucaagauccaggagggggucguggacuacggcgcccgcuucuacuucuacaccuccaagacgaccguggccagccugaucaacacccucaacgaccugaacgagacccuggucacgaugccccucggguacgugacccacggccugaaccuggaggaggcggcccgguacaugcgcucccucaaggugccggccaccgucagcguguccagccccgacgccgugaccgccuacaacggguaccugacguccagcuccaagacccccgaggagcacuucaucgagaccaucagccuggcgggcagcuacaaggacugguccuacagcggccaguccacccagcucgggaucgaguuccugaagcggggcgacaagagcgucuacuacacguccaaccccaccaccuuccaccuggacggggaggugaucaccuucgacaaccucaagacgcugcugagccuccgcgaggugaagaccaucaaggucuucaccaccguggacaacaucaaccugcacacgcagguggucgacauguccaugaccuacggccagcaguucggcccgaccuaccuggacggggccgacgugaccaagaucaagccccacaacagccacgagggcaagacguucuacgugcuccccaacgacgacacccugcgggucgaggccuucgaguacuaccacaccaccgacccguccuuccuggggcgcuacaugagcgcccucaaccacacgaagaaguggaaguacccccaggugaacggccugaccuccaucaagugggccgacaacaacugcuaccuggcgaccgcccuccugacccugcagcagaucgagcucaaguucaacccccccgcccugcaggacgccuacuaccgggcgcgcgccggggaggccgccaacuucugcgcccugauccucgcguacugcaacaagacggugggcgagcugggcgacguccgggagaccaugagcuaccuguuccagcacgccaaccucgacuccugcaagcgcgugcugaacgucgugugcaagaccugcgggcagcagcagaccacccugaagggcguggaggccgucauguacauggggacgcucagcuacgagcaguucaagaagggcgugcagaucccgugcaccugcgggaagcaggccaccaaguaccuggugcagcaggaguccagcuucgucaugauguccgccccccccgcgcaguacgagcugaagcacggcaccuucacgugcgccagcgaguacaccggcaacuaccagugcgggcacuacaagcacaucaccagcaaggagacccucuacugcaucgacggcgcccugcugacgaaguccagcgaguacaaggggcccaucaccgacguguucuacaaggagaacuccuacaccaccacgaucaagccggugaccuacaagcucgacggcgucgugugcaccgagaucgaccccaagcuggacaacuacuacaagaaggacaacagcuacuucaccgagcagcccaucgaccuggugcccaaccagccguaccccaacgccuccuucgacaacuucaaguucgucugcgacaacaucaaguucgccgacgaccucaaccagcugacgggguacaagaagcccgcgagccgggagcugaaggugaccuucuuccccgaccucaacggcgacguggucgccaucgacuacaagcacuacaccccguccuucaagaagggcgccaagcugcugcacaagcccaucguguggcacgugaacaacgccaccaacaaggcgacguacaagcccaacaccuggugcauccgcugccucuggagcaccaagcccgucgagaccuccaacagcuucgacgugcugaaguccgaggacgcccaggggauggacaaccuggccugcgaggaccucaagccggugagcgaggaggucguggagaaccccacgauccagaaggacgugcuggagugcaacgucaagaccaccgagguggugggcgacaucauccugaagcccgccaacaacucccucaagaucaccgaggaggucgggcacacggaccugauggccgcguacguggacaacagcucccugaccaucaagaagcccaacgagcucagccgggugcugggccugaagacccucgccacccacgggcuggccgccgucaacuccgugccgugggacacgaucgccaacuacgcgaagcccuuccugaacaagguggucagcaccaccaccaacaucgugacgcgcugccucaaccgcgugugcaccaacuacaugcccuacuucuucacccugcugcuccagcugugcaccuucacccgguccacgaacagccgcaucaaggccagcaugccgaccaccaucgccaagaacaccgucaaguccgugggcaaguucugccuggaggccagcuucaacuaccucaagucccccaacuucagcaagcugaucaacaucaucaucugguuccugcuccuguccgugugccugggcagccucaucuacuccacggccgcgcuggggguccugaugagcaaccucggcaugcccuccuacugcaccggguaccgggagggcuaccugaacagcaccaacgugaccaucgccacguacugcaccggcuccauccccugcagcgugugccuguccgggcucgacagccuggacaccuacccgucccuggagaccauccagaucacgaucagcuccuucaagugggaccucaccgccuucggccuggucgccgagugguuccuggccuacauccucuucacccgcuucuucuacgugcuggggcuggcggccaucaugcagcucuucuucagcuacuucgccgugcacuucaucuccaacagcuggcugauguggcugaucaucaaccugguccagauggcccccaucagcgcgauggugcggauguacaucuucuucgccuccuucuacuacguguggaagagcuacguccacgugguggacggcugcaacuccagcaccugcaugaugugcuacaagcgcaaccgggccacgcgcgucgagugcaccaccaucgugaacgggguccggcgcuccuucuacguguacgccaacggcggcaagggguucugcaagcuccacaacuggaacugcgugaacugcgacaccuucugcgccggcagcacguucaucuccgacgaggucgcgcgggaccugagccugcaguucaagcgccccaucaaccccaccgaccaguccagcuacaucguggacuccgugaccgucaagaacgggagcauccaccucuacuucgacaaggccggccagaagaccuacgagcggcacucccugagccacuucgugaacuucgacaaccugcgcgccaacaacacgaaggggucccucccgaucaacgugaucgucuucgacggcaagagcaagugcgaggaguccagcgccaaguccgccagcguguacuacagccagcugaugugccagcccauccugcuccuggaccaggcgcugguguccgacgucggcgacagcgccgagguggccgugaagauguucgacgccuacgucaacaccuucuccagcaccuucaacgugcccauggagaagcucaagacccugguggccacggcggaggccgagcuggccaagaacgucucccucgacaacgugcugagcaccuucaucuccgccgcgcggcagggguucguggacagcgacgucgagaccaaggacgugguggagugccugaagcucucccaccagagcgacaucgaggucaccggcgacuccugcaacaacuacaugcugacguacaacaagguggagaacaugaccccccgcgaccugggggccugcaucgacugcagcgcccggcacaucaacgcccagguggccaagucccacaacaucgcgcucaucuggaacgucaaggacuucaugagccuguccgagcagcugcgcaagcagauccggagcgccgccaagaagaacaaccucccguucaagcugaccugcgccaccacgcgccagguggugaacgucgugaccaccaagaucgcccugaagggcggguga

SEQ ID NO: 17746 - RNA, 5841 nt, Artificial Sequence
  SARS-CoV-2__MT846555.1__non-structural protein 3 (NSP3) CDS gc
auggcccccaccaaggugaccuucggcgacgacacggucaucgaggugcagggguacaagagcgugaacaucaccuucgagcuggacgagcgcaucgacaagguccucaacgagaagugcuccgccuacaccguggagcugggcaccgaggugaacgaguucgcgugcgucguggccgacgccgugaucaagacgcugcagccggucagcgagcuccugaccucccuggggaucgaccucgacgaguggagcauggccaccuacuaccuguucgacgaguccggcgaguucaagcuggccagccacauguacugcuccuucuacccccccgacgaggacgaggaggagggggacugcgaggaggaggaguucgagcccagcacccaguacgaguacggcacggaggacgacuaccagggcaagccgcucgaguucggggcgaccuccgccgcccugcagcccgaggaggagcaggaggaggacuggcuggacgacgacagccagcagaccgugggccagcaggacggguccgaggacaaccagaccacgaccauccagaccaucguggagguccagccccagcucgagauggagcugacccccguggugcagacgaucgaggucaacagcuucuccggcuaccugaagcucaccgacaacguguacaucaagaacgccgacaucguggaggaggcgaagaaggucaagccgaccgugguggucaacgccgccaacguguaccugaagcacgggggcggcguggccggggcccugaacaaggcgaccaacaacgccaugcaggucgagagcgacgacuacaucgccacgaacggcccccucaagguggggggcuccugcguccugagcggccacaaccuggccaagcacugccuccacgugguggggcccaacgucaacaagggcgaggacauccagcugcugaaguccgccuacgagaacuucaaccagcacgaggugcuccuggcgccccugcucagcgccgggaucuucggcgccgacccgauccacucccugcgggugugcgucgacaccgugcgcaccaacguguaccuggccgucuucgacaagaaccucuacgacaagcuggugagcagcuuccuggagaugaaguccgagaagcagguggagcagaagaucgccgagauccccaaggaggaggucaagcccuucaucaccgagagcaagcccuccguggagcagcggaagcaggacgacaagaagaucaaggcgugcguggaggaggucacgaccacccucgaggagaccaaguuccugacggagaaccugcuccuguacaucgacaucaacgggaaccugcacccggacagcgccacccucguguccgacaucgacaucaccuuccugaagaaggacgcccccuacaucgugggcgacgucgugcaggagggcgugcugaccgccgucgugauccccacgaagaaggccgggggcaccaccgagaugcucgcgaaggcccugcgcaaggugcccaccgacaacuacaucacgaccuacccggggcagggccugaacggguacaccgucgaggaggccaagaccgugcucaagaagugcaagagcgccuucuacauccugcccuccaucaucagcaacgagaagcaggagauccugggcaccguguccuggaaccuccgggagaugcuggcgcacgccgaggagacgcgcaagcugaugcccgucugcguggagaccaaggccaucgugagcaccauccagcggaaguacaagggcaucaagauccaggagggggucguggacuacggcgcccgcuucuacuucuacaccuccaagacgaccguggccagccugaucaacacccucaacgaccugaacgagacccuggucacgaugccccucggguacgugacccacggccugaaccuggaggaggcggcccgguacaugcgcucccucaaggugccggccaccgucagcguguccagccccgacgccgugaccgccuacaacggguaccugacguccagcuccaagacccccgaggagcacuucaucgagaccaucagccuggcgggcagcuacaaggacugguccuacagcggccaguccacccagcucgggaucgaguuccugaagcggggcgacaagagcgucuacuacacguccaaccccaccaccuuccaccuggacggggaggugaucaccuucgacaaccucaagacgcugcuggcccuccgcgaggugcggaccaucaaggucuucaccaccguggacaacaucaaccugcacacgcagguggucgacaugagcaugaccuacggccagcaguucggcccgaccuaccuggacggggccgacgugaccaagaucaagccccacaacucccacgagggcaagacguucuacgugcuccccaacgacgacacccugcgcgucgaggccuucgaguacuaccacaccaccgacccgagcuuccuggggcgguacauguccgcccucaaccacacgaagaaguggaaguacccccaggugaacggccugaccagcaucaagugggcggacaacaacugcuaccuggccaccgcccuccugacccugcagcagaucgagcucaaguucaacccccccgcccugcaggacgcguacuaccgcgcccgggccggggaggccgccaacuucugcgcgcugauccucgccuacugcaacaagacggugggcgagcugggcgacguccgcgagaccauguccuaccuguuccagcacgccaaccucgacagcugcaagcgggugcugaacgucgugugcaagaccugcgggcagcagcagaccacccugaagggcguggaggccgucauguacauggggacgcucuccuacgagcaguucaagaagggcgugcagaucccgugcaccugcgggaagcaggccaccaaguaccuggugcagcaggagagccccuucgucaugauguccgcgccccccgcccaguacgagcugaagcacggcaccuucacgugcgccagcgaguacaccggcaacuaccagugcgggcacuacaagcacaucaccuccaaggagacccucuacugcaucgacggcgcccugcugacgaagagcagcgaguacaaggggccgaucaccgacguguucuacaaggagaacuccuacaccaccacgaucaagcccgugaccuacaagcucgacggcgucgugugcaccgagaucgaccccaagcuggacaacuacuacaagaaggacaacagcuacuucaccgagcagcccaucgaccuggugccgaaccagcccuaccccaacgccuccuucgacaacuucaaguucgucugcgacaacaucaaguucgcggacgaccucaaccagcugacgggguacaagaagcccgccagccgcgagcugaaggugaccuucuucccggaccucaacggcgacguggucgccaucgacuacaagcacuacacccccuccuucaagaagggcgccaagcugcugcacaagcccaucguguggcacgugaacaacgcgaccaacaaggccacguacaagcccaacaccuggugcauccggugccucuggagcaccaagccggucgagaccuccaacagcuucgacgugcugaaguccgaggacgcccaggggauggacaaccuggccugcgaggaccucaagcccgugagcgaggaggucguggagaaccccacgauccagaaggacgugcuggagugcaacgucaagaccaccgagguggugggcgacaucauccugaagcccgccaacaacucccucaagaucaccgaggaggucgggcacacggaccugauggcggccuacguggacaacagcucccugaccaucaagaagccgaacgagcucagccgcgugcugggccugaagacccucgccacccacgggcuggccgccgucaacuccgugcccugggacacgaucgcgaacuacgccaagcccuuccugaacaagguggucagcaccaccaccaacaucgugacgcgcugccucaaccgggugugcaccaacuacaugccguacuucuucacccugcugcuccagcugugcaccuucacccgcuccacgaacagccggaucaaggccuccaugcccaccaccaucgccaagaacaccgucaagagcgugggcaaguucugccuggaggccagcuucaacuaccucaagucccccaacuucagcaagcugaucaacaucaucaucugguuccugcuccuguccgugugccugggcagccucaucuacuccacggcggcccuggggguccugaugagcaaccucggcaugcccuccuacugcaccggguaccgcgagggcuaccugaacagcaccaacgugaccaucgccaucuacugcacgggcuccaucccgugcagcgugugccuguccgggcucgacagccuggacaccuaccccucccuggagaccauccagaucaccaucagcuccuucaagugggaccucacggccuucggccuggucgccgagugguuccuggcguacauccucuucacccgguucuucuacgugcuggggcuggccgccaucaugcagcucuucuucagcuacuucgccgugcacuucaucuccaacagcuggcugauguggcugaucaucaaccugguccagauggcgcccaucuccgccauggugcgcauguacaucuucuucgccagcuucuacuacguguggaagagcuacguccacgugguggacggcugcaacuccagcaccugcaugaugugcuacaagcggaaccgcgccacccgggucgagugcacgaccaucgugaacgggguccgccgguccuucuacguguacgccaacggcggcaagggguucugcaagcuccacaacuggaacugcgugaacugcgacaccuucugcgcgggcagcaccuucaucuccgacgaggucgcccgcgaccugagccugcaguucaagcggcccaucaacccgacggaccaguccagcuacaucguggacuccgugaccgucaagaacgggagcauccaccucuacuucgacaaggccggccagaagaccuacgagcgccacucccugagccacuucgugaaccuggacaaccuccgggccaacaacaccaaggggucccugcccaucaacgugaucgucuucgacggcaagagcaagugcgaggaguccagcgccaaguccgcgagcguguacuacucccagcugaugugccagcccauccuccugcuggaccaggcccucgugagcgacgucggcgacagcgccgagguggccgugaagauguucgacgccuacgucaacacguucuccagcaccuucaacgugcccauggagaagcugaagacccugguggcgaccgccgaggccgagcucgccaagaacgucucccuggacaacgugcugagcacguucaucuccgcggcccgccagggguucguggacagcgacgucgagaccaaggacgugguggagugccucaagcugucccaccagagcgacaucgaggucaccggcgacuccugcaacaacuacaugcugaccuacaacaagguggagaacaugacgccgcgggaccucggggccugcaucgacugcagcgcccgccacaucaacgcccagguggcgaagucccacaacaucgcccugaucuggaacgucaaggacuucaugagccuguccgagcagcuccggaagcagauccgcagcgccgccaagaagaacaaccugcccuucaagcugaccugcgccaccacccgccagguggugaacgucgugacgaccaagaucgcgcucaagggcggguga

SEQ ID NO: 17747 - RNA, 5841 nt, Artificial Sequence
  SARS-CoV-2__MT846556.1__non-structural protein 3 (NSP3) CDS gc
auggcccccaccaaggugaccuucggcgacgacacggucaucgaggugcagggguacaagagcgugaacaucaccuucgagcuggacgagcgcaucgacaagguccucaacgagaagugcuccgccuacaccguggagcugggcaccgaggugaacgaguucgcgugcgucguggccgacgccgugaucaagacgcugcagccggucagcgagcuccugaccccccuggggaucgaccucgacgagugguccauggccaccuacuaccuguucgacgagagcggcgaguucaagcuggccucccacauguacugcagcuucuacccccccgacgaggacgaggaggagggggacugcgaggaggaggaguucgagccguccacccaguacgaguacggcacggaggacgacuaccagggcaagccccucgaguucggggcgaccagcgccgcccugcagcccgaggaggagcaggaggaggacuggcuggacgacgacucccagcagaccgugggccagcaggacgggagcgaggacaaccagaccacgaccauccagaccaucguggagguccagccccagcucgagauggagcugaccccgguggugcagacgaucgaggucaacuccuucagcggcuaccugaagcucaccgacaacguguacaucaagaacgccgacaucguggaggaggcgaagaaggucaagcccaccgugguggucaacgccgccaacguguaccugaagcacgggggcggcguggccggggcccugaacaaggcgaccaacaacgccaugcaggucgaguccgacgacuacaucgccacgaacggcccccucaagguggggggcagcugcguccuguccggccacaaccuggccaagcacugccuccacgugguggggcccaacgucaacaagggcgaggacauccagcugcugaagagcgccuacgagaacuucaaccagcacgaggugcuccuggcgccgcugcucuccgccgggaucuucggcgccgaccccauccacagccugcgggugugcgucgacaccgugcgcaccaacguguaccuggccgucuucgacaagaaccucuacgacaagcugguguccagcuuccuggagaugaagagcgagaagcagguggagcagaagaucgccgagauccccaaggaggaggucaagcccuucaucaccgaguccaagccgagcguggagcagcggaagcaggacgacaagaagaucaaggcgugcguggaggaggucacgaccacccucgaggagaccaaguuccugacggagaaccugcuccuguacaucgacaucaacgggaaccugcaccccgacuccgccacccucgugagcgacaucgacaucaccuuccugaagaaggacgcccccuacaucgugggcgacgucgugcaggagggcgugcugaccgccgucgugauccccacgaagaaggccgggggcaccaccgagaugcucgcgaaggcccugcgcaaggugccgaccgacaacuacaucacgaccuaccccgggcagggccugaacggguacaccgucgaggaggccaagaccgugcucaagaagugcaaguccgccuucuacauccugcccagcaucaucuccaacgagaagcaggagauccugggcaccgugagcuggaaccuccgggagaugcuggcgcacgccgaggagacgcgcaagcugaugcccgucugcguggagaccaaggccaucguguccaccauccagcggaaguacaagggcaucaagauccaggagggggucguggacuacggcgcccgcuucuacuucuacaccagcaagacgaccguggccucccugaucaacacccucaacgaccugaacgagacccuggucacgaugccgcucggguacgugacccacggccugaaccuggaggaggcggcccgguacaugcgcagccucaaggugcccgccaccgucuccgugagcucccccgacgccgugaccgccuacaacggguaccugacgagcuccagcaagacccccgaggagcacuucaucgagaccaucucccuggcgggcagcuacaaggacuggagcuacuccggccagagcacccagcucgggaucgaguuccugaagcggggcgacaaguccgucuacuacacgagcaacccgaccaccuuccaccuggacggggaggugaucaccuucgacaaccucaagacgcugcugucccuccgcgaggugcggaccaucaaggucuucaccaccguggacaacaucaaccugcacacgcagguggucgacaugagcaugaccuacggccagcaguucggccccaccuaccuggacggggccgacgugaccaagaucaagccccacaacucccacgagggcaagacguucuacgugcucccgaacgacgacacccugcgcgucgaggccuucgaguacuaccacaccaccgaccccagcuuccuggggcgguacauguccgcccucaaccacacgaagaaguggaaguacccccaggugaacggccugaccagcaucaagugggccgacaacaacugcuaccuggcgaccgcccuccugacccugcagcagaucgagcucaaguucaaccccccggcccugcaggacgccuacuaccgcgcgcgggccggggaggccgccaacuucugcgcccugauccucgcguacugcaacaagacggugggcgagcugggcgacguccgcgagaccauguccuaccuguuccagcacgccaaccucgacagcugcaagcgggugcugaacgucgugugcaagaccugcgggcagcagcagaccacccugaagggcguggaggccgucauguacauggggacgcucuccuacgagcaguucaagaagggcgugcagauccccugcaccugcgggaagcaggccaccaaguaccuggugcagcaggagagccccuucgucaugauguccgcccccccggcgcaguacgagcugaagcacggcaccuucacgugcgccagcgaguacaccggcaacuaccagugcgggcacuacaagcacaucaccuccaaggagacccucuacugcaucgacggcgcccugcugacgaagagcagcgaguacaaggggcccaucaccgacguguucuacaaggagaacuccuacaccaccacgaucaagcccgugaccuacaagcucgacggcgucgugugcaccgagaucgaccccaagcuggacaacuacuacaagaaggacaacagcuacuucaccgagcagccgaucgaccuggugcccaaccagcccuaccccaacgccuccuucgacaacuucaaguucgucugcgacaacaucaaguucgccgacgaccucaaccagcugacgggguacaagaagccggcgagccgcgagcugaaggugaccuucuuccccgaccucaacggcgacguggucgccaucgacuacaagcacuacacccccuccuucaagaagggcgccaagcugcugcacaagcccaucguguggcacgugaacaacgccaccaacaaggcgacguacaagccgaacaccuggugcauccggugccucuggagcaccaagcccgucgagaccuccaacagcuucgacgugcugaaguccgaggacgcccaggggauggacaaccuggccugcgaggaccucaagcccgugagcgaggaggucguggagaaccccacgauccagaaggacgugcuggagugcaacgucaagaccaccgagguggugggcgacaucauccugaagccggccaacaacucccucaagaucaccgaggaggucgggcacacggaccugauggccgcguacguggacaacagcucccugaccaucaagaagcccaacgagcucagccgcgugcugggccugaagacccucgccacccacgggcuggccgccgucaacuccgugcccugggacacgaucgccaacuacgcgaagccguuccugaacaagguggucggcaccaccaccaacaucgugacgcgcugccucaaccgggugugcaccaacuacaugcccuacuucuucacccugcugcuccagcugugcaccuucacccgcagcacgaacucccggaucaaggccagcaugcccaccaccaucgccaagaacaccgucaaguccgugggcaaguucugccuggaggccagcuucaacuaccucaagagccccaacuucuccaagcugaucaacaucaucaucugguuccugcuccugagcgugugccuggggucccucaucuacagcacggccgcgcugggcguccugauguccaaccucgggaugccgagcuacugcaccggcuaccgcgagggcuaccugaacuccaccaacgugaccaucgccacguacugcaccgggagcauccccugcuccgugugccugagcggccucgacucccuggacaccuaccccagccuggagaccauccagaucacgaucuccagcuucaagugggaccucaccgccuucgggcuggucgccgagugguuccuggccuacauccucuucacccgguucuucuacgugcugggccuggcggccaucaugcagcucuucuucuccuacuucgccgugcacuucaucagcaacuccuggcugauguggcugaucaucaaccugguccagauggcccccaucagcgcgauggugcgcauguacaucuucuucgccuccuucuacuacguguggaagagcuacguccacgugguggacgggugcaacagcuccaccugcaugaugugcuacaagcggaaccgcgccacgcgggucgagugcaccaccaucgugaacggcguccgccggagcuucuacguguacgccaacggcgggaagggcuucugcaagcuccacaacuggaacugcgugaacugcgacaccuucugcgccggguccacguucaucagcgacgaggucgcgcgcgaccugucccugcaguucaagcggccgaucaaccccaccgaccagagcuccuacaucguggacagcgugaccgucaagaacggcuccauccaccucuacuucgacaaggccgggcagaagaccuacgagcgccacagccugucccacuucgugaaccuggacaaccuccgggccaacaacacgaagggcagccugcccaucaacgugaucgucuucgacggcaaguccaagugcgaggagagcuccgccaagagcgccuccguguacuacagccagcugaugugccagcccauccuccugcuggaccaggcgcucguguccgacgucggggacagcgccgagguggccgugaagauguucgacgccuacgucaacaccuucagcuccaccuucaacgugccgauggagaagcugaagacccugguggccacggcggaggccgagcucgccaagaacgucagccuggacaacgugcuguccaccuucaucagcgccgcgcgccagggcuucguggacuccgacgucgagaccaaggacgugguggagugccucaagcugagccaccaguccgacaucgaggucaccggggacagcugcaacaacuacaugcugacguacaacaagguggagaacaugaccccccgggaccucggcgccugcaucgacugcuccgcccgccacaucaacgcccagguggccaagagccacaacaucgcgcugaucuggaacgucaaggacuucaugucccugagcgagcagcuccggaagcagauccgcuccgccgccaagaagaacaaccugcccuucaagcugaccugcgccaccacgcgccagguggugaacgucgugaccaccaagaucgcccucaaggggggcuga

SEQ ID NO: 17748 - RNA, 5841 nt, Artificial Sequence
  SARS-CoV-2__MT846557.1__non-structural protein 3 (NSP3) CDS gc
auggcccccaccaaggugaccuucggcgacgacacggucaucgaggugcagggguacaagagcgugaacaucaccuucgagcuggacgagcgcaucgacaagguccucaacgagaagugcuccgccuacaccguggagcugggcaccgaggugaacgaguucgcgugcgucguggccgacgccgugaucaagacgcugcagccggucagcgagcuccugaccccccuggggaucgaccucgacgagugguccauggccaccuacuaccuguucgacgagagcggcgaguucaagcuggccucccacauguacugcagcuucuacccccccgacgaggacgaggaggagggggacugcgaggaggaggaguucgagccguccacccaguacgaguacggcacggaggacgacuaccagggcaagccccucgaguucggggcgaccagcgccgcccugcagcccgaggaggagcaggaggaggacuggcuggacgacgacucccagcagaccgugggccagcaggacgggagcgaggacaaccagaccacgaccauccagaccaucguggagguccagccccagcucgagauggagcugaccccgguggugcagacgaucgaggucaacuccuucagcggcuaccugaagcucaccgacaacguguacaucaagaacgccgacaucguggaggaggcgaagaaggucaagcccaccgugguggucaacgccgccaacguguaccugaagcacgggggcggcguggccggggcccugaacaaggcgaccaacaacgccaugcaggucgaguccgacgacuacaucgccacgaacggcccccucaagguggggggcagcugcguccuguccggccacaaccuggccaagcacugccuccacgugguggggcccaacgucaacaagggcgaggacauccagcugcugaagagcgccuacgagaacuucaaccagcacgaggugcuccuggcgccgcugcucuccgccgggaucuucggcgccgaccccauccacagccugcgggugugcgucgacaccgugcgcaccaacguguaccuggccgucuucgacaagaaccucuacgacaagcugguguccagcuuccuggagaugaagagcgagaagcagguggagcagaagaucgccgagauccccaaggaggaggucaagcccuucaucaccgaguccaagccgagcguggagcagcggaagcaggacgacaagaagaucaaggcgugcguggaggaggucacgaccacccucgaggagaccaaguuccugacggagaaccugcuccuguacaucgacaucaacgggaaccugcaccccgacuccgccacccucgugagcgacaucgacaucaccuuccugaagaaggacgcccccuacaucgugggcgacgucgugcaggagggcgugcugaccgccgucgugauccccacgaagaaggccgggggcaccaccgagaugcucgcgaaggcccugcgcaaggugccgaccuacaacuacaucacgaccuaccccgggcagggccugaacggguacaccgucgaggaggccaagaccgugcucaagaagugcaaguccgccuucuacauccugcccagcaucaucuccaacgagaagcaggagauccugggcaccgugagcuggaaccuccgggagaugcuggcgcacgccgaggagacgcgcaagcugaugcccgucugcguggagaccaaggccaucguguccaccauccagcggaaguacaagggcaucaagauccaggagggggucguggacuacggcgcccgcuucuacuucuacaccagcaagacgaccguggccucccugaucaacacccucaacgaccugaacgagacccuggucacgaugccgcucggguacgugacccacggccugaaccuggaggaggcggcccgguacaugcgcagccucaaggugcccgccaccgucuccgugagcucccccgacgccgugaccgccuacaacggguaccugacgagcuccagcaagacccccgaggagcacuucaucgagaccaucucccuggcgggcagcuacaaggacuggagcuacuccggccagagcacccagcucgggaucgaguuccugaagcggggcgacaaguccgucuacuacacgagcaacccgaccaccuuccaccuggacggggaggugaucaccuucgacaaccucaagacgcugcugucccuccgcgaggugcggaccaucaaggucuucaccaccguggacaacaucaaccugcacacgcagguggucgacaugagcaugaccuacggccagcaguucggccccaccuaccuggacggggccgacgugaccaagaucaagccccacaacucccacgagggcaagacguucuacgugcucccgaacgacgacacccugcgcgucgaggccuucgaguacuaccacaccaccgaccccagcuuccuggggcgguacauguccgcccucaaccacacgaagaaguggaaguacccccaggugaacggccugaccagcaucaagugggccgacaacaacugcuaccuggcgaccgcccuccugacccugcagcagaucgagcucaaguucaaccccccggcccugcaggacgccuacuaccgcgcgcgggccggggaggccgccaacuucugcgcccugauccucgcguacugcaacaagacggugggcgagcugggcgacguccgcgagaccauguccuaccuguuccagcacgccaaccucgacagcugcaagcgggugcugaacgucgugugcaagaccugcgggcagcagcagaccacccugaagggcguggaggccgucauguacauggggacgcucuccuacgagcaguucaagaagggcgugcagauccccugcaccugcgggaagcaggccaccaaguaccuggugcagcaggagagccccuucgucaugauguccgcccccccggcgcaguacgagcugaagcacggcaccuucacgugcgccagcgaguacaccggcaacuaccagugcgggcacuacaagcacaucaccuccaaggagacccucuacugcaucgacggcgcccugcugacgaagagcagcgaguacaaggggcccaucaccgacguguucuacaaggagaacuccuacaccaccacgaucaagcccgugaccuacaagcucgacggcgucgugugcaccgagaucgaccccaagcuggacaacuacuacaagaaggacaacagcuacuucaccgagcagccgaucgaccuggugcccaaccagcccuaccccaacgccuccuucgacaacuucaaguucgucugcgacaacaucaaguucgccgacgaccucaaccagcugacgggguacaagaagccggcgagccgcgagcugaaggugaccuucuuccccgaccucaacggcgacguggucgccaucgacuacaagcacuacacccccuccuucaagaagggcgccaagcugcugcacaagcccaucguguggcacgugaacaacgccaccaacaaggcgacguacaagccgaacaccuggugcauccggugccucuggagcaccaagcccgucgagaccuccaacagcuucgacgugcugaaguccgaggacgcccaggggauggacaaccuggccugcgaggaccucaagcccgugagcgaggaggucguggagaaccccacgauccagaaggacgugcuggagugcaacgucaagaccaccgagguggugggcgacaucauccugaagccggccaacaacucccucaagaucaccgaggaggucgggcacacggaccugauggccgcguacguggacaacagcucccugaccaucaagaagcccaacgagcucagccgcgugcugggccugaagacccucgccacccacgggcuggccgccgucaacuccgugcccugggacacgaucgccaacuacgcgaagccguuccugaacaagguggucagcaccaccaccaacaucgugacgcgcugccucaaccgggugugcaccaacuacaugcccuacuucuucacccugcugcuccagcugugcaccuucacccgcuccacgaacagccggaucaaggccuccaugcccaccaccaucgccaagaacaccgucaagagcgugggcaaguucugccuggaggccagcuucaacuaccucaagucccccaacuucagcaagcugaucaacaucaucaucugguuccugcuccuguccgugugccugggcagccucaucuacuccacggccgcgcuggggguccugaugagcaaccucggcaugccguccuacugcaccggguaccgcgagggcuaccugaacagcaccaacgugaccaucgccacguacugcaccggcuccauccccugcagcgugugccuguccgggcucgacagccuggacaccuaccccucccuggagaccauccagaucacgaucagcuccuucaagugggaccucaccgccuucggccuggucgccgagugguuccuggccuacauccucuucacccgguucuucuacgugcuggggcuggcggccaucaugcagcucuucuucagcuacuucgccgugcacuucaucuccaacagcuggcugauguggcugaucaucaaccugguccagauggcccccaucuccgcgauggugcgcauguacaucuucuucgccagcuucuacuacguguggaagagcuacguccacgugguggacggcugcaacuccagcaccugcaugaugugcuacaagcggaaccgcgccacgcgggucgagugcaccaccaucgugaacgggguccgccgguccuucuacguguacgccaacggcggcaagggguucugcaagcuccacaacuggaacugcgugaacugcgacaccuucugcgccggcagcacguucaucuccgacgaggucgcgcgcgaccugagccugcaguucaagcggccgaucaaccccaccgaccaguccagcuacaucguggacuccgugaccgucaagaacgggagcauccaccucuacuucgacaaggccggccagaagaccuacgagcgccacucccugagccacuucgugaaccuggacaaccuccgggccaacaacacgaaggggucccugcccaucaacgugaucgucuucgacggcaagagcaagugcgaggaguccagcgccaaguccgccagcguguacuacucccagcugaugugccagcccauccuccugcuggaccaggcgcucgugagcgacgucggcgacagcgccgagguggccgugaagauguucgacgccuacgucaacaccuucuccagcaccuucaacgugccgauggagaagcugaagacccugguggccacggcggaggccgagcucgccaagaacgucucccuggacaacgugcugagcaccuucaucuccgccgcgcgccagggguucguggacagcgacgucgagaccaaggacgugguggagugccucaagcugucccaccagagcgacaucgaggucaccggcgacuccugcaacaacuacaugcugacguacaacaagguggagaacaugaccccccgggaccucggggccugcaucgacugcagcgcccgccacaucaacgcccagguggccaagucccacaacaucgcgcugaucuggaacgucaaggacuucaugagccuguccgagcagcuccggaagcagauccgcagcgccgccaagaagaacaaccugcccuucaagcugaccugcgccaccacgcgccagguggugaacgucgugaccaccaagaucgcccucaagggcggguga

SEQ ID NO: 17749 - RNA, 5841 nt, Artificial Sequence
  SARS-CoV-2__MT846558.1__non-structural protein 3 (NSP3) CDS gc
auggcccccaccaaggugaccuucggcgacgacacggucaucgaggugcagggguacaagagcgugaacaucaccuucgagcuggacgagcgcaucgacaagguccucaacgagaagugcuccgccuacaccguggagcugggcaccgaggugaacgaguucgcgugcgucguggccgacgccgugaucaagacgcugcagccggucagcgagcuccugaccccccuggggaucgaccucgacgagugguccauggccaccuacuaccuguucgacgagagcggcgaguucaagcuggccucccacauguacugcagcuucuacccccccgacgaggacgaggaggagggggacugcgaggaggaggaguucgagccguccacccaguacgaguacggcacggaggacgacuaccagggcaagccccucgaguucggggcgaccagcgccgcccugcagcccgaggaggagcaggaggaggacuggcuggacgacgacucccagcagaccgugggccagcaggacgggagcgaggacaaccagaccacgaccauccagaccaucguggagguccagccccagcucgagauggagcugaccccgguggugcagacgaucgaggucaacuccuucagcggcuaccugaagcucaccgacaacguguacaucaagaacgccgacaucguggaggaggcgaagaaggucaagcccaccgugguggucaacgccgccaacguguaccugaagcacgggggcggcguggccggggcccugaacaaggcgaccaacaacgccaugcaggucgaguccgacgacuacaucgccacgaacggcccccucaagguggggggcagcugcguccuguccggccacaaccuggccaagcacugccuccacgugguggggcccaacgucaacaagggcgaggacauccagcugcugaagagcgccuacgagaacuucaaccagcacgaggugcuccuggcgccgcugcucuccgccgggaucuucggcgccgaccccauccacagccugcgggugugcgucgacaccgugcgcaccaacguguaccuggccgucuucgacaagaaccucuacgacaagcugguguccagcuuccuggagaugaagagcgagaagcagguggagcagaacaucgccgagauccccaaggaggaggucaagcccuucaucaccgaguccaagccgagcguggagcagcggaagcaggacgacaagaagaucaaggcgugcguggaggaggucacgaccacccucgaggagaccaaguuccugacggagaaccugcuccuguacaucgacaucaacgggaaccugcaccccgacuccgccacccucgugagcgacaucgacaucaccuuccugaagaaggacgcccccuacaucgugggcgacgucgugcaggagggcgugcugaccgccgucgugauccccacgaagaaggccgggggcaccaccgagaugcucgcgaaggcccugcgcaagguguccaccgacaacuacaucacgaccuacccggggcagggccugaacggguacaccgucgaggaggccaagaccgugcucaagaagugcaagagcgccuucuacauccugcccuccaucaucagcaacgagaagcaggagauccugggcaccguguccuggaaccuccgggagaugcuggcgcacgccgaggagacgcgcaagcugaugcccgucugcguggagaccaaggccaucgugagcaccauccagcggaaguacaagggcaucaagauccaggagggggucguggacuacggcgcccgcuucuacuucuacaccuccaagacgaccguggccagccugaucaacacccucaacgaccugaacgagacccuggucacgaugccccucggguacgugacccacggccugaaccuggaggaggcggcccgguacaugcgcucccucaaggugccggccaccgucagcguguccagccccgacgccgugaccgccuacaacggguaccugacguccagcuccaagacccccgaggagcacuucaucgagaccaucagccuggcgggcagcuacaaggacugguccuacagcggccaguccacccagcucgggaucgaguuccugaagcggggcgacaagagcgucuacuacacguccaaccccaccaccuuccaccuggacggggaggugaucaccuucgacaaccucaagacgcugcugagccuccgcgaggugcggaccaucaaggucuucaccaccguggacaacaucaaccugcacacgcagguggucgacauguccaugaccuacggccagcaguucggcccgaccuaccuggacggggccgacgugaccaagaucaagccccacaacagccacgagggcaagacguucuacgugcuccccaacgacgacacccugcgcgucgaggccuucgaguacuaccacaccaccgacccguccuuccuggggcgguacaugagcgcccucaaccacacgaagaaguggaaguacccccaggugaacggccugaccuccaucaagugggccgacaacaacugcuaccuggcgaccgcccuccugacccugcagcagaucgagcucaaguucaacccccccgcccugcaggacgccuacuaccgcgcgcgggccggggaggccgccaacuucugcgcccugauccucgcguacugcaacaagacggugggcgagcugggcgacguccgcgagaccaugagcuaccuguuccagcacgccaaccucgacuccugcaagcgggugcugaacgucgugugcaagaccugcgggcugcagcagaccacccucaagggcguggaggccgucauguacauggggacgcugagcuacgagcaguucaagaagggcgugcagaucccgugcaccugcgggaagcaggccaccaaguaccuggugcagcaggaguccagcuucgucaugauguccgccccccccgcgcaguacgagcucaagcacggcaccuucacgugcgccagcgaguacaccggcaacuaccagugcgggcacuacaagcacaucaccagcaaggagacccuguacugcaucgacggcgcccugcucacgaaguccagcgaguacaaggggcccaucaccgacguguucuacaaggagaacuccuacaccaccacgaucaagccggugaccuacaagcuggacggcgucgugugcaccgagaucgaccccaagcuggacaacuacuacaagaaggacaacagcuacuucaccgagcagcccaucgaccucgugcccaaccagccguaccccaacgccuccuucgacaacuucaaguucgucugcgacaacaucaaguucgccgacgaccugaaccagcugacgggguacaagaagcccgcgagccgcgagcucaaggugaccuucuuccccgaccugaacggcgacguggucgccaucgacuacaagcacuacaccccguccuucaagaagggcgccaagcugcuccacaagcccaucguguggcacgugaacaacgccaccaacaaggcgacguacaagcccaacaccuggugcauccggugccuguggagcaccaagcccgucgagaccuccaacagcuucgacgugcugaaguccgaggacgcccaggggauggacaaccucgccugcgaggaccugaagccggugagcgaggaggucguggagaaccccacgauccagaaggacgugcuggagugcaacgucaagaccaccgagguggugggcgacaucauccucaagcccgccaacaacucccugaagaucaccgaggaggucgggcacacggaccugauggccgcguacguggacaacagcucccucaccaucaagaagcccaacgagcugagccgcgugcugggccucaagacccuggccacccacgggcuggccgccgucaacuccgugccgugggacacgaucgccaacuacgcgaagcccuuccucaacaagguggucagcaccaccaccaacaucgugacgcgcugccugaaccgggugugcaccaacuacaugcccuacuucuucacccugcuccugcagcugugcaccuucacccgcuccacgaacagccggaucaaggccagcaugccgaccaccaucgccaagaacaccgucaaguccgugggcaaguucugccucgaggccagcuucaacuaccugaagucccccaacuucagcaagcugaucaacaucaucaucugguuccuccugcuguccgugugccucggcagccugaucuacuccacggccgcgcuggggguccucaugagcaaccugggcaugcccuccuacugcaccggguaccgcgagggcuaccugaacagcaccaacgugaccaucgccacguacugcaccggcuccauccccugcagcgugugccucuccgggcuggacagccuggacaccuacccgucccucgagaccauccagaucacgaucagcuccuucaagugggaccugaccgccuucggccuggucgccgagugguuccucgccuacauccuguucacccgguucuucuacgugcuggggcucgcggccaucaugcagcuguucuucagcuacuucgccgugcacuucaucuccaacagcuggcugauguggcugaucaucaaccucguccagauggcccccaucagcgcgauggugcgcauguacaucuucuucgccuccuucuacuacguguggaagagcuacguccacgugguggacggcugcaacuccagcaccugcaugaugugcuacaagcggaaccgcgccacgcgggucgagugcaccaccaucgugaacgggguccgccgguccuucuacguguacgccaacggcggcaagggguucugcaagcugcacaacuggaacugcgugaacugcgacaccuucugcgccggcagcacguucaucuccgacgaggucgcgcgcgaccugagccuccaguucaagcggcccaucaaccccaccgaccaguccagcuacaucguggacuccgugaccgucaagaacgggagcauccaccuguacuucgacaaggccggccagaagaccuacgagcgccacucccugagccacuucgugaacuucgacaaccuccgggccaacaacacgaaggggucccugccgaucaacgugaucgucuucgacggcaagagcaagugcgaggaguccagcgccaaguccgccagcguguacuacagccagcugaugugccagcccauccuccugcuggaccaggcgcucguguccgacgucggcgacagcgccgagguggccgugaagauguucgacgccuacgucaacaccuucuccagcaccuucaacgugcccauggagaagcugaagacccugguggccacggcggaggccgagcucgccaagaacgucucccuggacaacgugcugagcaccuucaucuccgccgcgcgccagggguucguggacagcgacgucgagaccaaggacgugguggagugccucaagcugucccaccagagcgacaucgaggucaccggcgacuccugcaacaacuacaugcugacguacaacaagguggagaacaugaccccccgggaccucggggccugcaucgacugcagcgcccgccacaucaacgcccagguggccaagucccacaacaucgcgcugaucuggaacgucaaggacuucaugagccuguccgagcagcuccggaagcagauccgcagcgccgccaagaagaacaaccugccguucaagcugaccugcgccaccacgcgccagguggugaacgucgugaccaccaagaucgcccucaagggcggguga

SEQ ID NO: 17750 - RNA, 5841 nt, Artificial Sequence
  SARS-CoV-2__MT846565.1__non-structural protein 3 (NSP3) CDS gc
auggcccccaccaaggugaccuucggcgacgacacggucaucgaggugcagggguacaagagcgugaacaucaccuucgagcuggacgagcgcaucgacaagguccucaacgagaagugcuccgccuacaccguggagcugggcaccgaggugaacgaguucgcgugcgucguggccgacgccgugaucaagacgcugcagccggucagcgagcuccugaccccccuggggaucgaccucgacgagugguccauggccaccuacuaccuguucgacgagagcggcgaguucaagcuggccucccacauguacugcagcuucuacccccccgacgaggacgaggaggagggggacugcgaggaggaggaguucgagccguccacccaguacgaguacggcacggaggacgacuaccagggcaagccccucgaguucggggcgaccagcgccgcccugcagcccgaggaggagcaggaggaggacuggcuggacgacgacucccagcagaccgugggccagcaggacgggagcgaggacaaccagaccacgaccauccagaccaucguggagguccagccccagcucgagauggagcugaccccgguggugcagacgaucgaggucaacuccuucagcggcuaccugaagcucaccgacaacguguacaucaagaacgccgacaucguggaggaggcgaagaaggucaagcccaccgugguggucaacgccgccaacguguaccugaagcacgggggcggcguggccggggcccugaacaaggcgaccaacaacgccaugcaggucgaguccgacgacuacaucgccacgaacggcccccucaagguggggggcagcugcguccuguccggccacaaccuggccaagcacugccuccacgugguggggcccaacgucaacaagggcgaggacauccagcugcugaagagcgccuacgagaacuucaaccagcacgaggugcuccuggcgccgcugcucuccgccgggaucuucggcgccgaccccauccacagccugcgggugugcgucgacaccgugugcaccaacguguaccuggccgucuucgacaagaaccucuacgacaagcugguguccagcuuccuggagaugaagagcgagaagcagguggagcagaagaucgccgagauccccaaggaggaggucaagcccuucaucaccgaguccaagccgagcguggagcagcgcaagcaggacgacaagaagaucaaggcgugcguggaggaggucacgaccacccucgaggagaccaaguuccugacggagaaccugcuccuguacaucgacaucaacgggaaccugcaccccgacuccgccacccucgugagcgacaucgacaucaccuuccugaagaaggacgcccccuacaucgugggcgacgucgugcaggagggcgugcugaccgccgucgugauccccacgaagaaggccgggggcaccaccgagaugcucgcgaaggcccugcggaaggugccgaccgacaacuacaucacgaccuaccccgggcagggccugaacggguacaccgucgaggaggccaagaccgugcucaagaagugcaaguccgccuucuacauccugcccagcaucaucuccaacgagaagcaggagauccugggcaccgugagcuggaaccuccgcgagaugcuggcgcacgccgaggagacgcggaagcugaugcccgucugcguggagaccaaggccaucguguccaccauccagcgcaaguacaagggcaucaagauccaggagggggucguggacuacggcgcccgguucuacuucuacaccagcaagacgaccguggccucccugaucaacacccucaacgaccugaacgagacccuggucacgaugccgcucggguacgugacccacggccugaaccuggaggaggcggcccgcuacaugcggagccucaaggugcccgccaccgucuccgugagcucccccgacgccgugaccgccuacaacggguaccugacgagcuccagcaagacccccgaggagcacuucaucgagaccaucucccuggcgggcagcuacaaggacuggagcuacuccggccagagcacccagcucgggaucgaguuccugaagcgcggcgacaaguccgucuacuacacgagcaacccgaccaccuuccaccuggacggggaggugaucaccuucgacaaccucaagacgcugcugucccuccgggaggugcgcaccaucaaggucuucaccaccguggacaacaucaaccugcacacgcagguggucgacaugagcaugaccuacggccagcaguucggccccaccuaccuggacggggccgacgugaccaagaucaagccccacaacucccacgagggcaagacguucuacgugcucccgaacgacgacacccugcgggucgaggccuucgaguacuaccacaccaccgaccccagcuuccuggggcgcuacauguccgcccucaaccacacgaagaaguggaaguacccccaggugaacggccugaccagcaucaagugggccgacaacaacugcuaccuggcgaccgcccuccugacccugcagcagaucgagcucaaguucaaccccccggcccugcaggacgccuacuaccgggcgcgcgccggggaggccgccaacuucugcgcccugauccucgcguacugcaacaagacggugggcgagcugggcgacguccgggagaccauguccuaccuguuccagcacgccaaccucgacagcugcaagcgcgugcugaacgucgugugcaagaccugcgggcagcagcagaccacccugaagggcguggaggccgucauguacauggggacgcucuccuacgagcaguucaagaagggcgugcagauccccugcaccugcgggaagcaggccaccaaguaccuggugcagcaggagagccccuucgucaugauguccgcccccccggcgcaguacgagcugaagcacggcaccuucacgugcgccagcgaguacaccggcaacuaccagugcgggcacuacaagcacaucaccuccaaggagacccucuacugcaucgacggcgcccugcugacgaagagcagcgaguacaaggggcccaucaccgacguguucuacaaggagaacuccuacaccaccacgaucaagcccgugaccuacaagcucgacggcgucgugugcaccgagaucgaccccaagcuggacaacuacuacaagaaggacaacagcuacuucaccgagcagccgaucgaccuggugcccaaccagcccuaccccaacgccuccuucgacaacuucaaguucgucugcgacaacaucaaguucgccgacgaccucaaccagcugacgggguacaagaagccggcgagccgggagcugaaggugaccuucuuccccgaccucaacggcgacguggucgccaucgacuacaagcacuacacccccuccuucaagaagggcgccaagcugcugcacaagcccaucguguggcacgugaacaacgccaccaacaaggcgacguacaagccgaacaccuggugcauccgcugccucuggagcaccaagcccgucgagaccuccaacagcuucgacgugcugaaguccgaggacgcccaggggauggacaaccuggccugcgaggaccucaagcccgugagcgaggaggucguggagaaccccacgauccagaaggacgugcuggagugcaacgucaagaccaccgagguggugggcgacaucauccugaagccggccaacaacucccucaagaucaccgaggaggucgggcacacggaccugauggccgcguacguggacaacagcucccugaccaucaagaagcccaacgagcucagccgggugcugggccugaagacccucgccacccacgggcuggccgccgucaacuccgugcccugggacacgaucgccaacuacgcgaagccguuccugaacaagguggucagcaccaccaccaacaucgugacgcgcugccucaaccgcgugugcaccaacuacaugcccuacuucuucacccugcugcuccagcugugcaccuucacccgguccacgaacagccgcaucaaggccuccaugcccaccaccaucgccaagaacaccgucaagagcgugggcaaguucugccuggaggccagcuucaacuaccucaagucccccaacuucagcaagcugaucaacaucaucaucugguuccugcuccuguccgugugccugggcagccucaucuacuccacggccgcgcuggggguccugaugagcaaccucggcaugccguccuacugcaccggguaccgggagggcuaccugaacagcaccaacgugaccaucgccacguacugcaccggcuccauccccugcagcgugugccuguccgggcucgacagccuggacaccuaccccucccuggagaccauccagaucacgaucagcuccuucaagugggaccucaccgccuucggccuggucgccgagugguuccuggccuacauccucuucacccgcuucuucuacgugcuggggcuggcggccaucaugcagcucuucuucagcuacuucgccgugcacuucaucuccaacagcuggcugauguggcugaucaucaaccugguccagauggcccccaucuccgcgauggugcggauguacaucuucuucgccagcuucuacuacguguggaagagcuacguccacgugguggacggcugcaacuccagcaccugcaugaugugcuacaagcgcaaccgggccacgcgcgucgagugcaccaccaucgugaacgggguccggcgcuccuucuacguguacgccaacggcggcaagggguucugcaagcuccacaacuggaacugcgugaacugcgacaccuucugcgccggcagcacguucaucuccgacgaggucgcgcgggaccugagccugcaguucaagcgcccgaucaaccccaccgaccaguccagcuacaucguggacuccgugaccgucaagaacgggagcauccaccucuacuucgacaaggccggccagaagaccuacgagcggcacucccugagccacuucgugaaccuggacaaccuccgcgccaacaacacgaaggggucccugcccaucaacgugaucgucuucgacggcaagagcaagugcgaggaguccagcgccaaguccgccagcguguacuacucccagcugaugugccagcccauccuccugcuggaccaggcgcucgugagcgacgucggcgacagcgccgagguggccgugaagauguucgacgccuacgucaacaccuucuccagcaccuucaacgugccgauggagaagcugaagacccugguggccacggcggaggccgagcucgccaagaacgucucccuggacaacgugcugagcaccuucaucuccgccgcgcggcagggguucguggacagcgacgucgagaccaaggacgugguggagugccucaagcugucccaccagagcgacaucgaggucaccggcgacuccugcaacaacuacaugcugacguacaacaagguggagaacaugaccccccgcgaccucggggccugcaucgacugcagcgcccggcacaucaacgcccagguggccaagucccacaacaucgcgcugaucuggaacgucaaggacuucaugagccuguccgagcagcuccgcaagcagauccggagcgccgccaagaagaacaaccugcccuucaagcugaccugcgccaccacgcgccagguggugaacgucgugaccaccaagaucgcccucaagggcggguga

SEQ ID NO: 17751 - RNA, 5841 nt, Artificial Sequence
  SARS-CoV-2__MT846623.1__non-structural protein 3 (NSP3) CDS gc
auggcccccaccaaggugaccuucggcgacgacacggucaucgaggugcagggguacaagagcgugaacaucaccuucgagcuggacgagcgcaucgacaagguccucaacgagaagugcuccgccuacaccguggagcugggcaccgaggugaacgaguucgcgugcgucguggccgacgccgugaucaagacgcugcagccggucagcgagcuccugaccccccuggggaucgaccucgacgagugguccauggccaccuacuaccuguucgacgagagcggcgaguucaagcuggccucccacauguacugcagcuucuacccccccgacgaggacgaggaggagggggacugcgaggaggaggaguucgagccguccacccaguacgaguacggcacggaggacgacuaccagggcaagccccucgaguucggggcgaccagcgccgcccugcagcuggaggaggagcaggaggaggacuggcucgacgacgacucccagcagaccgugggccagcaggacgggagcgaggacaaccagaccacgaccauccagaccaucguggagguccagccccagcuggagauggagcugacccccguggugcagacgaucgaggucaacuccuucagcggcuaccucaagcugaccgacaacguguacaucaagaacgccgacaucguggaggaggcgaagaaggucaagccgaccgugguggucaacgccgccaacguguaccugaagcacgggggcggcguggccggggcccucaacaaggcgaccaacaacgccaugcaggucgaguccgacgacuacaucgccacgaacggcccccugaagguggggggcagcugcguccuguccggccacaaccucgccaagcacugccugcacgugguggggcccaacgucaacaagggcgaggacauccagcugcucaagagcgccuacgagaacuucaaccagcacgaggugcugcuggcgccccuccuguccgccgggaucuucggcgccgacccgauccacagccugcgggugugcgucgacaccgugcgcaccaacguguaccucgccgucuucgacaagaaccuguacgacaagcugguguccagcuuccucgagaugaagagcgagaagcagguggagcagaagaucgccgagauccccaaggaggaggucaagcccuucaucaccgaguccaagcccagcguggagcagcggaagcaggacgacaagaagaucaaggcgugcguggaggaggucacgaccacccuggaggagaccaaguuccugacggagaaccuccugcuguacaucgacaucaacgggaaccuccacccggacuccgccacccuggugagcgacaucgacaucaccuuccugaagaaggacgcccccuacaucgugggcgacgucgugcaggagggcgugcucaccgccgucgugauccccacgaagaaggccgggggcaccaccgagaugcuggcgaaggcccugcgcaaggugcccaccgacaacuacaucacgaccuacccggggcagggccucaacggguacaccgucgaggaggccaagaccgugcugaagaagugcaaguccgccuucuacauccugcccagcaucaucuccaacgagaagcaggagauccucggcaccgugagcuggaaccugcgggagaugcuggcgcacgccgaggagacgcgcaagcugaugcccgucugcguggagaccaaggccaucguguccaccauccagcggaaguacaagggcaucaagauccaggagggggucguggacuacggcgcccgcuucuacuucuacaccagcaagacgaccguggccucccucaucaacacccugaacgaccugaacgagacccucgucacgaugccccugggguacgugacccacggccugaaccucgaggaggcggcccgguacaugcgcagccugaaggugccggccaccgucuccgugagcucccccgacgccgugaccgccuacaacggguaccugacgagcuccagcaagacccccgaggagcacuucaucgagaccaucucccucgcgggcagcuacaaggacuggagcuacuccggccagagcacccagcuggggaucgaguuccugaagcggggcgacaaguccgucuacuacacgagcaaccccaccaccuuccaccucgacggggaggugaucaccuucgacaaccugaagacgcugcucucccugcgcgaggugcggaccaucaaggucuucaccaccguggacaacaucaaccugcacacgcagguggucgacaugagcaugaccuacggccagcaguucggcccgaccuaccucgacggggccgacgugaccaagaucaagccccacaacucccacgagggcaagacguucuacgugcugcccaacgacgacacccugcgcgucgaggccuucgaguacuaccacaccaccgacccgagcuuccucgggcgguacauguccgcccugaaccacacgaagaaguggaaguacccccaggugaacggccugaccagcaucaagugggccgacaacaacugcuaccucgcgaccgcccugcugacccuccagcagaucgagcugaaguucaacccccccgcccugcaggacgccuacuaccgcgcgcgggccggggaggccgccaacuucugcgcccucauccuggcguacugcaacaagacggugggcgagcugggcgacguccgcgagaccauguccuaccucuuccagcacgccaaccuggacagcugcaagcgggugcugaacgucgugugcaagaccugcgggcagcagcagaccacccucaagggcguggaggccgucauguacauggggacgcuguccuacgagcaguucaagaagggcgugcagaucccgugcaccugcgggaagcaggccaccaaguaccuggugcagcaggagagccccuucgucaugauguccgccccccccgcgcaguacgagcucaagcacggcaccuucacgugcgccagcgaguacaccggcaacuaccagugcgggcacuacaagcacaucaccuccaaggagacccuguacugcaucgacggcgcccugcucacgaagagcagcgaguacaaggggccgaucaccgacguguucuacaaggagaacuccuacaccaccacgaucaagcccgugaccuacaagcuggacggcgucgugugcaccgagaucgaccccaagcuggacaacuacuacaagaaggacaacagcuacuucaccgagcagcccaucgaccucgugccgaaccagcccuaccccaacgccuccuucgacaacuucaaguucgucugcgacaacaucaaguucgccgacgaccugaaccagcugacgggguacaagaagcccgcgagccgcgagcucaaggugaccuucuucccggaccugaacggcgacguggucgccaucgacuacaagcacuacacccccuccuucaagaagggcgccaagcugcuccacaagcccaucguguggcacgugaacaacgccaccaacaaggcgacguacaagcccaacaccuggugcauccggugccuguggagcaccaagccggucgagaccuccaacagcuucgacgugcugaaguccgaggacgcccaggggauggacaaccucgccugcgaggaccugaagcccgugagcgaggaggucguggagaaccccacgauccagaaggacgugcuggagugcaacgucaagaccaccgagguggugggcgacaucauccucaagcccgccaacaacucccugaagaucaccgaggaggucgggcacacggaccugauggccgcguacguggacaacagcucccucaccaucaagaagccgaacgagcugagccgcgugcugggccucaagacccuggccacccacgggcuggccgccgucaacuccgugcccugggacacgaucgccaacuacgcgaagcccuuccucaacaagguggucagcaucaccaccaacaucgugacccgcugccugaaccgggugugcacgaacuacaugccguacuucuucacccugcuccugcagcugugcaccuucacccgcuccaccaacagccggaucaaggccuccaugcccacgaccaucgccaagaacaccgucaagagcgugggcaaguucugccucgaggccagcuucaacuaccugaagucccccaacuucagcaagcugaucaacaucaucaucugguuccuccugcuguccgugugccucggcagccugaucuacuccaccgccgcgcuggggguccucaugagcaaccugggcaugcccuccuacugcacgggguaccgcgagggcuaccugaacagcaccaacgugaccaucgccaccuacugcacgggcuccaucccgugcagcgugugccucuccgggcuggacagccuggacaccuaccccucccucgagaccauccagaucaccaucagcuccuucaagugggaccugacggccuucggccuggucgccgagugguuccucgccuacauccuguucacccgguucuucuacgugcuggggcucgcggccaucaugcagcuguucuucagcuacuucgccgugcacuucaucuccaacagcuggcugauguggcugaucaucaaccucguccagauggcccccaucuccgcgauggugcgcauguacaucuucuucgccagcuucuacuacguguggaagagcuacguccacgugguggacggcugcaacuccagcaccugcaugaugugcuacaagcggaaccgcgccacccgggucgagugcacgaccaucgugaacgggguccgccgguccuucuacguguacgccaacggcggcaagggguucugcaagcugcacaacuggaacugcgugaacugcgacaccuucugcgccggcagcaccuucaucuccgacgaggucgcgcgcgaccugagccuccaguucaagcggcccaucaacccgacggaccaguccagcuacaucguggacuccgugaccgucaagaacgggagcauccaccuguacuucgacaaggccggccagaagaccuacgagcgccacucccugagccacuucgugaaccucgacaaccugcgggccaacaacaccaaggggucccugcccaucaacgugaucgucuucgacggcaagagcaagugcgaggaguccagcgccaaguccgccagcguguacuacucccagcucaugugccagcccauccugcugcucgaccaggcgcuggugagcgacgucggcgacagcgccgagguggccgugaagauguucgacgccuacgucaacacguucuccagcaccuucaacgugcccauggagaagcugaagacccucguggccaccgcggaggccgagcuggccaagaacgucucccuggacaacgugcucagcacguucaucuccgccgcgcgccagggguucguggacagcgacgucgagaccaaggacgugguggagugccugaagcugucccaccagagcgacaucgaggucaccggcgacuccugcaacaacuacaugcucaccuacaacaagguggagaacaugacgccgcgggaccugggggccugcaucgacugcagcgcccgccacaucaacgcccagguggccaagucccacaacaucgcgcugaucuggaacgucaaggacuucaugagccucuccgagcagcugcggaagcagauccgcagcgccgccaagaagaacaaccugcccuucaagcucaccugcgccaccacccgccagguggugaacgucgugacgaccaagaucgcccugaagggcggguga

SEQ ID NO: 17752 - RNA, 5841 nt, Artificial Sequence
  SARS-CoV-2__MT846644.1__non-structural protein 3 (NSP3) CDS gc
auggcccccaccaaggugaccuucggcgacgacacggucaucgaggugcagggguacaagagcgugaacaucaccuucgagcuggacgagcgcaucgacaagguccucaacgagaagugcuccgccuacaccguggagcugggcaccgaggugaacgaguucgcgugcgucguggccgacgccgugaucaagacgcugcagccggucagcgagcuccugaccccccuggggaucgaccucgacgagugguccauggccaccuacuaccuguucgacgagagcggcgacuucaagcuggccucccacauguacugcagcuucuacccccccgacgaggacgaggaggagggggacugcgaggaggaggaguucgagccguccacccaguacgaguacggcacggaggacgacuaccagggcaagccccucgaguucggggcgaccagcgccgcccugcagcccgaggaggagcaggaggaggacuggcuggacgacgacucccagcagaccgugggccagcaggacgggagcgaggacaaccagaccacgaccauccagaccaucguggagguccagccccagcucgagauggagcugaccccgguggugcagacgaucgaggucaacuccuucagcggcuaccugaagcucaccgacaacguguacaucaagaacgccgacaucguggaggaggcgaagaaggucaagcccaccgugguggucaacgccgccaacguguaccugaagcacgggggcggcguggccggggcccugaacaaggcgaccaacaacgccaugcaggucgaguccgacgacuacaucgccacgaacggcccccucaagguggggggcagcugcguccuguccggccacaaccuggccaagcacugccuccacgugguggggcccaacgucaacaagggcgaggacauccagcugcugaagagcgccuacgagaacuucaaccagcacgaggugcuccuggcgccgcugcucuccgccgggaucuucggcgccgaccccauccacagccugcgggugugcgucgacaccgugcgcaccaacguguaccuggccgucuucgacaagaaccucuacgacaagcugguguccagcuuccuggagaugaagagcgagaagcagguggagcagaagaucgccgagauccccaaggaggaggucaagcccuucaucaccgaguccaagccgagcguggagcagcggaagcaggacgacaagaagaucaaggcgugcguggaggaggucacgaccacccucgaggagaccaaguuccugacggagaaccugcuccuguacaucgacaucaacgggaaccugcaccccgacuccgccacccucgugagcgacaucgacaucaccuuccugaagaaggacgcccccuacaucgugggcgacgucgugcaggagggcgugcugaccgccgucgugauccccacgaagaaggccgggggcaccaccgagaugcucgcgaaggcccugcgcaaggugccgaccgacaacuacaucacgaccuaccccgggcagggccugaacggguacaccgucgaggaggccaagaccgugcucaagaagugcaaguccgccuucuacauccugcccagcaucaucuccaacgagaagcaggagauccugggcaccgugagcuggaaccuccgggagaugcuggcgcacgccgaggagacgcgcaagcugaugcccgucugcguggagaccaaggccaucguguccaccauccagcggaaguacaagggcaucaagauccaggagggggucguggacuacggcgcccgcuucuacuucuacaccagcaagacgaccguggccucccugaucaacacccucaacgaccugaacgagacccuggucacgaugccgcucggguacgugacccacggccugaaccuggaggaggcggcccgguacaugcgcagccucaaggugcccgccaccgucuccgugagcucccccgacgccgugaccgccuacaacggguaccugacgagcuccagcaagacccccgaggagcacuucaucgagaccaucucccuggcgggcagcuacaaggacuggagcuacuccggccagagcacccagcucgggaucgaguuccugaagcggggcgacaaguccgucuacuacacgagcaacccgaccaccuuccaccuggacggggaggugaucaccuucgacaaccucaagacgcugcugucccuccgcgaggugcggaccaucaaggucuucaccaccguggacaacaucaaccugcacacgcagguggucgacaugagcaugaccuacggccagcaguucggccccaccuaccuggacggggccgacgugaccaagaucaagccccacaacucccacgagggcaagacguucuacgugcucccgaacgacgacacccugcgcgucgaggccuucgaguacuaccacaccaccgaccccagcuuccuggggcgguacauguccgcccucaaccacacgaagaaguggaaguacccccaggugaacggccugaccagcaucaagugggccgacaacaacugcuaccuggcgaccgcccuccugacccugcagcagaucgagcucaaguucaaccccccggcccugcaggacgccuacuaccgcgcgcgggccggggaggccgccaacuucugcgcccugauccucgcguacugcaacaagacggugggcgagcugggcgacguccgcgagaccauguccuaccuguuccagcacgccaaccucgacagcugcaagcgggugcugaacgucgugugcaagaccugcgggcagcagcagaccacccugaagggcguggaggccgucauguacauggggacgcucuccuacgagcaguucaagaagggcgugcagauccccugcaccugcgggaagcaggccaccaaguaccuggugcagcaggagagccccuucgucaugauguccgcccccccggcgcaguacgagcugaagcacggcaccuucacgugcgccagcgaguacaccggcaacuaccagugcgggcacuacaagcacaucaccuccaaggagacccucuacugcaucgacggcgcccugcugacgaagagcagcgaguacaaggggcccaucaccgacguguucuacaaggagaacuccuacaccaccacgaucaagcccgugaccuacaagcucgacggcgucgugugcaccgagaucgaccccaagcuggacaacuacuacaagaaggacaacagcuacuucaccgagcagccgaucgaccuggugcccaaccagcccuaccccaacgccuccuucgacaacuucaaguucgucugcgacaacaucaaguucgccgacgaccucaaccagcugacgggguacaagaagccggcgagccgcgagcugaaggugaccuucuuccccgaccucaacggcgacguggucgccaucgacuacaagcacuacacccccuccuucaagaagggcgccaagcugcugcacaagcccaucguguggcacgugaacaacgccaccaacaaggcgacguacaagccgaacaccuggugcauccggugccucuggagcaccaagcccgucgagaccuccaacagcuucgacgugcugaaguccgaggacgcccaggggauggacaaccuggccugcgaggaccucaagcccgugagcgaggaggucguggagaaccccacgauccagaaggacgugcuggagugcaacgucaagaccaccgagguggugggcgacaucauccugaagccggccaacaacucccucaagaucaccgaggaggucgggcacacggaccugauggccgcguacguggacaacagcucccugaccaucaagaagcccaacgagcucagccgcgugcugggccugaagacccucgccacccacgggcuggccgccgucaacuccgugcccugggacacgaucgccaacuacgcgaagccguuccugaacaagguggucagcaccaccaccaacaucgugacgcgcugccucaaccgggugugcaccaacuacaugcccuacuucuucacccugcugcuccagcugugcaccuucacccgcuccacgaacagccggaucaaggccuccaugcccaccaccaucgccaagaacaccgucaagagcgugggcaaguucugccuggaggccagcuucaacuaccucaagucccccaacuucagcaagcugaucaacaucaucaucugguuccugcuccuguccgugugccugggcagccucaucuacuccacggccgcgcuggggguccugaugagcaaccucggcaugccguccuacugcaccggguaccgcgagggcuaccugaacagcaccaacgugaccaucgccacguacugcaccggcuccauccccugcagcgugugccuguccgggcucgacagccuggacaccuaccccucccuggagaccauccagaucacgaucagcuccuucaagugggaccucaccgccuucggccuggucgccgagugguuccuggccuacauccucuucacccgguucuucuacgugcuggggcuggcggccaucaugcagcucuucuucagcuacuucgccgugcacuucaucuccaacagcuggcugauguggcugaucaucaaccugguccagauggcccccaucuccgcgauggugcgcauguacaucuucuucgccagcuucuacuacguguggaagagcuacguccacgugguggacggcugcaacuccagcaccugcaugaugugcuacaagcggaaccgcgccacgcgggucgagugcaccaccaucgugaacgggguccgccgguccuucuacguguacgccaacggcggcaagggguucugcaagcuccacaacuggaacugcgugaacugcgacaccuucugcgccggcagcacguucaucuccgacgaggucgcgcgcgaccugagccugcaguucaagcggccgaucaaccccaccgaccaguccagcuacaucguggacuccgugaccgucaagaacgggagcauccaccucuacuucgacaaggccggccagaagaccuacgagcgccacucccugagccacuucgugaaccuggacaaccuccgggccaacaacacgaaggggucccugcccaucaacgugaucgucuucgacggcaagagcaagugcgaggaguccagcgccaaguccgccagcguguacuacucccagcugaugugccagcccauccuccugcuggaccaggcgcucgugagcgacgucggcgacagcgccgagguggccgugaagauguucgacgccuacgucaacaccuucuccagcaccuucaacgugccgauggagaagcugaagacccugguggccacggcggaggccgagcucgccaagaacgucucccuggacaacgugcugagcaccuucaucuccgccgcgcgccagggguucguggacagcgacgucgagaccaaggacgugguggagugccucaagcugucccaccagagcgacaucgaggucaccggcgacuccugcaacaacuacaugcugacguacaacaagguggagaacaugaccccccgggaccucggggccugcaucgacugcagcgcccgccacaucaacgcccagguggccaagucccacaacaucgcgcugaucuggaacgucaaggacuucaugagccuguccgagcagcuccggaagcagauccgcagcgccgccaagaagaacaaccugcccuucaagcugaccugcgccaccacgcgccagguggugaacgucgugaccaccaagaucgcccucaagggcggguga

SEQ ID NO: 17753 - RNA, 5841 nt, Artificial Sequence
  SARS-CoV-2__MT846686.1__non-structural protein 3 (NSP3) CDS gc
auggcccccaccaaggugaccuucggcgacgacacggucaucgaggugcagggguacaagagcgugaacaucaccuucgagcuggacgagcgcaucgacaagguccucaacgagaagugcuccgccuacaccguggagcugggcaccgaggugaacgaguucgcgugcgucguggccgacgccgugaucaagacgcugcagccggucagcgagcuccugaccccccuggggaucgaccucgacgagugguccauggccaccuacuaccuguucgacgagagcggcgaguucaagcuggccucccacauguacugcagcuucuacccccccgacgaggacgaggaggagggggacugcgaggaggaggaguucgagccguccacccaguacgaguacggcacggaggacgacuaccagggcaagccccucgaguucggggcgaccagcgccgcccugcagcccgaggaggagcaggaggaggacuggcuggacgacgacucccagcagaccgugggccagcaggacgggagcgaggacaaccagaccacgaccauccagaccaucguggagguccagccccagcucgagauggagcugaccccgguggugcagacgaucgaggucaacuccuucagcggcuaccugaagcucaccgacaacguguacaucaagaacgccgacaucguggaggaggcgaagaaggucaagcccaccgugguggucaacgccgccaacguguaccugaagcacgggggcggcguggccggggcccugaacaaggcgaccaacaacgccaugcaggucgaguccgacgacuacaucgccacgaacggcccccucaagguggggggcagcugcguccuguccggccacaaccuggccaagcacugccuccacgugguggggcccaacgucaacaagggcgaggacauccagcugcugaagagcgccuacgagaacuucaaccagcacgaggugcuccuggcgccgcugcucuccgccgggaucuucggcgccgaccccauccacagccugcgggugugcgucgacaccgugcgcaccaacguguaccuggccgucuucgacaagaaccucuacgacaagcugguguccagcuuccuggagaugaagagcgagaagcagguggagcagaagaucgccgagauccccaaggaggaggucaagcccuucaucaccgaguccaagccgagcguggagcagcggaagcaggacgacaagaagaucaaggcgugcguggaggaggucacgaccacccucgaggagaccaaguuccugacggagaaccugcuccuguacaucgacaucaacgggaaccugcaccccgacuccgccacccucgugagcgacaucgacaucaccuuccugaagaaggacgcccccuacaucgugggcgacgucgugcaggagggcgugcugaccgccgucgugauccccacgaagaaggccgggggcaccaccgagaugcucgcgaaggcccugcgcaaggugccgaccgacaacuacaucacgaccuaccccgggcagggccugaacggguacaccgucgaggaggccaagaccgugcucaagaagugcaaguccgccuucuacauccugcccagcaucaucuccaacgagaagcaggagauccugggcaccgugagcuggaaccuccgggagaugcuggcgcacgccgaggagacgcgcaagcugaugcccgucugcguggagaccaaggccaucguguccaccauccagcggaaguacaagggcaucaagauccaggagggggucguggacuacggcgcccgcuucuacuucuacaccagcaagacgaccguggccucccugaucaacacccucaacgaccugaacgagacccuggucacgaugccgcucggguacgugacccacggccugaaccuggaggaggcggcccgguacaugcgcagccucaaggugcccgccaccgucuccgugagcucccccgacgccgugaccgccuacaacggguaccugacgagcuccagcaagacccccgaggagcacuucaucgagaccaucucccuggcgggcagcuacaaggacuggagcuacuccggccagagcacccagcucgggaucgaguuccugaagcggggcgacaaguccgucuacuacacgagcaacccgaccaccuuccaccuggacggggaggugaucaccuucgacaaccucaagacgcugcugucccuccgcgaggugcggaccaucaaggucuucaccaccguggacaacaucaaccugcacacgcagguggucgacaugagcaugaccuacggccagcaguucggccccaccuaccuggacggggccgacgugaccaagaucaagccccacaacucccacgagggcaagacguucuacgugcucccgaacgacgacacccugcgcgucgaggccuucgaguacuaccacaccaccgaccccagcuuccuggggcgguacauguccgcccucaaccacacgaagaaguggaaguacccccaggugaacggccugaccagcaucaagugggccgacaacaacugcuaccuggcgaccgcccuccugacccugcagcagaucgagcucaaguucaaccccccggcccugcaggacgccuacuaccgcgcgcgggccggggaggccgccaacuucugcgcccugauccucgcguacugcaacaagacggugggcgagcugggcgacguccgcgagaccauguccuaccuguuccagcacgccaaccucgacagcugcaagcgggugcugaacgucgugugcaagaccugcgggcagcagcagaccacccugaagggcguggaggccgucauguacauggggacgcucuccuacgagcaguucaagaagggcgugcagauccccugcaccugcgggaagcaggccaccaaguaccuggugcagcaggagagccccuucgucaugauguccgcccccccggcgcaguacgagcugaagcacggcaccuucacgugcgccagcgaguacaccggcaacuaccagugcgggcacuacaagcacaucaccuccaaggagacccucuacugcaucgacggcgcccugcugacgaagagcagcgaguacaaggggcccaucaccgacguguucuacaaggagaacuccuacaccaccacgaucaagcccgugaccuacaagcucgacggcgucgugugcaccgagaucgaccccaagcuggacaacuacuacaagaaggacaacagcuacuucaccgagcagccgaucgaccuggugcccaaccagcccuaccccaacgccuccuucgacaacuucaaguucgucugcgacaacaucaaguucgccgacgaccucaaccagcugacgggguacaagaagccggcgagccgcgagcugaaggugaccuucuuccccgaccucaacggcgacguggucgccaucgacuacaagcacuacacccccuccuucaagaagggcgccaagcugcugcacaagcccaucguguggcacgugaacaacgccaccaacaaggcgacguacaagccgaacaccuggugcauccggugccucuggagcaccaagcccgucgagaccuccaacagcuucgacgugcugaaguccgaggacgcccaggggauggacaaccuggccugcgaggaccucaagcccgugagcgaggaggucguggagaaccccacgauccagaaggacgugcuggagugcaacgucaagaccaccgagguggugggcgacaucauccugaagccggccaacaacucccucaagaucaccgaggaggucgggcacacggaccugauggccgcguacguggacaacagcucccugaccaucaagaagcccaacgagcucagccgcgugcugggccugaagacccucgccacccacgggcuggccgccgucaacuccgugcccugggacacgaucgccaacuacgcgaagccguuccugaacaagguggucagcaccaccaccaacaucgugacgcgcugccucaaccgggugugcaccaacuacaugcccuacuucuucacccugcugcuccagcugugcaccuucacccgcuccacgaacagccggaucaaggccuccaugcccaccaccaucgccaagaacaccgucaagagcgugggcaaguucugccuggaggccagcuucaacuaccucaagucccccaacuucagcaagcugaucaacaucaucaucugguuccugcuccuguccgugugccugggcagccucaucuacuccacggccgcgcuggggguccugaugagcaaccucggcaugccguccuacugcaccggguaccgcgagggcuaccugaacagcaccaacgugaccaucgccacguacugcaccggcuccauccccugcagcgugugccuguccgggcucgacagccuggacaccuaccccucccuggagaccauccagaucacgaucagcuccuucaagugggaccucaccgccuucggccuggucgccgagugguuccuggccuacauccucuucacccgguucuucuacgugcuggggcuggcggccaucaugcagcucuucuucagcuacuucgccgugcacuucaucuccaacagcuggcugauguggcugaucaucaaccugguccagauggcccccaucuccgcgauggugcgcauguacaucuucuucgccagcuucuacuacguguggaagagcuacguccacgugguggacggcugcaacuccagcaccugcaugaugugcuacaagcggaaccgcgccacgcgggucgagugcaccaccaucgugaacggggucaagcgcuccuucuacguguacgccaacggcggcaagggguucugcaagcuccacaacuggaacugcgugaacugcgacaccuucugcgccggcagcacguucaucuccgacgaggucgcgcgggaccugagccugcaguucaagcgcccgaucaaccccaccgaccaguccagcuacaucguggacuccgugaccgucaagaacgggagcauccaccucuacuucgacaaggccggccagaagaccuacgagcggcacucccugagccacuucgugaaccuggacaaccuccgcgccaacaacacgaaggggucccugcccaucaacgugaucgucuucgacggcaagagcaagugcgaggaguccagcgccaaguccgccagcguguacuacucccagcugaugugccagcccauccuccugcuggaccaggcgcucgugagcgacgucggcgacagcgccgagguggccgugaagauguucgacgccuacgucaacaccuucuccagcaccuucaacgugccgauggagaagcugaagacccugguggccacggcggaggccgagcucgccaagaacgucucccuggacaacgugcugagcaccuucaucuccgccgcgcggcagggguucguggacagcgacgucgagaccaaggacgugguggagugccucaagcugucccaccagagcgacaucgaggucaccggcgacuccugcaacaacuacaugcugacguacaacaagguggagaacaugaccccccgcgaccucggggccugcaucgacugcagcgcccggcacaucaacgcccagguggccaagucccacaacaucgcgcugaucuggaacgucaaggacuucaugagccuguccgagcagcuccgcaagcagauccggagcgccgccaagaagaacaaccugcccuucaagcugaccugcgccaccacgcgccagguggugaacgucgugaccaccaagaucgcccucaagggcggguga

SEQ ID NO: 17754 - RNA, 5841 nt, Artificial Sequence
  SARS-CoV-2__MT847211.1__non-structural protein 3 (NSP3) CDS gc
auggcccccaccaaggugaccuucggcgacgacacggucaucgaggugcagggguacaagagcgugaacaucaccuucgagcuggacgagcgcaucgacaagguccucaacgagaagugcuccgccuacaccguggagcugggcaccgaggugaacgaguucgcgugcgucguggccgacgccgugaucaagacgcugcagccggucagcgagcuccugaccccccuggggaucgaccucgacgagugguccauggccaccuacuaccuguucgacgagagcggcgaguucaagcuggccucccacauguacugcagcuucuacccccccgacgaggacgaggaggagggggacugcgaggaggaggaguucgagccguccacccaguacgaguacggcacggaggacgacuaccagggcaagccccucgaguucggggcgaccagcgccgcccugcagcccgaggaggagcaggaggaggacuggcuggacgacgacucccagcagaccgugggccagcaggacgggagcgaggacaaccagaccacgaccauccagaccaucguggagguccagccccagcucgagauggagcugaccccgguggugcagacgaucgaggucaacuccuucagcggcuaccugaagcucaccgacaacguguacaucaagaacgccgacaucguggaggaggcgaagaaggucaagcccaccgugguggucaacgccgccaacguguaccugaagcacgggggcggcguggccggggcccugaacaaggcgaccaacaacgccaugcaggucgaguccgacgacuacaucgccacgaacggcccccucaagguggggggcagcugcguccuguccggccacaaccuggccaagcacugccuccacgugguggggcccaacgucaacaagggcgaggacauccagcugcugaagagcgccuacgagaacuucaaccagcacgaggugcuccuggcgccgcugcucuccgccgggaucuucggcgccgaccccauccacagccugcgggugugcgucgacaccgugcgcaccaacguguaccuggccgucuucgacaagaaccucuacgacaagcugguguccagcuuccuggagaugaagagcgagaagcagguggagcagaagaucgccgagauccccaaggaggaggucaagcccuucaucaccgaguccaagccgagcguggagcagcggaagcaggacgacaagaagaucaaggcgugcguggaggaggucacgaccacccucgaggagaccaaguuccugacggagaaccugcuccuguacaucgacaucaacgggaaccugcaccccgacuccgccacccucgugagcgacaucgacaucaccuuccugaagaaggacgcccccuacaucgugggcgacgucgugcaggagggcgugcugaccgccgucgugauccccacgaagaaggccgggggcaccaccgagaugcucgcgaaggcccugcgcaaggugccgaccgacaacuacaucacgaccuaccccgggcagggccugaacggguacaccgucgaggaggccaagaccgugcucaagaagugcaaguccgccuucuacauccugcccagcaucaucuccaacgagaagcaggagauccugggcaccgugagcuggaaccuccgggagaugcuggcgcacgccgaggagacgcgcaagcugaugcccgucugcguggagaccaaggccaucguguccaccauccagcggaaguacaagggcaucaagauccaggagggggucguggacuacggcgcccgcuucuacuucuacaccagcaagacgaccguggccucccugaucaacacccucaacgaccugaacgagacccuggucacgaugccgcucggguacgugacccacggccugaaccuggaggaggcggcccgguacaugcgcagccucaaggugcccgccaccgucuccgugagcucccccgacgccgugaccgccuacaacggguaccugacgagcuccagcaagacccccgaggagcacuucaucgagaccaucucccuggcgggcagcuacaaggacuggagcuacuccggccagagcacccagcucgggaucgaguuccugaagcggggcgacaaguccgucuacuacacgagcaacccgaccaccuuccaccuggacggggaggugaucaccuucgacaaccucaagacgcugcugucccuccgcgaggugcggaccaucaaggucuucaccaccguggacaacaucaaccugcacacgcagguggucgacaugagcaugaccuacggccagcaguucggccccaccuaccuggacggggccgacgugaccaagaucaagccccacaacucccacgagggcaagacguucuacgugcucccgaacgacgacacccugcgcgucgaggccuucgaguacuaccacaccaccgaccccagcuuccuggggcgguacauguccgcccucaaccacacgaagaaguggaaguacccccaggugaacggccugaccagcaucaagugggccgacaacaacugcuaccuggcgaccgcccuccugacccugcagcagaucgagcucaaguucaaccccccggcccugcaggacgccuacuaccgcgcgcgggccggggaggccgccaacuucugcgcccugauccucgcguacugcaacaagacggugggcgagcugggcgacguccgcgagaccauguccuaccuguuccagcacgccaaccucgacagcugcaagcgggugcugaacgucgugugcaagaccugcgggcagcagcagaccacccugaagggcguggaggccgucauguacauggggacgcucuccuacgagcaguucaagaagggcgugcagauccccugcaccugcgggaagcaggccaccaaguaccuggugcagcaggagagccccuucgucaugauguccgcccccccggcgcaguacgagcugaagcacggcaccuucacgugcgccagcgaguacaccggcaacuaccagugcgggcacuacaagcacaucaccuccaaggagacccucuacugcaucgacggcgcccugcugacgaagagcagcgaguacaaggggcccaucaccgacguguucuacaaggagaacuccuacaccaccacgaucaagcccgugaccuacaagcucgacggcgucgugugcaccgagaucgaccccaagcuggacaacuacuacaagaaggacaacagcuacuucaccgagcagccgaucgaccuggugcccaaccagcccuaccccaacgccuccuucgacaacuucaaguucgucugcgacaacaucaaguucgccgacgaccucaaccagcugacgggguacaagaagccggcgagccgcgagcugaaggugaccuucuuccccgaccucaacggcgacguggucgccaucgacuacaagcacuacacccccuccuucaagaagggcgccaagcugcugcacaagcccaucguguggcacgugaacaacgccaccaacaaggcgacguacaagccgaacaccuggugcauccggugccucuggagcaccaagcccgucgagaccuccaacagcuucgacgugcugaaguccgaggacgcccaggggauggacaaccuggccugcgaggaccucaagcccgugagcgaggaggucguggagaaccccacgauccagaaggacgugcuggagugcaacgucaagaccaccgagguggugggcgacaucauccugaagccggccaacaacucccucaagaucaccgaggaggucgggcacacggaccugauggccgcguacguggacaacagcucccugaccaucaagaagcccaacgagcucagccgcgugcugggccugaagacccucgccacccacgggcuggccgccgucaacuccgugcccugggacacgaucgccaacuacgcgaagccguuccugaacaagguggucagcaccaccaccaacaucgugacguggugccucaaccgcgugugcaccaacuacaugcccuacuucuucacccugcugcuccagcugugcaccuucacccgguccacgaacagccgcaucaaggccuccaugcccaccaccaucgccaagaacaccgucaagagcgugggcaaguucugccuggaggccagcuucaacuaccucaagucccccaacuucagcaagcugaucaacaucaucaucugguuccugcuccuguccgugugccugggcagccucaucuacuccacggccgcgcuggggguccugaugagcaaccucggcaugccguccuacugcaccggguaccgggagggcuaccugaacagcaccaacgugaccaucgccacguacugcaccggcuccauccccugcagcgugugccuguccgggcucgacagccuggacaccuaccccucccuggagaccauccagaucacgaucagcuccuucaagugggaccucaccgccuucggccuggucgccgagugguuccuggccuacauccucuucacccgcuucuucuacgugcuggggcuggcggccaucaugcagcucuucuucagcuacuucgccgugcacuucaucuccaacagcuggcugauguggcugaucaucaaccugguccagauggcccccaucuccgcgauggugcggauguacaucuucuucgccagcuucuacuacguguggaagagcuacguccacgugguggacggcugcaacuccagcaccugcaugaugugcuacaagcgcaaccgggccacgcgcgucgagugcaccaccaucgugaacgggguccggcgcuccuucuacguguacgccaacggcggcaagggguucugcaagcuccacaacuggaacugcgugaacugcgacaccuucugcgccggcagcacguucaucuccgacgaggucgcgcgggaccugagccugcaguucaagcgcccgaucaaccccaccgaccaguccagcuacaucguggacuccgugaccgucaagaacgggagcauccaccucuacuucgacaaggccggccagaagaccuacgagcggcacucccugagccacuucgugaaccuggacaaccuccgcgccaacaacacgaaggggucccugcccaucaacgugaucgucuucgacggcaagagcaagugcgaggaguccagcgccaaguccgccagcguguacuacucccagcugaugugccagcccauccuccugcuggaccaggcgcucgugagcgacgucggcgacagcgccgagguggccgugaagauguucgacgccuacgucaacaccuucuccagcaccuucaacgugccgauggagaagcugaagacccugguggccacggcggaggccgagcucgccaagaacgucucccuggacaacgugcugagcaccuucaucuccgccgcgcggcagggguucguggacagcgacgucgagaccaaggacgugguggagugccucaagcugucccaccagagcgacaucgaggucaccggcgacuccugcaacaacuacaugcugacguacaacaagguggagaacaugaccccccgcgaccucggggccugcaucgacugcagcgcccggcacaucaacgcccagguggccaagucccacaacaucgcgcugaucuggaacgucaaggacuucaugagccuguccgagcagcuccgcaagcagauccggagcgccgccaagaagaacaaccugcccuucaagcugaccugcgccaccacgcgccagguggugaacgucgugaccaccaagaucgcccucaagggcggguga

SEQ ID NO: 17755 - RNA, 5841 nt, Artificial Sequence
  SARS-CoV-2__MT847217.1__non-structural protein 3 (NSP3) CDS gc
auggcccccaccaaggugaccuucggcgacgacacggucaucgaggugcagggguacaagagcgugaacaucaccuucgagcuggacgagcgcaucgacaagguccucaacgagaagugcuccgccuacaccguggagcugggcaccgaggugaacgaguucgcgugcgucguggccgacgccgugaucaagacgcugcagccggucagcgagcuccugaccccccuggggaucgaccucgacgagugguccauggccaccuacuaccuguucgacgagagcggcgaguucaagcuggccucccacauguacugcagcuucuacccccccgacgaggacgaggaggagggggacugcgaggaggaggaguucgagccguccacccaguacgaguacggcacggaggacgacuaccagggcaagccccucgaguucggggcgaccagcgccgcccugcagcccgaggaggagcaggaggaggacuggcuggacgacgacucccagcagaccgugggccagcaggacgggaucgaggacaaccagaccacgaccauccagaccaucguggagguccagccccagcucgagauggagcugaccccgguggugcagacgaucgaggucaacagcuucuccggcuaccugaagcucaccgacaacguguacaucaagaacgccgacaucguggaggaggcgaagaaggucaagcccaccgugguggucaacgccgccaacguguaccugaagcacgggggcggcguggccggggcccugaacaaggcgaccaacaacgccaugcaggucgagagcgacgacuacaucgccacgaacggcccccucaagguggggggcuccugcguccugagcggccacaaccuggccaagcacugccuccacgugguggggcccaacgucaacaagggcgaggacauccagcugcugaaguccgccuacgagaacuucaaccagcacgaggugcuccuggcgccgcugcucagcgccgggaucuucggcgccgaccccauccacucccugcgggugugcgucgacaccgugcgcaccaacguguaccuggccgucuucgacaagaaccucuacgacaagcuggugagcuccuuccuggagaugaagagcgagaagcagguggagcagaagaucgccgagauccccaaggaggaggucaagcccuucaucaccgagagcaagccguccguggagcagcggaagcaggacgacaagaagaucaaggcgugcguggaggaggucacgaccacccucgaggagaccaaguuccugacggagaaccugcuccuguacaucgacaucaacgggaaccugcaccccgacagcgccacccucguguccgacaucgacaucaccuuccugaagaaggacgcccccuacaucgugggcgacgucgugcaggagggcgugcugaccgccgucgugauccccacgaagaaggccgggggcaccaccgagaugcucgcgaaggcccugcgcaaggugccgaccgacaacuacaucacgaccuaccccgggcagggccugaacggguacaccgucgaggaggccaagaccgugcucaagaagugcaagagcgccuucuacauccugcccuccaucaucagcaacgagaagcaggagauccugggcaccguguccuggaaccuccgggagaugcuggcgcacgccgaggagacgcgcaagcugaugcccgucugcguggagaccaaggccaucgugagcaccauccagcggaaguacaagggcaucaagauccaggagggggucguggacuacggcgcccgcuucuacuucuacaccuccaagacgaccguggccagccugaucaacacccucaacgaccugaacgagacccuggucacgaugccgcucggguacgugacccacggccugaaccuggaggaggcggcccgguacaugcgcucccucaaggugcccgccaccgucagcguguccagccccgacgccgugaccgccuacaacggguaccugacguccagcuccaagacccccgaggagcacuucaucgagaccaucagccuggcgggcuccuacaaggacuggagcuacagcggccaguccacccagcucgggaucgaguuccugaagcggggcgacaagagcgucuacuacacguccaacccgaccaccuuccaccuggacggggaggugaucaccuucgacaaccucaagacgcugcugagccuccgcgaggugcggaccaucaaggucuucaccaccguggacaacaucaaccugcacacgcagguggucgacauguccaugaccuacggccagcaguucggccccaccuaccuggacggggccgacgugaccaagaucaagccccacaacagccacgagggcaagacguucuacgugcucccgaacgacgacacccugcgcgucgaggccuucgaguacuaccacaccaccgaccccuccuuccuggggcgguacaugagcgcccucaaccacacgaagaaguggaaguacccccaggugaacggccugaccuccaucaagugggccgacaacaacugcuaccuggcgaccgcccuccugacccugcagcagaucgagcucaaguucaaccccccggcccugcaggacgccuacuaccgcgcgcgggccggggaggccgccaacuucugcgcccugauccucgcguacugcaacaagacggugggcgagcugggcgacguccgcgagaccaugagcuaccuguuccagcacgccaaccucgacuccugcaagcgggugcugaacgucgugugcaagaccugcgggcagcagcagaccacccugaagggcguggaggccgucauguacauggggacgcucagcuacgagcaguucaagaagggcgugcagauccccugcaccugcgggaagcaggccaccaaguaccuggugcagcaggagucccccuucgucaugaugagcgcccccccggcgcaguacgagcugaagcacggcaccuucacgugcgccuccgaguacaccggcaacuaccagugcgggcacuacaagcacaucaccagcaaggagacccucuacugcaucgacggcgcccugcugacgaaguccagcgaguacaaggggcccaucaccgacguguucuacaaggagaacagcuacaccaccacgaucaagcccgugaccuacaagcucgacggcgucgugugcaccgagaucgaccccaagcuggacaacuacuacaagaaggacaacuccuacuucaccgagcagccgaucgaccuggugcccaaccagcccuaccccaacgccagcuucgacaacuucaaguucgucugcgacaacaucaaguucgccgacgaccucaaccagcugacgggguacaagaagccggcgucccgcgagcugaaggugaccuucuuccccgaccucaacggcgacguggucgccaucgacuacaagcacuacacccccagcuucaagaagggcgccaagcugcugcacaagcccaucguguggcacgugaacaacgccaccaacaaggcgacguacaagccgaacaccuggugcauccggugccucugguccaccaagcccgucgagaccagcaacuccuucgacgugcugaagagcgaggacgcccaggggauggacaaccuggccugcgaggaccucaagcccguguccgaggaggucguggagaaccccacgauccagaaggacgugcuggagugcaacgucaagaccaccgagguggugggcgacaucauccugaagccggccaacaacagccucaagaucaccgaggaggucgggcacacggaccugauggccgcguacguggacaacuccagccugaccaucaagaagcccaacgagcucucccgcgugcugggccugaagacccucgccacccacgggcuggccgccgucaacagcgugcccugggacacgaucgccaacuacgcgaagccguuccugaacaagguggucuccaccaccaccaacaucgugacgcgcugccucaaccgggugugcaccaacuacaugcccuacuucuucacccugcugcuccagcugugcaccuucacccgcagcacgaacucccggaucaaggccagcaugcccaccaccaucgccaagaacaccgucaaguccgugggcaaguucugccuggaggccagcuucaacuaccucaagagccccaacuucuccaagcugaucaacaucaucaucugguuccugcuccugagcgugugccugggcucccucaucuacagcacggccgcgcuggggguccugauguccaaccucggcaugccgagcuacugcaccggguaccgcgagggcuaccugaacuccaccaacgugaccaucgccacguacugcaccggcagcauccccugcuccgugugccugagcgggcucgacucccuggacaccuaccccagccuggagaccauccagaucacgaucuccagcuucaagugggaccucaccgccuucggccuggucgccgagugguuccuggccuacauccucuucacccgguucuucuacgugcuggggcuggcggccaucaugcagcucuucuucuccuacuucgccgugcacuucaucagcaacuccuggcugauguggcugaucaucaaccugguccagauggcccccaucagcgcgauggugcgcauguacaucuucuucgccuccuucuacuacguguggaagagcuacguccacgugguggacggcugcaacagcuccaccugcaugaugugcuacaagcggaaccgcgccacgcgggucgagugcaccaccaucgugaacgggguccgccggagcuucuacguguacgccaacggcggcaagggguucugcaagcuccacaacuggaacugcgugaacugcgacaccuucugcgccggcuccacguucaucagcgacgaggucgcgcgcgaccugucccugcaguucaagcggccgaucaaccccaccgaccagagcuccuacaucguggacagcgugaccgucaagaacggguccauccaccucuacuucgacaaggccggccagaagaccuacgagcgccacagccugucccacuucgugaaccuggacaaccuccgggccaacaacacgaaggggagccugcccaucaacgugaucgucuucgacggcaaguccaagugcgaggagagcuccgccaagagcgccuccguguacuacagccagcugaugugccagcccauccuccugcuggaccaggcgcucguguccgacgucggcgacagcgccgagguggccgugaagauguucgacgccuacgucaacaccuucagcuccaccuucaacgugccgauggagaagcugaagacccugguggccacggcggaggccgagcucgccaagaacgucagccuggacaacgugcuguccaccuucaucagcgccgcgcgccagggguucguggacuccgacgucgagaccaaggacgugguggagugccucaagcugagccaccaguccgacaucgaggucaccggcgacagcugcaacaacuacaugcugacguacaacaagguggagaacaugaccccccgggaccucggggccugcaucgacugcuccgcccgccacaucaacgcccagguggccaagagccacaacaucgcgcugaucuggaacgucaaggacuucaugucccugagcgagcagcuccggaagcagauccgcuccgccgccaagaagaacaaccugcccuucaagcugaccugcgccaccacgcgccagguggugaacgucgugaccaccaagaucgcccucaagggcggguga

SEQ ID NO: 17756 - RNA, 5841 nt, Artificial Sequence
  SARS-CoV-2__MT847218.1__non-structural protein 3 (NSP3) CDS gc
auggcccccaccaaggugaccuucggcgacgacacggucaucgaggugcagggguacaagagcgugaacaucaccuucgagcuggacgagcgcaucgacaagguccucaacgagaagugcuccgccuacaccguggagcugggcaccgaggugaacgaguucgcgugcgucguggccgacgccgugaucaagacgcugcagccggucagcgagcuccugaccccccuggggaucgaccucgacgagugguccauggccaccuacuaccuguucgacgagagcggcgaguucaagcuggccucccacauguacugcagcuucuacccccccgacgaggacgaggaggagggggacugcgaggaggaggaguucgagccguccacccaguacgaguacggcacggaggacgacuaccagggcaagccccucgaguucggggcgaccagcgccgccccccagcccgaggaggagcaggaggaggacuggcuggacgacgacucccagcagaccgugggccagcaggacgggagcgaggacaaccagaccacgaccauccagaccaucguggagguccagccgcagcuggagauggagcucacccccguggugcagacgaucgaggucaacuccuucagcggcuaccugaagcugaccgacaacguguacaucaagaacgccgacaucguggaggaggcgaagaaggucaagcccaccgugguggucaacgccgccaacguguaccucaagcacgggggcggcguggccggggcccugaacaaggcgaccaacaacgccaugcaggucgaguccgacgacuacaucgccacgaacggcccccugaagguggggggcagcugcguccucuccggccacaaccuggccaagcacugccugcacgugguggggccgaacgucaacaagggcgaggacauccagcuccugaagagcgccuacgagaacuucaaccagcacgaggugcugcucgcgccccugcuguccgccgggaucuucggcgccgaccccauccacagccuccgggugugcgucgacaccgugcgcaccaacguguaccuggccgucuucgacaagaaccuguacgacaagcucguguccagcuuccuggagaugaagagcgagaagcagguggagcagaagaucgccgagauccccaaggaggaggucaagccguucaucaccgaguccaagcccagcguggagcagcggaagcaggacgacaagaagaucaaggcgugcguggaggaggucacgaccacccuggaggagaccaaguuccucacggagaaccugcugcucuacaucgacaucaacgggaaccugcaccccgacuccgccacccuggugagcgacaucgacaucaccuuccucaagaaggacgcccccuacaucgugggcgacgucgugcaggagggcgugcugaccgccgucgugaucccgacgaagaaggccgggggcaccaccgagaugcuggcgaaggcccuccgcaaggugcccaccgacaacuacaucacgaccuaccccgggcagggccugaacggguacaccgucgaggaggccaagaccgugcugaagaagugcaaguccgccuucuacauccuccccagcaucaucuccaacgagaagcaggagauccugggcaccgugagcuggaaccugcgggagaugcucgcgcacgccgaggagacgcgcaagcugaugccggucugcguggagaccaaggccaucguguccaccauccagcggaaguacaagggcaucaagauccaggagggggucguggacuacggcgcccgcuucuacuucuacaccagcaagacgaccguggccucccugaucaacacccugaacgaccucaacgagacccuggucacgaugccccugggguacgugacccacggccucaaccuggaggaggcggcccgguacaugcgcagccugaaggugcccgccaccgucuccgugagcucccccgacgccgugaccgccuacaacggguaccucacgagcuccagcaagaccccggaggagcacuucaucgagaccaucucccuggcgggcagcuacaaggacuggagcuacuccggccagagcacccagcuggggaucgaguuccucaagcggggcgacaaguccgucuacuacacgagcaaccccaccaccuuccaccuggacggggaggugaucaccuucgacaaccugaagacgcuccugucccugcgcgaggugcggaccaucaaggucuucaccaccguggacaacaucaaccuccacacgcagguggucgacaugagcaugaccuacggccagcaguucggccccaccuaccuggacggggccgacgugaccaagaucaagccgcacaacucccacgagggcaagacguucuacgugcugcccaacgacgacacccuccgcgucgaggccuucgaguacuaccacaccaccgaccccagcuuccuggggcgguacauguccgcccugaaccacacgaagaaguggaaguacccccaggugaacggccucaccagcaucaagugggccgacaacaacugcuaccuggcgaccgcccugcucacccugcagcagaucgagcugaaguucaacccgcccgcccuccaggacgccuacuaccgcgcgcgggccggggaggccgccaacuucugcgcccugauccuggcguacugcaacaagacggugggcgagcucggcgacguccgcgagaccauguccuaccuguuccagcacgccaaccuggacagcugcaagcgggugcucaacgucgugugcaagaccugcgggcagcagcagaccacccugaagggcguggaggccgucauguacauggggacgcuguccuacgagcaguucaagaagggcgugcagauccccugcaccugcgggaagcaggccaccaaguaccucgugcagcaggagagccccuucgucaugauguccgccccgcccgcgcaguacgagcugaagcacggcaccuucacgugcgccagcgaguacaccggcaacuaccagugcgggcacuacaagcacaucaccuccaaggagacccuguacugcaucgacggcgcccuccugacgaagagcagcgaguacaaggggcccaucaccgacguguucuacaaggagaacuccuacaccaccacgaucaagcccgugaccuacaagcuggacggcgucgugugcaccgagaucgacccgaagcucgacaacuacuacaagaaggacaacagcuacuucaccgagcagcccaucgaccuggugcccaaccagcccuacccgaacgccuccuucgacaacuucaaguucgucugcgacaacaucaaguucgccgacgaccugaaccagcucacgggguacaagaagcccgcgagccgcgagcugaaggugaccuucuuccccgaccugaacggcgacguggucgccaucgacuacaagcacuacacccccuccuucaagaagggcgccaagcuccugcacaagccgaucguguggcacgugaacaacgccaccaacaaggcgacguacaagcccaacaccuggugcauccggugccuguggagcaccaagcccgucgagaccuccaacagcuucgacgugcucaaguccgaggacgcccaggggauggacaaccuggccugcgaggaccugaagcccgugagcgaggaggucguggagaacccgacgauccagaaggacgugcucgagugcaacgucaagaccaccgagguggugggcgacaucauccugaagcccgccaacaacucccugaagaucaccgaggaggucgggcacacggaccucauggccgcguacguggacaacagcucccugaccaucaagaagcccaacgagcugagccgcgugcucggccugaagacccuggccacccacgggcucgccgccgucaacuccgugccgugggacacgaucgccaacuacgcgaagcccuuccugaacaagguggucagcaccaccaccaacaucgugacgcgcugccugaaccgggugugcaccaacuacaugcccuacuucuucacccuccugcugcagcucugcaccuucacccgcuccacgaacagccggaucaaggccuccaugcccaccaccaucgccaagaacaccgucaagagcgugggcaaguucugccuggaggccagcuucaacuaccugaaguccccgaacuucagcaagcucaucaacaucaucaucugguuccugcugcucuccgugugccugggcagccugaucuacuccacggccgcgcucgggguccugaugagcaaccugggcaugcccuccuacugcaccggguaccgcgagggcuaccucaacagcaccaacgugaccaucgccacguacugcaccggcuccauccccugcagcgugugccuguccgggcuggacagccucgacaccuaccccucccuggagaccauccagaucacgaucagcuccuucaagugggaccugaccgccuucggccucgucgccgagugguuccuggccuacauccuguucacccgguucuucuacgugcucgggcuggcggccaucaugcagcuguucuucagcuacuucgccgugcacuucaucuccaacagcuggcucauguggcugaucaucaaccugguccagauggccccgaucuccgcgauggugcgcauguacaucuucuucgccagcuucuacuacguguggaagagcuacguccacgugguggacggcugcaacuccagcaccugcaugaugugcuacaagcggaaccgcgccacgcgggucgagugcaccaccaucgugaacgggguccgccgguccuucuacguguacgccaacggcggcaagggguucugcaagcugcacaacuggaacugcgugaacugcgacaccuucugcgccggcagcacguucaucuccgacgaggucgcgcgcgaccucagccugcaguucaagcggcccaucaaccccaccgaccaguccagcuacaucguggacuccgugaccgucaagaacgggagcauccaccuguacuucgacaaggccggccagaagaccuacgagcgccacucccucagccacuucgugaaccuggacaaccugcgggccaacaacacgaaggggucccuccccaucaacgugaucgucuucgacggcaagagcaagugcgaggaguccagcgccaaguccgccagcguguacuacucccagcugaugugccagccgauccugcuccuggaccaggcgcuggugagcgacgucggcgacagcgccgagguggccgugaagauguucgacgccuacgucaacaccuucuccagcaccuucaacgugcccauggagaagcucaagacccugguggccacggcggaggccgagcuggccaagaacgucucccucgacaacgugcugagcaccuucaucuccgccgcgcgccagggguucguggacagcgacgucgagaccaaggacgugguggagugccugaagcucucccaccagagcgacaucgaggucaccggcgacuccugcaacaacuacaugcugacguacaacaagguggagaacaugaccccccgggaccugggggccugcaucgacugcagcgcccgccacaucaacgcccagguggccaagucccacaacaucgcgcucaucuggaacgucaaggacuucaugagccuguccgagcagcugcggaagcagauccgcagcgccgccaagaagaacaaccuccccuucaagcugaccugcgccaccacgcgccagguggugaacgucgugaccaccaagaucgcccugaagggcggguga

SEQ ID NO: 17757 - RNA, 5841 nt, Artificial Sequence
  SARS-CoV-2__MT847224.1__non-structural protein 3 (NSP3) CDS gc
auggcccccaccaaggugaccuucggcgacgacacggucaucgaggugcagggguacaagagcgugaacaucaccuucgagcuggacgagcgcaucgacaagguccucaacgagaagugcuccgccuacaccguggagcugggcaccgaggugaacgaguucgcgugcgucguggccgacgccgugaucaagacgcugcagccggucagcgagcuccugaccccccuggggaucgaccucgacgagugguccauggccaccuacuaccuguucgacgagagcggcgaguucaagcuggccucccacauguacugcagcuucuacccccccgacgaggacgaggaggagggggacuacgaggaggaggaguucgagccguccacccaguacgaguacggcacggaggacgacuaccagggcaagccccucgaguucggggcgaccagcgccgcccugcagcccgaggaggagcaggaggaggacuggcuggacgacgacucccagcagaccgugggccagcaggacgggagcgaggacaaccagaccacgaccauccagaccaucguggagguccagccccagcucgagauggagcugaccccgguggugcagacgaucgaggucaacuccuucagcggcuaccugaagcucaccgacaacguguacaucaagaacgccgacaucguggaggaggcgaagaaggucaagcccaccgugguggucaacgccgccaacguguaccugaagcacgggggcggcguggccggggcccugaacaaggcgaccaacaacgccaugcaggucgaguccgacgacuacaucgccacgaacggcccccucaagguggggggcagcugcguccuguccggccacaaccuggccaagcacugccuccacgugguggggcccaacgucaacaagggcgaggacauccagcugcugaagagcgccuacgagaacuucaaccagcacgaggugcuccuggcgccgcugcucuccgccgggaucuucggcgccgaccccauccacagccugcgggugugcgucgacaccgugcgcaccaacguguaccuggccgucuucgacaagaaccucuacgacaagcugguguccagcuuccuggagaugaagagcgagaagcagguggagcagaagaucgccgagauccccaaggaggaggucaagcccuucaucaccgaguccaagccgagcguggagcagcggaagcaggacgacaagaagaucaaggcgugcguggaggaggucacgaccacccucgaggagaccaaguuccugacggagaaccugcuccuguacaucgacaucaacgggaaccugcaccccgacuccgccacccucgugagcgacaucgacaucaccuuccugaagaaggacgcccccuacaucgugggcgacgucgugcaggagggcgugcugaccgccgucgugauccccacgaagaaggccgggggcaccaccgagaugcucgcgaaggcccugcgcaaggugccgaccgacaacuacaucacgaccuaccccgggcagggccugaacggguacaccgucgaggaggccaagaccgugcucaagaagugcaaguccgccuucuacauccugcccagcaucaucuccaacgagaagcaggagauccugggcaccgugagcuggaaccuccgggagaugcuggcgcacgccgaggagacgcgcaagcugaugcccgucugcguggagaccaaggccaucguguccaccauccagcggaaguacaagggcaucaagauccaggagggggucguggacuacggcgcccgcuucuacuucuacaccagcaagacgaccguggccucccugaucaacacccucaacgaccugaacgagacccuggucacgaugccgcucggguacgugacccacggccugaaccuggaggaggcggcccgguacaugcgcagccucaaggugcccgccaccgucuccgugagcucccccgacgccgugaccgccuacaacggguaccugacgagcuccagcaagacccccgaggagcacuucaucgagaccaucucccuggcgggcagcuacaaggacuggagcuacuccggccagagcacccagcucgggaucgaguuccugaagcggggcgacaaguccgucuacuacacgagcaacccgaccaccuuccaccuggacggggaggugaucaccuucgacaaccucaagacgcugcugucccuccgcgaggugcggaccaucaaggucuucaccaccguggacaacaucaaccugcacacgcagguggucgacaugagcaugaccuacggccagcaguucggccccaccuaccuggacggggccgacgugaccaagaucaagccccacaacucccacgagggcaagacguucuacgugcucccgaacgacgacacccugcgcgucgaggccuucgaguacuaccacaccaccgaccccagcuuccuggggcgguacauguccgcccucaaccacacgaagaaguggaaguacccccaggugaacggccugaccagcaucaagugggccgacaacaacugcuaccuggcgaccgcccuccugacccugcagcagaucgagcucaaguucaaccccccggcccugcaggacgccuacuaccgcgcgcgggccggggaggccgccaacuucugcgcccugauccucgcguacugcaacaagacggugggcgagcugggcgacguccgcgagaccauguccuaccuguuccagcacgccaaccucgacagcugcaagcgggugcugaacgucgugugcaagaccugcgggcagcagcagaccacccugaagggcguggaggccgucauguacauggggacgcucuccuacgagcaguucaagaagggcgugcagauccccugcaccugcgggaagcaggccaccaaguaccuggugcagcaggagagccccuucgucaugauguccgcccccccggcgcaguacgagcugaagcacggcaccuucacgugcgccagcgaguacaccggcaacuaccagugcgggcacuacaagcacaucaccuccaaggagacccucuacugcaucgacggcgcccugcugacgaagagcagcgaguacaaggggcccaucaccgacguguucuacaaggagaacuccuacaccaccacgaucaagcccgugaccuacaagcucgacggcgucgugugcaccgagaucgaccccaagcuggacaacuacuacaagaaggacaacagcuacuucaccgagcagccgaucgaccuggugcccaaccagcccuaccccaacgccuccuucgacaacuucaaguucgucugcgacaacaucaaguucgccgacgaccucaaccagcugacgggguacaagaagccggcgagccgcgagcugaaggugaccuucuuccccgaccucaacggcgacguggucgccaucgacuacaagcacuacacccccuccuucaagaagggcgccaagcugcugcacaagcccaucguguggcacgugaacaacgccaccaacaaggcgacguacaagccgaacaccuggugcauccggugccucuggagcaccaagcccgucgagaccuccaacagcuucgacgugcugaaguccgaggacgcccaggggauggacaaccuggccugcgaggaccucaagcccgugagcgaggaggucguggagaaccccacgauccagaaggacgugcuggagugcaacgucaagaccaccgagguggugggcgacaucauccugaagccggccaacaacucccucaagaucaccgaggaggucgggcacaucgaccugauggccgcguacguggacaacagcucccugacgaucaagaagcccaacgagcucagccgcgugcugggccugaagacccucgccacccacgggcuggccgccgucaacuccgugcccugggacaccaucgccaacuacgcgaagccguuccugaacaagguggucagcacgaccaccaacaucgugacccgcugccucaaccgggugugcacgaacuacaugcccuacuucuucacccugcugcuccagcugugcaccuucacccgcuccaccaacagccggaucaaggccuccaugcccacgaccaucgccaagaacaccgucaagagcgugggcaaguucugccuggaggccagcuucaacuaccucaagucccccaacuucagcaagcugaucaacaucaucaucugguuccugcuccuguccgugugccugggcagccucaucuacuccaccgccgcgcuggggguccugaugagcaaccucggcaugccguccuacugcacgggguaccgcgagggcuaccugaacagcaccaacgugaccaucgccaccuacugcacgggcuccauccccugcagcgugugccuguccgggcucgacagccuggacaccuaccccucccuggagaccauccagaucaccaucagcuccuucaagugggaccucacggccuucggccuggucgccgagugguuccuggccuacauccucuucacccgguucuucuacgugcuggggcuggcggccaucaugcagcucuucuucagcuacuucgccgugcacuucaucuccaacagcuggcugauguggcugaucaucaaccugguccagauggcccccaucuccgcgauggugcgcauguacaucuucuucgccagcuucuacuacguguggaagagcuacguccacgugguggacggcugcaacuccagcaccugcaugaugugcuacaagcggaaccgcgccacccgggucgagugcacgaccaucgugaacgggguccgccgguccuucuacguguacgccaacggcggcaagggguucugcaagcuccacaacuggaacugcgugaacugcgacaccuucugcgccggcagcaccuucaucuccgacgaggucgcgcgcgaccugagccugcaguucaagcggccgaucaaccccacggaccaguccagcuacaucguggacuccgugaccgucaagaacgggagcauccaccucuacuucgacaaggccggccagaagaccuacgagcgccacucccugagccacuucgugaaccuggacaaccuccgggccaacaacaccaaggggucccugcccaucaacgugaucgucuucgacggcaagagcaagugcgaggaguccagcgccaaguccgccagcguguacuacucccagcugaugugccagcccauccuccugcuggaccaggcgcucgugagcgacgucggcgacagcgccgagguggccgugaagauguucgacgccuacgucaacacguucuccagcaccuucaacgugccgauggagaagcugaagacccugguggccaccgcggaggccgagcucgccaagaacgucucccuggacaacgugcugagcacguucaucuccgccgcgcgccagggguucguggacagcgacgucgagaccaaggacgugguggagugccucaagcugucccaccagagcgacaucgaggucaccggcgacuccugcaacaacuacaugcugaccuacaacaagguggagaacaugacgccccgggaccucggggccugcaucgacugcagcgcccgccacaucaacgcccagguggccaagucccacaacaucgcgcugaucuggaacgucaaggacuucaugagccuguccgagcagcuccggaagcagauccgcagcgccgccaagaagaacaaccugcccuucaagcugaccugcgccaccacccgccagguggugaacgucgugacgaccaagaucgcccucaagggcggguga

SEQ ID NO: 17758 - RNA, 5841 nt, Artificial Sequence
  SARS-CoV-2__MT847228.1__non-structural protein 3 (NSP3) CDS gc
auggcccccaccaaggugaccuucggcgacgacacggucaucgaggugcagggguacaagagcgugaacaucaccuucgagcuggacgagcgcaucgacaagguccucaacgagaagugcuccgccuacaccguggagcugggcaccgaggugaacgaguucgcgugcgucguggccgacgccgugaucaagacgcugcagccggucagcgagcuccugaccccccuggggaucgaccucgacgagugguccauggccaccuacuaccuguucgacgagagcggcgaguucaagcuggccucccacauguacugcagcuucuacccccccgacgaggacgaggaggagggggacugcgaggaggaggaguucgagccguccacccaguacgaguacggcacggaggacgacuaccagggcaagccccucgaguucggggcgaccagcgccgcccugcagcccgaggaggagcaggaggaggacuggcuggacgacgacucccagcagaccgugggccagcaggacgggagcgaggacaaccagaccacgaccauccagaccaucguggagguccagccccagcucgagauggagcugaccccgguggugcagacgaucgaggucaacuccuucagcggcuaccugaagcucaccgacaacguguacaucaagaacgccgacaucguggaggaggcgaagaaggucaagcccaccgugguggucaacgccgccaacguguaccugaagcacgggggcggcguggccggggcccugaacaaggcgaccaacaacgccaugcaggucgaguccgacgacuacaucgccacgaacggcccccucaagguggggggcagcugcguccuguccggccacaaccuggccaagcacugccuccacgugguggggcccaacgucaacaagggcgaggacauccagcugcugaagagcgccuacgagaacuucaaccagcacgaggugcuccuggcgccgcugcucuccgccgggaucuucggcgccgaccccauccacagccugcgggugugcgucgacaccgugcgcaccaacguguaccuggccgucuucgacaagaaccucuacgacaagcugguguccagcuuccuggagaugaagagcgagaagcagguggagcagaagaucgccgagauccccaaggaggaggucaagcccuucaucaccgaguccaagccgagcguggagcagcggaagcaggacgacaagaagaucaaggcgugcguggaggaggucacgaccacccucgaggagaccaaguuccugacggagaaccugcuccuguacaucgacaucaacgggaaccugcaccccgacuccgccacccucgugagcgacaucgacaucaccuuccugaagaaggacgcccccuacaucgugggcgacgucgugcaggagggcgugcugaccgccgucgugauccccacgaagaaggccgggggcaccaccgagaugcucgcgaaggcccugcgcaaggugccgaccgacaacuacaucacgaccuaccccgggcagggccugaacggguacaccgucgaggaggccaagaccgugcucaagaagugcaaguccgccuucuacauccugcccagcaucaucuccaacgagaagcaggagauccugggcaccgugagcuggaaccuccgggagaugcuggcgcacgccgaggagacgcgcaagcugaugcccgucugcguggagaccaaggccaucguguccaccauccagcggaaguacaagggcaucaagauccaggagggggucguggacuacggcgcccgcuucuacuucuacaccagcaagacgaccguggccucccugaucaacacccucaacgaccugaacgagacccuggucacgaugccgcucggguacgugacccacggccugaaccuggaggaggcggcccgguacaugcgcagccucaaggugcccgccaccgucuccgugagcucccccgacgccgugaccgccuacaacggguaccugacgagcuccagcaagacccccgaggagcacuucaucgagaccaucucccuggcgggcagcuacaaggacuggagcuacuccggccagagcacccagcucgggaucgaguuccugaagcggggcgacaaguccgucuacuacacgagcaacccgaccaccuuccaccuggacggggaggugaucaccuucgacaaccucaagacgcugcugucccuccgcgaggugcggaccaucaaggucuucaccaccguggacaacaucaaccugcacacgcagguggucgacaugagcaugaccuacggccagcaguucggccccaccuaccuggacggggccgacgugaccaagaucaagccccacaacucccacgagggcaagacguucuacgugcucccgaacgacgacacccugcgcgucgaggccuucgaguacuaccacaccaccgaccccagcuuccuggggcgguacauguccgcccucaaccacacgaagaaguggaaguacccccaggugaacggccugaccagcaucaagugggccgacaacaacugcuaccuggcgaccgcccuccugacccugcagcagaucgagcucaaguucaaccccccggcccugcaggacgccuacuaccgcgcgcgggccggggaggccgccaacuucugcgcccugauccucgcguacugcaacaagacggugggcgagcugggcgacguccgcgagaccauguccuaccuguuccagcacgccaaccucgacagcugcaagcgggugcugaacgucgugugcaagaccugcgggcagcagcagaccauccugaagggcguggaggccgucauguacauggggacccucuccuacgagcaguucaagaagggcgugcagauccccugcacgugcgggaagcaggccaccaaguaccuggugcagcaggagagccccuucgucaugauguccgcccccccggcgcaguacgagcugaagcacggcaccuucaccugcgccagcgaguacacgggcaacuaccagugcgggcacuacaagcacaucaccuccaaggagacccucuacugcaucgacggcgcccugcugaccaagagcagcgaguacaaggggcccaucacggacguguucuacaaggagaacuccuacaccaccaccaucaagcccgugacguacaagcucgacggcgucgugugcaccgagaucgaccccaagcuggacaacuacuacaagaaggacaacagcuacuucaccgagcagccgaucgaccuggugcccaaccagcccuaccccaacgccuccuucgacaacuucaaguucgucugcgacaacaucaaguucgccgacgaccucaaccagcugaccggguacaagaagccggcgagccgcgagcugaaggugacguucuuccccgaccucaacggcgacguggucgccaucgacuacaagcacuacacccccuccuucaagaagggcgccaagcugcugcacaagcccaucguguggcacgugaacaacgccaccaacaaggcgaccuacaagccgaacacguggugcauccggugccucuggagcaccaagcccgucgagaccuccaacagcuucgacgugcugaaguccgaggacgcccaggggauggacaaccuggccugcgaggaccucaagcccgugagcgaggaggucguggagaaccccaccauccagaaggacgugcuggagugcaacgucaagacgaccgagguggugggcgacaucauccugaagccggccaacaacucccucaagaucaccgaggaggucgggcacaccgaccugauggccgcguacguggacaacagcucccugacgaucaagaagcccaacgagcucagccgcgugcugggccugaagacccucgccacccacgggcuggccgccgucaacuccgugcccugggacaccaucgccaacuacgcgaagccguuccugaacaagguggucagcacgaccaccaacaucgugacccgcugccucaaccgggugugcacgaacuacaugcccuacuucuucacccugcugcuccagcugugcaccuucacccgcuccaccaacagccggaucaaggccuccaugcccacgaccaucgccaagaacaccgucaagagcgugggcaaguucugccuggaggccagcuucaacuaccucaagucccccaacuucagcaagcugaucaacaucaucaucugguuccugcuccuguccgugugccugggcagccucaucuacuccaccgccgcgcuggggguccugaugagcaaccucggcaugccguccuacugcacgggguaccgcgagggcuaccugaacagcaccaacgugaccaucgccaccuacugcacgggcuccauccccugcagcgugugccuguccgggcucgacagccuggacaccuaccccucccuggagaccauccagaucaccaucagcuccuucaagugggaccucacggccuucggccuggucgccgagugguuccuggccuacauccucuucacccgguucuucuacgugcuggggcuggcggccaucaugcagcucuucuucagcuacuucgccgugcacuucaucuccaacagcuggcugauguggcugaucaucaaccugguccagauggcccccaucuccgcgauggugcgcauguacaucuucuucgccagcuucuacuacguguggaagagcuacguccacgugguggacggcugcaacuccagcaccugcaugaugugcuacaagcggaaccgcgccacccgggucgagugcacgaccaucgugaacgggguccgccgguccuucuacguguacgccaacggcggcaagggguucugcaagcuccacaacuggaacugcgugaacugcgacaccuucugcgccggcagcaccuucaucuccgacgaggucgcgcgcgaccugagccugcaguucaagcggccgaucaaccccacggaccaguccagcuacaucguggacuccgugaccgucaagaacgggagcauccaccucuacuucgacaaggccggccagaagaccuacgagcgccacucccugagccacuucgugaaccuggacaaccuccgggccaacaacaccaaggggucccugcccaucaacgugaucgucuucgacggcaagagcaagugcgaggaguccagcgccaaguccgccagcguguacuacucccagcugaugugccagcccauccuccugcuggaccaggcgcucgugagcgacgucggcgacagcgccgagguggccgugaagauguucgacgccuacgucaacacguucuccagcaccuucaacgugccgauggagaagcugaagacccugguggccaccgcggaggccgagcucgccaagaacgucucccuggacaacgugcugagcacguucaucuccgccgcgcgccagggguucguggacagcgacgucgagaccaaggacgugguggagugccucaagcugucccaccagagcgacaucgaggucaccggcgacuccugcaacaacuacaugcugaccuacaacaagguggagaacaugacgccccgggaccucggggccugcaucgacugcagcgcccgccacaucaacgcccagguggccaagucccacaacaucgcgcugaucuggaacgucaaggacuucaugagccuguccgagcagcuccggaagcagauccgcagcgccgccaagaagaacaaccugcccuucaagcugaccugcgccaccacccgccagguggugaacgucgugacgaccaagaucgcccucaagggcggguga

SEQ ID NO: 17759 - RNA, 5841 nt, Artificial Sequence
  SARS-CoV-2__MT843297.1__non-structural protein 3 (NSP3) CDS gc
auggcccccaccaaggugaccuucggcgacgacacggucaucgaggugcagggguacaagagcgugaacaucaccuucgagcuggacgagcgcaucgacaagguccucaacgagaagugcuccgccuacaccguggagcugggcaccgaggugaacgaguucgcgugcgucguggccgacgccgugaucaagacgcugcagccggucagcgagcuccugaccccccuggggaucgaccucgacgagugguccauggccaccuacuaccuguucgacgagagcggcgaguucaagcuggccucccacauguacugcagcuucuacccccccgacgaggacgaggaggagggggacugcgaggaggaggaguucgagccguccacccaguacgaguacggcacggaggacgacuaccagggcaagcaccucgaguucggggcgaccagcgccgcccugcagcccgaggaggagcaggaggaggacuggcuggacgacgacucccagcagaccgugggccagcaggacgggagcgaggacaaccagaccacgaccauccagaccaucguggagguccagccccagcucgagauggagcugacccccguggugcagacgaucgaggucaacuccuucagcggcuaccugaagcucaccgacaacguguacaucaagaacgccgacaucguggaggaggcgaagaaggucaagccgaccgugguggucaacgccgccaacguguaccugaagcacgggggcggcguggccggggcccugaacaaggcgaccaacaacgccaugcaggucgaguccgacgacuacaucgccacgaacggcccccucaagguggggggcagcugcguccuguccggccacaaccuggccaagcacugccuccacgugguggggcccaacgucaacaagggcgaggacauccagcugcugaagagcgccuacgagaacuucaaccagcacgaggugcuccuggcgccccugcucuccgccgggaucuucggcgccgacccgauccacagccugcgggugugcgucgacaccgugcgcaccaacguguaccuggccgucuucgacaagaaccucuacgacaagcugguguccagcuuccuggagaugaagagcgagaagcagguggagcagaagaucgccgagauccccaaggaggaggucaagcccuucaucaccgaguccaagcccagcguggagcagcggaagcaggacgacaagaagaucaaggcgugcguggaggaggucacgaccacccucgaggagaccaaguuccugacggagaaccugcuccuguacaucgacaucaacgggaaccugcacccggacuccgccacccucgugagcgacaucgacaucaccuuccugaagaaggacgcccccuacaucgugggcgacgucgugcaggagggcgugcugaccgccgucgugauccccacgaagaaggccgggggcaccaccgagaugcucgcgaaggcccugcgcaaggugcccaccgacaacuacaucacgaccuacccggggcagggccugaacggguacaccgucgaggaggccaagaccgugcucaagaagugcaaguccgccuucuacauccugcccagcaucaucuccaacgagaagcaggagauccugggcaccgugagcuggaaccuccgggagaugcuggcgcacgccgaggagacgcgcaagcugaugcccgucugcguggagaccaaggccaucguguccaccauccagcggaaguacaagggcaucaagauccaggagggggucguggacuacggcgcccgcuucuacuucuacaccagcaagacgaccguggccucccugaucaacacccucaacgaccugaacgagacccuggucacgaugccccucggguacgugacccacggccugaaccuggaggaggcggcccgguacaugcgcagccucaaggugccggccaccgucuccgugagcucccccgacgccgugaccgccuacaacggguaccugacgagcuccagcaagacccccgaggagcacuucaucgagaccaucucccuggcgggcagcuacaaggacuggagcuacuccggccagagcacccagcucgggaucgaguuccugaagcggggcgacaaguccgucuacuacacgagcaaccccaccaccuuccaccuggacggggaggugaucaccuucgacaaccucaagacgcugcugucccuccgcgaggugcggaccaucaaggucuucaccaccguggacaacaucaaccugcacacgcagguggucgacaugagcaugaccuacggccagcaguucggcccgaccuaccuggacggggccgacgugaccaagaucaagccccacaacucccacgagggcaagacguucuacgugcuccccaacgacgacacccugcgcgucgaggccuucgaguacuaccacaccaccgacccgagcuuccuggggcgguacauguccgcccucaaccacacgaagaaguggaaguacccccaggugaacggccugaccagcaucaagugggccgacaacaacugcuaccuggcgaccgcccuccugacccugcagcagaucgagcucaaguucaacccccccgcccugcaggacgccuacuaccgcgcgcgggccggggaggccgccaacuucugcgcccugauccucgcguacugcaacaagacggugggcgagcugggcgacguccgcgagaccauguccuaccuguuccagcacgccaaccucgacagcugcaagcgggugcugaacgucgugugcaagaccugcgggcagcagcagaccacccugaagggcguggaggccgucauguacauggggacgcucuccuacgagcaguucaagaagggcgugcagaucccgugcaccugcgggaagcaggccaccaaguaccuggugcagcaggagagccccuucgucaugauguccgccccccccgcgcaguacgagcugaagcacggcaccuucacgugcgccagcgaguacaccggcaacuaccagugcgggcacuacaagcacaucaccuccaaggagacccucuacugcaucgacggcgcccugcugacgaagagcagcgaguacaaggggccgaucaccgacguguucuacaaggagaacuccuacaccaccacgaucaagcccgugaccuacaagcucgacggcgucgugugcaccgagaucgaccccaagcuggacaacuacuacaagaaggacaacagcuacuucaccgagcagcccaucgaccuggugccgaaccagcccuaccccaacgccuccuucgacaacuucaaguucgucugcgacaacaucaaguucgccgacgaccucaaccagcugacgggguacaagaagcccgcgagccgcgagcugaaggugaccuucuucccggaccucaacggcgacguggucgccaucgacuacaagcacuacacccccuccuucaagaagggcgccaagcugcugcacaagcccaucguguggcacgugaacaacgccaccaacaaggcgacguacaagcccaacaccuggugcauccggugccucuggagcaccaagccggucgagaccuccaacagcuucgacgugcugaaguccgaggacgcccaggggauggacaaccuggccugcgaggaccucaagcccgugagcgaggaggucguggagaaccccacgauccagaaggacgugcuggagugcaacgucaagaccaccgagguggugggcgacaucauccugaagcccgccaacaacucccucaagaucaccgaggaggucgggcacacggaccugauggccgcguacguggacaacagcucccugaccaucaagaagccgaacgagcucagccgcgugcugggccugaagacccucgccacccacgggcuggccgccgucaacuccgugcccugggacacgaucgccaacuacgcgaagcccuuccugaacaagguggucagcaccaccaccaacaucgugacgcgcugccucaaccgggugugcaccaacuacaugccguacuucuucacccugcugcuccagcugugcaccuucacccgcuccacgaacagccggaucaaggccuccaugcccaccaccaucgccaagaacaccgucaagagcgugggcaaguucugccuggaggccagcuucaacuaccucaagucccccaacuucagcaagcugaucaacaucaucaucugguuccugcuccuguccgugugccugggcagccucaucuacuccacggccgcgcuggggguccugaugagcaaccucggcaugcccuccuacugcaccggguaccgcgagggcuaccugaacagcaccaacgugaccaucgccacguacugcaccggcuccaucccgugcagcgugugccuguccgggcucgacagccuggacaccuaccccucccuggagaccauccagaucacgaucagcuccuucaagugggaccucaccgccuucggccuggucgccgagugguuccuggccuacauccucuucacccgguucuucuacgugcuggggcuggcggccaucaugcagcucuucuucagcuacuucgccgugcacuucaucuccaacagcuggcugauguggcugaucaucaaccugguccagauggcccccaucuccgcgauggugcgcauguacaucuucuucgccagcuucuacuacguguggaagagcuacguccacgugguggacggcugcaacuccagcaccugcaugaugugcuacaagcggaaccgcgccacgcgggucgagugcaccaccaucgugaacgggguccgccgguccuucuacguguacgccaacggcggcaagggguucugcaagcuccacaacuggaacugcgugaacugcgacaccuucugcgccggcagcacguucaucuccgacgaggucgcgcgcgaccugagccugcaguucaagcggcccaucaacccgaccgaccaguccagcuacaucguggacuccgugaccgucaagaacgggagcauccaccucuacuucgacaaggccggccagaagaccuacgagcgccacucccugagccacuucgugaaccuggacaaccuccgggccaacaacacgaaggggucccugcccaucaacgugaucgucuucgacggcaagagcaagugcgaggaguccagcgccaaguccgccagcguguacuacucccagcugaugugccagcccauccuccugcuggaccaggcgcucgugagcgacgucggcgacagcgccgagguggccgugaagauguucgacgccuacgucaacaccuucuccagcaccuucaacgugcccauggagaagcugaagacccugguggccacggcggaggccgagcucgccaagaacgucucccuggacaacgugcugagcaccuucaucuccgccgcgcgccagggguucguggacagcgacgucgagaccaaggacgugguggagugccucaagcugucccaccagagcgacaucgaggucaccggcgacuccugcaacaacuacaugcugacguacaacaagguggagaacaugaccccgcgggaccucggggccugcaucgacugcagcgcccgccacaucaacgcccagguggccaagucccacaacaucgcgcugaucuggaacgucaaggacuucaugagccuguccgagcagcuccggaagcagauccgcagcgccgccaagaagaacaaccugcccuucaagcugaccugcgccaccacgcgccagguggugaacgucgugaccaccaagaucgcccucaagggcggguga

SEQ ID NO: 17760 - RNA, 5841 nt, Artificial Sequence
  SARS-CoV-2__MT843319.1__non-structural protein 3 (NSP3) CDS gc
auggcccccaccaaggugaccuucggcgacgacacggucaucgaggugcagggguacaagagcgugaacaucaccuucgagcuggacgagcgcaucgacaagguccucaacgagaagugcuccgccuacaccguggagcugggcaccgaggugaacgaguucgcgugcgucguggccgacgccgugaucaagacgcugcagccggucagcgagcuccugaccccccuggggaucgaccucgacgagugguccauggccaccuacuaccuguucgacgagagcggcgaguucaagcuggccucccacauguacugcagcuucuacccccccgacgaggacgaggaggagggggacugcgaggaggaggaguucgagccguccacccaguacgaguacggcacggaggacgacuaccagggcaagccccucgaguucggggcgaccagcgccgcccugcagcccgaggaggagcaggaggaggacuggcuggacgacgacucccagcagaccgugggccagcaggacgggagcgaggacaaccagaccacgaccauccagaccaucguggagguccagccccagcucgagauggagcugaccccgguggugcagacgaucgaggucaacuccuucagcggcuaccugaagcucaccgacaacguguacaucaagaacgccgacaucguggaggaggcgaagaaggucaagcccaccgugguggucaacgccgccaacguguaccugaagcacgggggcggcguggccggggcccugaacaaggcgaccaacaacgccaugcaggucgaguccgacgacuacaucgccacgaacggcccccucaagguggggggcagcugcguccuguccggccacaaccuggccaagcacugccuccacgugguggggcccaacgucaacaagggcgaggacauccagcugcugaagagcgccuacgagaacuucaaccagcacgaggugcuccuggcgccgcugcucuccgccgggaucuucggcgccgaccccauccacagccugcgggugugcgucgacaccgugcgcaccaacguguaccuggccgucuucgacaagaaccucuacgacaagcugguguccagcuuccuggagaugaagagcgagaagcagguggagcagaagaucgccgagauccccaaggaggaggucaagcccuucaucaccgaguccaagccgagcguggagcagcggaagcaggacgacaagaagaucaaggcgugcguggaggaggucacgaccacccucgaggagaccaaguuccugacggagaaccugcuccuguacaucgacaucaacgggaaccugcaccccgacuccgccacccucgugagcgacaucgacaucaccuuccugaagaaggacgcccccuacaucgugggcgacgucgugcaggagggcgugcugaccgccgucgugauccccacgaagaaggccgggggcaccaccgagaugcucgcgaaggcccugcgcaaggugccgaccgacaacuacaucacgaccuaccccgggcagggccugaacggguacaccgucgaggaggccaagaccgugcucaagaagugcaaguccgccuucuacauccugcccagcaucaucuccaacgagaagcaggagauccugggcaccgugagcuggaaccuccgggagaugcuggcgcacgccgaggagacgcgcaagcugaugcccgucugcguggagaccaaggccaucguguccaccauccagcggaaguacaagggcaucaagauccaggagggggucguggacuacggcgcccgcuucuacuucuacaccagcaagacgaccguggccucccugaucaacacccucaacgaccugaacgagacccuggucacgaugccgcucggguacgugacccacggccugaaccuggaggaggcggcccgguacaugcgcagccucaaggugcccgccaccgucuccgugagcucccccgacgccgugaccgccuacaacggguaccugacgagcuccagcaagacccccgaggagcacuucaucgagaccaucucccuggcgggcagcuacaaggacuggagcuacuccggccagagcacccagcucgggaucgaguuccugaagcggggcgacaaguccgucuacuacacgagcaacccgaccaccuuccaccuggacggggaggugaucaccuucgacaaccucaagacgcugcugucccuccgcgaggugcggaccaucaaggucuucaccaccguggacaacaucaaccugcacacgcagguggucgacaugagcaugaccuacggccagcaguucggccccaccuaccuggacggggccgacgugaccaagaucaagccccacaacucccacgagggcaagacguucuacgugcucccgaacgacgacacccugcgcgucgaggccuucgaguacuaccacaccaccgaccccagcuuccuggggcgguacauguccgcccucaaccacacgaagaaguggaaguacccccaggugaacggccugaccagcaucaagugggccgacaacaacugcuaccuggcgaccgcccuccugacccugcagcagaucgagcucaaguucaaccccccggcccugcaggacgccuacuaccgcgcgcgggccggggaggccgccaacuucugcgcccugauccucgcguacugcaacaagacggugggcgagcugggcgacguccgcgagaccauguccuaccuguuccagcacgccaaccucgacagcugcaagcgggugcugaacgucgugugcaagaccugcgggcagcagcagaccacccugaagggcguggaggccgucauguacauggggacgcucuccuacgagcaguucaagaagggcgugcagauccccugcaccugcgggaagcaggccaccaaguaccuggugcagcaggagagccccuucgucaugauguccgcccccccggcgcaguacgagcugaagcacggcaccuucacgugcgccagcgaguacaccggcaacuaccagugcgggcacuacaagcacaucaccuccaaggagacccucuacugcaucgacggcgcccugcugacgaagagcagcgaguacaaggggcccaucaccgacguguucuacaaggagaacuccuacaccaccacgaucaagcccgugaccuacaagcucgacggcgucgugugcaccgagaucgaccccaagcuggacaacuacuacaagaaggacaacagcuacuucaccgagcagccgaucgaccuggugcccaaccagcccuaccccaacgccuccuucgacaacuucaaguucgucugcgacaacaucaaguucgccgacgaccucaaccagcugacgggguacaagaagccggcgagccgcgagcugaaggugaccuucuuccccgaccucaacggcgacguggucgccaucgacuacaagcacuacacccccuccuucaagaagggcgccaagcugcugcacaagcccaucguguggcacgugaacaacgccaccaacaaggcgacguacaagccgaacaccuggugcauccggugccucuggagcaccaagcccgucgagaccuccaacagcuucgacgugcugaaguccgaggacgcccaggggauggacaaccuggccugcgaggaccucaagcccgugagcgaggaggucguggagaaccccacgauccagaaggacgugcuggagugcaacgucaagaccaccgagguggugggcgacaucauccugaagccggccaacaacucccucaagaucaccgaggaggucgggcacacggaccugauggccgcguacguggacaacagcucccugaccaucaagaagcccaacgagcucagccgcgugcugggccugaagacccucgccacccacgggcuggccgccgucaacuccgugcccugggacacgaucgccaacuacgcgaagccguuccugaacaagguggucagcaccaccaccaacaucgugacgcgcugccucaaccgggugugcaccaacuacaugcccuacuucuucacccugcugcuccagcugugcaccuucacccgcuccacgaacagccggaucaaggccuccaugcccaccaccaucgccaagaacaccgucaagagcgugggcaaguucugccuggaggccagcuucaacuaccucaagucccccaacuucagcaagcugaucaacaucaucaucugguuccugcuccuguccgugugccugggcagccucaucuacuccacggccgcgcuggggguccugaugagcaaccucggcaugccguccuacugcaccggguaccgcgagggcuaccugaacagcaccaacgugaccaucgccacguacugcaccggcuccauccccugcagcgugugccuguccgggcucgacagccuggacaccuaccccucccuggagaccauccagaucacgaucagcuccuucaagugggaccucaccgccuucggccuggucgccgagugguuccuggccuacauccucuucacccgguucuucuacgugcuggggcuggcggccaucaugcagcucuucuucagcuacuucgccgugcacuucaucuccaacagcuggcugauguggcugaucaucaaccugguccagauggcccccaucuccgcgauggugcgcauguacaucuucuucgccagcuucuacuacguguggaagagcuacguccacgugguggacggcugcaacuccagcaccugcaugaugugcuacaagcggaaccgcgccacgcgggucgagugcaccaccaucgugaacgggguccgccgguccuucuacguguacgccaacggcggcaagggguucugcaagcuccacaacuggaacugcgugaacugcgacaccuucugcgccggcagcacguucaucuccgacgaggucgcgcgcgaccugagccugcaguucaagcggccgaucaaccccaccgaccaguccagcuacaucguggacuccgugaccgucaagaacgggagcauccaccucuacuucgacaaggccggccagaagaccuacgagcgccacucccugagccacuucgugaaccuggacaaccuccgggccaacaacacgaaggggucccugcccaucaacgugaucgucuucgacggcaagagcaagugcgaggaguccagcgccaaguccgccagcguguacuacucccagcugaugugccagcccauccuccugcuggaccaggcgcucgugagcgacgucggcgacagcgccgagguggccgugaagauguucgacgccuacgucaacaccuucuccagcaccuucaacgugccgauggagaagcugaagacccugguggccacggcggaggccgagcucgccaagaacgucucccuggacaacgugcugagcaccuucaucuccgccgcgcgccagggguucguggacagcgacgucgagaccaaggacgugguggagugccucaagcugucccaccagagcgacaucgaggucaccggcgacuccugcaacaacuacaugcugacguacaacaagguggagaacaugaccccccgggaccucggggccugcaucgacugcagcgcccgccacaucaacgcccagguggccaagucccacaacaucgcgcugaucuggaacgucaaggacuucaugagccuguccgagcagcuccggaagaagauccgcagcgccgccaagaagaacaaccugcccuucaagcugaccugcgccaccacgcgccagguggugaacgucgugaccaccaagaucgcccucaagggcggguga

SEQ ID NO: 17761 - RNA, 5841 nt, Artificial Sequence
  SARS-CoV-2__MT843738.1__non-structural protein 3 (NSP3) CDS gc
auggcccccaccaaggugaccuucggcgacgacacggucaucgaggugcagggguacaagagcgugaacaucaccuucgagcuggacgagcgcaucgacaagguccucaacgagaagugcuccgccuacaccguggagcugggcaccgaggugaacgaguucgcgugcgucguggccgacgccgugaucaagacgcugcagccggucuucgagcuccugaccccccuggggaucgaccucgacgaguggagcauggccaccuacuaccuguucgacgaguccggcgaguucaagcuggccagccacauguacugcuccuucuacccccccgacgaggacgaggaggagggggacugcgaggaggaggaguucgagccgagcacccaguacgaguacggcacggaggacgacuaccagggcaagccccucgaguucggggcgaccuccgccgcccugcagcccgaggaggagcaggaggaggacuggcuggacgacgacagccagcagaccgugggccagcaggacggguccgaggacaaccagaccacgaccauccagaccaucguggagguccagccccagcucgagauggagcugaccccgguggugcagacgaucgaggucaacagcuucuccggcuaccugaagcucaccgacaacguguacaucaagaacgccgacaucguggaggaggcgaagaaggucaagcccaccgugguggucaacgccgccaacguguaccugaagcacgggggcggcguggccggggcccugaacaaggcgaccaacaacgccaugcaggucgagagcgacgacuacaucgccacgaacggcccccucaagguggggggcuccugcguccugagcggccacaaccuggccaagcacugccuccacgugguggggcccaacgucaacaagggcgaggacauccagcugcugaaguccgccuacgagaacuucaaccagcacgaggugcuccuggcgccgcugcucagcgccgggaucuucggcgccgaccccauccacucccugcgggugugcgucgacaccgugcgcaccaacguguaccuggccgucuucgacaagaaccucuacgacaagcuggugagcuccuuccuggagaugaagagcgagaagcagguggagcagaagaucgccgagauccccaaggaggaggucaagcccuucaucaccgagagcaagccguccguggagcagcggaagcaggacgacaagaagaucaaggcgugcguggaggaggucacgaccacccucgaggagaccaaguuccugacggagaaccugcuccuguacaucgacaucaacgggaaccugcaccccgacagcgccacccucguguccgacaucgacaucaccuuccugaagaaggacgcccccuacaucgugggcgacgucgugcaggagggcgugcugaccgccgucgugauccccacgaagaaggccgggggcaccaccgagaugcucgcgaaggcccugcgcaaggugccgaccgacaacuacaucacgaccuaccccgggcagggccugaacggguacaccgucgaggaggccaagaccgugcucaagaagugcaagagcgccuucuacauccugcccuccaucaucagcaacgagaagcaggagauccugggcaccguguccuggaaccuccgggagaugcuggcgcacgccgaggagacgcgcaagcugaugcccgucugcguggagaccaaggccaucgugagcaccauccagcggaaguacaagggcaucaagauccaggagggggucguggacuacggcgcccgcuucuacuucuacaccuccaagacgaccguggccagccugaucaacacccucaacgaccugaacgagacccuggucacgaugccgcucggguacgugacccacggccugaaccuggaggaggcggcccgguacaugcgcucccucaaggugcccgccaccgucagcguguccagccccgacgccgugaccgccuacaacggguaccugacguccagcuccaagacccccgaggagcacuucaucgagaccaucagccuggcgggcuccuacaaggacuggagcuacagcggccaguccacccagcucgggaucgaguuccugaagcggggcgacaagagcgucuacuacacguccaacccgaccaccuuccaccuggacggggaggugaucaccuucgacaaccucaagacgcugcugagccuccgcgaggugcggaccaucaaggucuucaccaccguggacaacaucaaccugcacacgcagguggucgacauguccaugaccuacggccagcaguucggccccaccuaccuggacggggccgacgugaccaagaucaagccccacaacagccacgagggcaagacguucuacgugcucccgaacgacgacacccugcgcgucgaggccuucgaguacuaccacaccaccgaccccuccuuccuggggcgguacaugagcgcccucaaccacacgaagaaguggaaguacccccaggugaacggccugaccuccaucaagugggccgacaacaacugcuaccuggcgaccgcccuccugacccugcagcagaucgagcucaaguucaaccccccggcccugcaggacgccuacuaccgcgcgcgggccggggaggccgccaacuucugcgcccugauccucgcguacugcaacaagacggugggcgagcugggcgacguccgcgagaccaugagcuaccuguuccagcacgccaaccucgacuccugcaagcgggugcugaacgucgugugcaagaccugcgggcagcagcagaccacccugaagggcguggaggccgucauguacauggggacgcucagcuacgagcaguucaagaagggcgugcagauccccugcaccugcgggaagcaggccaccaaguaccuggugcagcaggagucccccuucgucaugaugagcgcccccccggcgcaguacgagcugaagcacggcaccuucacgugcgccuccgaguacaccggcaacuaccagugcgggcacuacaagcacaucaccagcaaggagacccucuacugcaucgacggcgcccugcugacgaaguccagcgaguacaaggggcccaucaccgacguguucuacaaggagaacagcuacaccaccacgaucaagcccgugaccuacaagcucgacggcgucgugugcaccgagaucgaccccaagcuggacaacuacuacaagaaggacaacuccuacuucaccgagcagccgaucgaccuggugcccaaccagcccuaccccaacgccagcuucgacaacuucaaguucgucugcgacaacaucaaguucgccgacgaccucaaccagcugacgggguacaagaagccggcgucccgcgagcugaaggugaccuucuuccccgaccucaacggcgacguggucgccaucgacuacaagcacuacacccccagcuucaagaagggcgccaagcugcugcacaagcccaucguguggcacgugaacaacgccaccaacaaggcgacguacaagccgaacaccuggugcauccggugccucugguccaccaagcccgucgagaccagcaacuccuucgacgugcugaagagcgaggacgcccaggggauggacaaccuggccugcgaggaccucaagcccguguccgaggaggucguggagaaccccacgauccagaaggacgugcuggagugcaacgucaagaccaccgagguggugggcgacaucauccugaagccggccaacaacagccucaagaucaccgaggaggucgggcacacggaccugauggccgcguacguggacaacuccagccugaccaucaagaagcccaacgagcucucccgcgugcugggccugaagacccucgccacccacgggcuggccgccgucaacagcgugcccugggacacgaucgccaacuacgcgaagccguuccugaacaagguggucuccaccaccaccaacaucgugacgcgcugccucaaccgggugugcaccaacuacaugcccuacuucuucacccugcugcuccagcugugcaccuucacccgcagcacgaacucccggaucaaggccagcaugcccaccaccaucgccaagaacaccgucaaguccgugggcaaguucugccuggaggccagcuucaacuaccucaagagccccaacuucuccaagcugaucaacaucaucaucugguuccugcuccugagcgugugccugggcucccucaucuacagcacggccgcgcuggggguccugauguccaaccucggcaugccgagcuacugcaccggguaccgcgagggcuaccugaacuccaccaacgugaccaucgccacguacugcaccggcagcauccccugcuccgugugccugagcgggcucgacucccuggacaccuaccccagccuggagaccauccagaucacgaucuccagcuucaagugggaccucaccgccuucggccuggucgccgagugguuccuggccuacauccucuucacccgguucuucuacgugcuggggcuggcggccaucaugcagcucuucuucuccuacuucgccgugcacuucaucagcaacuccuggcugauguggcugaucaucaaccugguccagauggcccccaucagcgcgauggugcgcauguacaucuucuucgccuccuucuacuacguguggaagagcuacguccacgugguggacggcugcaacagcuccaccugcaugaugugcuacaagcggaaccgcgccacgcgggucgagugcaccaccaucgugaacgggguccgccggagcuucuacguguacgccaacggcggcaagggguucugcaagcuccacaacuggaacugcgugaacugcgacaccuucugcgccggcuccacguucaucagcgacgaggucgcgcgcgaccugucccugcaguucaagcggccgaucaaccccaccgaccagagcuccuacaucguggacagcgugaccgucaagaacggguccauccaccucuacuucgacaaggccggccagaagaccuacgagcgccacagccugucccacuucgugaaccuggacaaccuccgggccaacaacacgaaggggagccugcccaucaacgugaucgucuucgacggcaaguccaagugcgaggagagcuccgccaagagcgccuccguguacuacagccagcugaugugccagcccauccuccugcuggaccaggcgcucguguccgacgucggcgacagcgccgagguggccgugaagauguucgacgccuacgucaacaccuucagcuccaccuucaacgugccgauggagaagcugaagacccugguggccacggcggaggccgagcucgccaagaacgucagccuggacaacgugcuguccaccuucaucagcgccgcgcgccagggguucguggacuccgacgucgagaccaaggacgugguggagugccucaagcugagccaccaguccgacaucgaggucaccggcgacagcugcaacaacuacaugcugacguacaacaagguggagaacaugaccccccgggaccucggggccugcaucgacugcuccgcccgccacaucaacgcccagguggccaagagccacaacaucgcgcugaucuggaacgucaaggacuucaugucccugagcgagcagcuccggaagcagauccgcuccgccgccaagaagaacaaccugcccuucaagcugaccugcgccaccacgcgccagguggugaacgucgugaccaccaagaucgcccucaagggcggguga

SEQ ID NO: 17762 - RNA, 5841 nt, Artificial Sequence
  SARS-CoV-2__MT844021.1__non-structural protein 3 (NSP3) CDS gc
auggcccccaccaaggugaccuucggcgacgacacggucaucgaggugcagggguacaagagcgugaacaucaccuucgagcuggacgagcgcaucgacaagguccucaacgagaagugcuccgccuacaccguggagcugggcaccgaggugaacgaguucgcgugcgucguggccgacgccgugaucaagacgcugcagccggucagcgagcuccugaccccccuggggaucgaccucgacgagugguccauggccaccuacuaccuguucgacgagagcggcgaguucaagcuggccucccacauguacugcagcuucuacccccccgacgaggacgaggaggagggggacugcgaggaggaggaguucgagccguccacccaguacgaguacggcacggaggacgacuaccagggcaagccccucgaguucggggcgaccagcgccgcccugcagcccgaggaggagcaggaggaggacuggcuggacgacgacucccagcagaccgugggccagcaggacgggagcgaggacaaccagaccacgaccauccagaccaucguggagguccagccccagcucgagauggagcugaccccgguggugcagacgaucgaggucaacuccuucagcggcuaccugaagcucaccgacaacguguacaucaagaacgccgacaucguggaggaggcgaagaaggucaagcccaccgugguggucaacgccgccaacguguaccugaagcacgggggcggcguggccggggcccugaacaaggcgaccaacaacgccaugcaggucgaguccgacgacuacaucgccacgaacggcccccucaagguggggggcagcugcguccuguccggccacaaccuggccaagcacugccuccacgugguggggcccaacgucaacaagggcgaggacauccagcugcugaagagcgccuacgagaacuucaaccagcacgaggugcuccuggcgccgcugcucuccgccgggaucuucggcgccgaccccauccacagccugcgggugugcgucgacaccgugcgcaccaacguguaccuggccgucuucgacaagaaccucuacgacaagcugguguccagcuuccuggagaugaagagcgagaagcagguggagcagaagaucgccgagauccccaaggaggaggucaagcccuucaucaccgaguccaagccgagcguggagcagcggaagcaggacgacaagaagaucaaggcgugcguggaggaggucacgaccacccucgaggagaccaaguuccugacggagaaccugcuccuguacaucgacaucaacgggaaccugcaccccgacuccgccacccucgugagcgacaucgacaucaccuuccugaagaaggacgcccccuacaucgugggcgacgucgugcaggagggcgugcugaccgccgucgugauccccacgaagaaggccgggggcaccaccgagaugcucgcgaaggcccugcgcaaggugccgaccgacaacuacaucacgaccuaccccgggcagggccugaacggguacaccgucgaggaggccaagaccgugcucaagaagugcaaguccgccuucuacauccugcccagcaucaucuccaacgagaagcaggagauccugggcaccgugagcuggaaccuccgggagaugcuggcgcacgccgaggagacgcgcaagcugaugcccgucugcguggagaccaaggccaucguguccaccauccagcggaaguacaagggcaucaagauccaggagggggucguggacuacggcgcccgcuucuacuucuacaccagcaagacgaccguggccucccugaucaacacccucaacgaccugaacgagacccuggucacgaugccgcucggguacgugacccacggccugaaccuggaggaggcggcccgguacaugcgcagccucaaggugcccgccaccgucuccgugagcucccccgacgccgugaccgccuacaacggguaccugacgagcuccagcaagacccccgaggagcacuucaucgagaccaucucccuggcgggcagcuacaaggacuggagcuacuccggccagagcacccagcucgggaucgaguuccugaagcggggcgacaaguccgucuacuacacgagcaacccgaccaccuuccaccuggacggggaggugaucaccuucgacaaccucaagacgcugcugucccuccgcgaggugcggaccaucaaggucuucaccaccguggacaacaucaaccugcacacgcagguggucgacaugagcaugaccuacggccagcaguucggccccaccuaccuggacggggccgacgugaccaagaucaagccccacaacucccacgagggcaagacguucuacgugcucccgaacgacgacacccugcgcgucgaggccuucgaguacuaccacaccaccgaccugagcuuccucgggcgguacauguccgcccugaaccacacgaagaaguggaaguacccccaggugaacggccugaccagcaucaagugggccgacaacaacugcuaccucgcgaccgcccugcugacccuccagcagaucgagcugaaguucaacccccccgcccugcaggacgccuacuaccgcgcgcgggccggggaggccgccaacuucugcgcccucauccuggcguacugcaacaagacggugggcgagcugggcgacguccgcgagaccauguccuaccucuuccagcacgccaaccuggacagcugcaagcgggugcugaacgucgugugcaagaccugcgggcagcagcagaccacccucaagggcguggaggccgucauguacauggggacgcuguccuacgagcaguucaagaagggcgugcagaucccgugcaccugcgggaagcaggccaccaaguaccuggugcagcaggagagccccuucgucaugauguccgccccccccgcgcaguacgagcucaagcacggcaccuucacgugcgccagcgaguacaccggcaacuaccagugcgggcacuacaagcacaucaccuccaaggagacccuguacugcaucgacggcgcccugcucacgaagagcagcgaguacaaggggccgaucaccgacguguucuacaaggagaacuccuacaccaccacgaucaagcccgugaccuacaagcuggacggcgucgugugcaccgagaucgaccccaagcuggacaacuacuacaagaaggacaacagcuacuucaccgagcagcccaucgaccucgugccgaaccagcccuaccccaacgccuccuucgacaacuucaaguucgucugcgacaacaucaaguucgccgacgaccugaaccagcugacgggguacaagaagcccgcgagccgcgagcucaaggugaccuucuucccggaccugaacggcgacguggucgccaucgacuacaagcacuacacccccuccuucaagaagggcgccaagcugcuccacaagcccaucguguggcacgugaacaacgccaccaacaaggcgacguacaagcccaacaccuggugcauccggugccuguggagcaccaagccggucgagaccuccaacagcuucgacgugcugaaguccgaggacgcccaggggauggacaaccucgccugcgaggaccugaagcccgugagcgaggaggucguggagaaccccacgauccagaaggacgugcuggagugcaacgucaagaccaccgagguggugggcgacaucauccucaagcccgccaacaacucccugaagaucaccgaggaggucgggcacacggaccugauggccgcguacguggacaacagcucccucaccaucaagaagccgaacgagcugagccgcgugcugggccucaagacccuggccacccacgggcuggccgccgucaacuccgugcccugggacacgaucgccaacuacgcgaagcccuuccucaacaagguggucagcaccaccaccaacaucgugacgcgcugccugaaccgggugugcaccaacuacaugccguacuucuucacccugcuccugcagcugugcaccuucacccgcuccacgaacagccggaucaaggccuccaugcccaccaccaucgccaagaacaccgucaagagcgugggcaaguucugccucgaggccagcuucaacuaccugaagucccccaacuucagcaagcugaucaacaucaucaucugguuccuccugcuguccgugugccucggcagccugaucuacuccacggccgcgcuggggguccucaugagcaaccugggcaugcccuccuacugcaccggguaccgcgagggcuaccugaacagcaccaacgugaccaucgccacguacugcaccggcuccaucccgugcagcgugugccucuccgggcuggacagccuggacaccuaccccucccucgagaccauccagaucacgaucagcuccuucaagugggaccugaccgccuucggccuggucgccgagugguuccucgccuacauccuguucacccgguucuucuacgugcuggggcucgcggccaucaugcagcuguucuucagcuacuucgccgugcacuucaucuccaacagcuggcugauguggcugaucaucaaccucguccagauggcccccaucuccgcgauggugcgcauguacaucuucuucgccagcuucuacuacguguggaagagcuacguccacgugguggacggcugcaacuccagcaccugcaugaugugcuacaagcggaaccgcgccacgcgggucgagugcaccaccaucgugaacgggguccgccgguccuucuacguguacgccaacggcggcaagggguucugcaagcugcacaacuggaacugcgugaacugcgacaccuucugcgccggcagcacguucaucuccgacgaggucgcgcgcgaccugagccuccaguucaagcggcccaucaacccgaccgaccaguccagcuacaucguggacuccgugaccgucaagaacgggagcauccaccuguacuucgacaaggccggccagaagaccuacgagcgccacucccugagccacuucgugaaccucgacaaccugcgggccaacaacacgaaggggucccugcccaucaacgugaucgucuucgacggcaagagcaagugcgaggaguccagcgccaaguccgccagcguguacuacucccagcucaugugccagcccauccugcugcucgaccaggcgcuggugagcgacgucggcgacagcgccgagguggccgugaagauguucgacgccuacgucaacaccuucuccagcaccuucaacgugcccauggagaagcugaagacccucguggccacggcggaggccgagcuggccaagaacgucucccuggacaacgugcucagcaccuucaucuccgccgcgcgccagggguucguggacagcgacgucgagaccaaggacgugguggagugccugaagcugucccaccagagcgacaucgaggucaccggcgacuccugcaacaacuacaugcucacguacaacaagguggagaacaugaccccgcgggaccugggggccugcaucgacugcagcgcccgccacaucaacgcccagguggccaagucccacaacaucgcgcugaucuggaacgucaaggacuucaugagccucuccgagcagcugcggaagcagauccgcagcgccgccaagaagaacaaccugcccuucaagcucaccugcgccaccacgcgccagguggugaacgucgugaccaccaagaucgcccugaagggcggguga

SEQ ID NO: 17763 - RNA, 5841 nt, Artificial Sequence
  SARS-CoV-2__MT844044.1__non-structural protein 3 (NSP3) CDS gc
auggcccccaccaaggugaccuucggcgacgacacggucaucgaggugcagggguacaagagcgugaacaucaccuucgagcuggacgagcgcaucgacaagguccucaacgagaagugcuccgccuacaccguggagcugggcaccgaggugaacgaguucgcgugcgucguggccgacgccgugaucaagacgcugcagccggucagcgagcuccugaccccccuggggaucgaccucgacgagugguccauggccaccuacuaccuguucgacgagagcggcgaguucaagcuggccucccacauguacugcagcuucuacccccccgacgaggacgaggaggagggggacugcgaggaggaggaguucgagccguccacccaguacgaguacggcacggaggacgacuaccagggcaagccccucgaguucggggcgaccagcgccgcccugcagcccgaggaggagcaggaggaggacuggcuggacgacgacucccagcagaccgugggccagcaggacgggagcgaggacaaccagaccacgaccauccagaccaucguggagguccagccccagcucgagauggagcugaccccgguggugcagacgaucgaggucaacuccuucagcggcuaccugaagcucaccgacaacguguacaucaagaacgccgacaucguggaggaggcgaagaaggucaagcccaccgugguggucaacgccgccaacguguaccugaagcacgggggcggcguggccggggcccugaacaaggcgaccaacaacgccaugcaggucgaguccgacgacuacaucgccacgaacggcccccucaagguggggggcagcugcguccuguccggccacaaccuggccaagcacugccuccacgugguggggcccaacgucaacaagggcgaggacauccagcugcugaagagcgccuacgagaacuucaaccagcacgaggugcuccuggcgccgcugcucuccgccgggaucuucggcgccgaccccauccacagccugcgggugugcgucgacaccgugcgcaccaacguguaccuggccgucuucgacaagaaccucuacgacaagcugguguccagcuuccuggagaugaagagcgagaagcagguggagcagaagaucgccgagauccccaaggaggaggucaagcccuucaucaccgaguccaagccgagcguggagcagcggaagcaggacgacaagaagaucaaggcgugcguggaggaggucacgaccacccucgaggagaccaaguuccugacggagaaccugcuccuguacaucgacaucaacgggaaccugcaccccgacuccgccacccucgugagcgacaucgacaucaccuuccugaagaaggacgcccccuacaucgugggcgacgucgugcaggagggcgugcugaccgccgucgugauccccacgaagaaggccgggggcaccaccgggaugcucgcgaaggcccugcgcaaggugccgaccgacaacuacaucacgaccuaccccggccaggggcugaacggcuacaccgucgaggaggccaagaccgugcucaagaagugcaaguccgccuucuacauccugcccagcaucaucuccaacgagaagcaggagauccugggcaccgugagcuggaaccuccgggagaugcuggcgcacgccgaggagacgcgcaagcugaugcccgucugcguggagaccaaggccaucguguccaccauccagcggaaguacaaggggaucaagauccaggagggcgucguggacuacggggcccgcuucuacuucuacaccagcaagacgaccguggccucccugaucaacacccucaacgaccugaacgagacccuggucacgaugccgcucggcuacgugacccacgggcugaaccuggaggaggcggcccgguacaugcgcagccucaaggugcccgccaccgucuccgugagcucccccgacgccgugaccgccuacaacggcuaccugacgagcuccagcaagacccccgaggagcacuucaucgagaccaucucccuggcgggcagcuacaaggacuggagcuacuccgggcagagcacccagcucggcaucgaguuccugaagcggggggacaaguccgucuacuacacgagcaacccgaccaccuuccaccuggacggcgaggugaucaccuucgacaaccucaagacgcugcugucccuccgcgaggugcggaccaucaaggucuucaccaccguggacaacaucaaccugcacacgcagguggucgacaugagcaugaccuacggccagcaguucgggcccaccuaccuggacggcgccgacgugaccaagaucaagccccacaacucccacgaggggaagacguucuacgugcucccgaacgacgacacccugcgcgucgaggccuucgaguacuaccacaccaccgaccccagcuuccugggccgguacauguccgcccucaaccacacgaagaaguggaaguacccccaggugaacgggcugaccagcaucaagugggccgacaacaacugcuaccuggcgaccgcccuccugacccugcagcagaucgagcucaaguucaaccccccggcccugcaggacgccuacuaccgcgcgcgggccggcgaggccgccaacuucugcgcccugauccucgcguacugcaacaagacggugggcgagcugggggacguccgcgagaccauguccuaccuguuccagcacgccaaccucgacagcugcaagcgggugcugaacgucgugugcaagaccugcggccagcagcagaccacccugaaggggguggaggccgucauguacaugggcacgcucuccuacgagcaguucaagaagggggugcagauccccugcaccugcggcaagcaggccaccaaguaccuggugcagcaggagagccccuucgucaugauguccgcccccccggcgcaguacgagcugaagcacggcaccuucacgugcgccagcgaguacaccgggaacuaccagugcggccacuacaagcacaucaccuccaaggagacccucuacugcaucgacggggcccugcugacgaagagcagcgaguacaagggccccaucaccgacguguucuacaaggagaacuccuacaccaccacgaucaagcccgugaccuacaagcucgacggggucgugugcaccgagaucgaccccaagcuggacaacuacuacaagaaggacaacagcuacuucaccgagcagccgaucgaccuggugcccaaccagcccuaccccaacgccuccuucgacaacuucaaguucgucugcgacaacaucaaguucgccgacgaccucaaccagcugacgggcuacaagaagccggcgagccgcgagcugaaggugaccuucuuccccgaccucaacggcgacguggucgccaucgacuacaagcacuacacccccuccuucaagaagggggccaagcugcugcacaagcccaucguguggcacgugaacaacgccaccaacaaggcgacguacaagccgaacaccuggugcauccggugccucuggagcaccaagcccgucgagaccuccaacagcuucgacgugcugaaguccgaggacgcccagggcauggacaaccuggccugcgaggaccucaagcccgugagcgaggaggucguggagaaccccacgauccagaaggacgugcuggagugcaacgucaagaccaccgagguggugggggacaucauccugaagccggccaacaacucccucaagaucaccgaggaggucggccacacggaccugauggccgcguacguggacaacagcucccugaccaucaagaagcccaacgagcucagccgcgugcuggggcugaagacccucgccacccacggccuggccgccgucaacuccgugcccugggacacgaucgccaacuacgcgaagccguuccugaacaagguggucagcaccaccaccaacaucgugacgcgcugccucaaccgggugugcaccaacuacaugcccuacuucuucacccugcugcuccagcugugcaccuucacccgcuccacgaacagccggaucaaggccuccaugcccaccaccaucgccaagaacaccgucaagagcgugggcaaguucugccuggaggccagcuucaacuaccucaagucccccaacuucagcaagcugaucaacaucaucaucugguuccugcuccuguccgugugccuggggagccucaucuacuccacggccgcgcugggcguccugaugagcaaccucgggaugccguccuacugcaccggcuaccgcgagggcuaccugaacagcaccaacgugaccaucgccacguacugcaccggguccauccccugcagcgugugccuguccggccucgacagccuggacaccuaccccucccuggagaccauccagaucacgaucagcuccuucaagugggaccucaccgccuucgggcuggucgccgagugguuccuggccuacauccucuucacccgguucuucuacgugcugggccuggcggccaucaugcagcucuucuucagcuacuucgccgugcacuucaucuccaacagcuggcugauguggcugaucaucaaccugguccagauggcccccaucuccgcgauggugcgcauguacaucuucuucgccagcuucuacuacguguggaagagcuacguccacgugguggacgggugcaacuccagcaccugcaugaugugcuacaagcggaaccgcgccacgcgggucgagugcaccaccaucgugaacggcguccgccgguccuucuacguguacgccaacggcgggaagggcuucugcaagcuccacaacuggaacugcgugaacugcgacaccuucugcgccgggagcacguucaucuccgacgaggucgcgcgcgaccugagccugcaguucaagcggccgaucaaccccaccgaccaguccagcuacaucguggacuccgugaccgucaagaacggcagcauccaccucuacuucgacaaggccgggcagaagaccuacgagcgccacucccugagccacuucgugaaccuggacaaccuccgggccaacaacacgaagggcucccugcccaucaacgugaucgucuucgacggcaagagcaagugcgaggaguccagcgccaaguccgccagcguguacuacucccagcugaugugccagcccauccuccugcuggaccaggcgcucgugagcgacgucggggacagcgccgagguggccgugaagauguucgacgccuacgucaacaccuucuccagcaccuucaacgugccgauggagaagcugaagacccugguggccacggcggaggccgagcucgccaagaacgucucccuggacaacgugcugagcaccuucaucuccgccgcgcgccagggcuucguggacagcgacgucgagaccaaggacgugguggagugccucaagcugucccaccagagcgacaucgaggucaccggggacuccugcaacaacuacaugcugacguacaacaagguggagaacaugaccccccgggaccucggcgccugcaucgacugcagcgcccgccacaucaacgcccagguggccaagucccacaacaucgcgcugaucuggaacgucaaggacuucaugagccuguccgagcagcuccggaagcagauccgcagcgccgccaagaagaacaaccugcccuucaagcugaccugcgccaccacgcgccagguggugaacgucgugaccaccaagaucgcccucaaggggggcuga

SEQ ID NO: 17764 - RNA, 5841 nt, Artificial Sequence
  SARS-CoV-2__MT831129.1__non-structural protein 3 (NSP3) CDS gc
auggcccccaccaaggugaccuucggcgacgacacggucaucgaggugcagggguacaagagcgugaacaucaccuucgagcuggacgagcgcaucgacaagguccucaacgagaagugcuccgccuacaccguggagcugggcaccgaggugaacgaguucgcgugcgucguggccgacgccgugaucaagacgcugcagccggucagcgagcuccugaccccccuggggaucgaccucgacgagugguccauggccaccuacuaccuguucgacgagagcggcgaguucaagcuggccucccacauguacugcagcuucuacccccccgacgaggacgaggaggagggggacugcgaggaggaggaguucgagccguccacccaguacgaguacggcacggaggacgacuaccagggcaagccccucgaguucggggcgaccagcgccgcccugcagcccgaggaggagcaggaggaggacuggcuggacgacgacucccagcagaccgugggccagcaggacgggagcgaggacaaccagaccacgaccauccagaccaucguggagguccagccccagcucgagauggagcugaccccgguggugcagacgaucgaggucaacuccuucagcggcuaccugaagcucaccgacaacguguacaucaagaacgccgacaucguggaggaggcgaagaaggucaagcccaccgugguggucaacgccgccaacguguaccugaagcacgggggcggcguggccggggcccugaacaaggcgaccaacaacgccaugcaggucgaguccgacgacuacaucgccacgaacggcccccucaagguggggggcagcugcguccuguccggccacaaccuggccaagcacugccuccacgugguggggcccaacgucaacaagggcgaggacauccagcugcugaagagcgccuacgagaacuucaaccagcacgaggugcuccuggcgccgcugcucuccgccgggaucuucggcgccgaccccauccacagccugcgggugugcgucgacaccgugcgcaccaacguguaccuggccgucuucgacaagaaccucuacgacaagcugguguccagcuuccuggagaugaagagcgagaagcagguggagcagaagaucgccgagauccccaaggaggaggucaagcccuucaucaccgaguccaagccgagcguggagcagcggaagcaggacgacaagaagaucaaggcgugcguggaggaggucacgaccacccucgaggagaccaaguuccugacggagaaccugcuccuguacaucgacaucaacgggaaccugcaccccgacuccgccacccucgugagcgacaucgacaucaccuuccugaagaaggacgcccccuacaucgugggcgacgucgugcaggagggcgugcugaccgccgucgugauccccacgaagaaggccgggggcaccaccgagaugcucgcgaaggcccugcgcaaggugccgaccgacaacuacaucacgaccuaccccgggcagggccugaacggguacaccgucgaggacgccaagaccgugcucaagaagugcaaguccgccuucuacauccugcccagcaucaucuccaacgagaagcaggagauccugggcaccgugagcuggaaccuccgggagaugcuggcgcacgccgaggagacgcgcaagcugaugcccgucugcguggagaccaaggccaucguguccaccauccagcggaaguacaagggcaucaagauccaggagggggucguggacuacggcgcccgcuucuacuucuacaccagcaagacgaccguggccucccugaucaacacccucaacgaccugaacgagacccuggucacgaugccgcucggguacgugacccacggccugaaccuggaggaggcggcccgguacaugcgcagccucaaggugcccgccaccgucuccgugagcucccccgacgccgugaccgccuacaacggguaccugacgagcuccagcaagacccccgaggagcacuucaucgagaccaucucccuggcgggcagcuacaaggacuggagcuacuccggccagagcacccagcucgggaucgaguuccugaagcggggcgacaaguccgucuacuacacgagcaacccgaccaccuuccaccuggacggggaggugaucaccuucgacaaccucaagacgcugcugucccuccgcgaggugcggaccaucaaggucuucaccaccguggacaacaucaaccugcacacgcagguggucgacaugagcaugaccuacggccagcaguucggccccaccuaccuggacggggccgacgugaccaagaucaagccccacaacucccacgagggcaagacguucuacgugcucccgaacgacgacacccugcgcgucgaggccuucgaguacuaccacaccaccgaccccagcuuccuggggcgguacauguccgcccucaaccacacgaagaaguggaaguacccccaggugaacggccugaccagcaucaagugggccgacaacaacugcuaccuggcgaccgcccuccugacccugcagcagaucgagcucaaguucaaccccccggcccugcaggacgccuacuaccgcgcgcgggccggggaggccgccaacuucugcgcccugauccucgcguacugcaacaagacggugggcgagcugggcgacguccgcgagaccauguccuaccuguuccagcacgccaaccucgacagcugcaagcgggugcugaacgucgugugcaagaccugcgggcagcagcagaccacccugaagggcguggaggccgucauguacauggggacgcucuccuacgagcaguucaagaagggcgugcagauccccugcaccugcgggaagcaggccaccaaguaccuggugcagcaggagagccccuucgucaugauguccgcccccccggcgcaguacgagcugaagcacggcaccuucacgugcgccagcgaguacaccggcaacuaccagugcgggcacuacaagcacaucaccuccaaggagacccucuacugcaucgacggcgcccugcugacgaagagcagcgaguacaaggggcccaucaccgacguguucuacaaggagaacuccuacaccaccacgaucaagcccgugaccuacaagcucgacggcgucgugugcaccgagaucgaccccaagcuggacaacuacuacaagaaggacaacagcuacuucaccgagcagccgaucgaccuggugcccaaccagcccuaccccaacgccuccuucgacaacuucaaguucgucugcgacaacaucaaguucgccgacgaccucaaccagcugacgggguacaagaagccggcgagccgcgagcugaaggugaccuucuuccccgaccucaacggcgacguggucgccaucgacuacaagcacuacacccccuccuucaagaagggcgccaagcugcugcacaagcccaucguguggcacgugaacaacgccaccaacaaggcgacguacaagccgaacaccuggugcauccggugccucuggagcaccaagcccgucgagaccuccaacagcuucgacgugcugaaguccgaggacgcccaggggauggacaaccuggccugcgaggaccucaagcccgugagcgaggaggucguggagaaccccacgauccagaaggacgugcuggagugcaacgucaagaccaccgagguggugggcgacaucauccugaagccggccaacaacucccucaagaucaccgaggaggucgggcacacggaccugauggccgcguacguggacaacagcucccugaccaucaagaagcccaacgagcucagccgcgugcugggccugaagacccucgccacccacgggcuggccgccgucaacuccgugcccugggacacgaucgccaacuacgcgaagccguuccugaacaagguggucagcaccaccaccaacaucgugacgcgcugccucaaccgggugugcaccaacuacaugcccuacuucuucacccugcugcuccagcugugcaccuucacccgcuccacgaacagccggaucaaggccuccaugcccaccaccaucgccaagaacaccgucaagagcgugggcaaguucugccuggaggccagcuucaacuaccucaagucccccaacuucagcaagcugaucaacaucaucaucugguuccugcuccuguccgugugccugggcagccucaucuacuccacggccgcgcuggggguccugaugagcaaccucggcaugccguccuacugcaccggguaccgcgagggcuaccugaacagcaccaacgugaccaucgccacguacugcaccggcuccauccccugcagcgugugccuguccgggcucgacagccuggacaccuaccccucccuggagaccauccagaucacgaucagcuccuucaagugggaccucaccgccuucggccuggucgccgagugguuccuggccuacauccucuucacccgguucuucuacgugcuggggcuggcggccaucaugcagcucuucuucagcuacuucgccgugcacuucaucuccaacagcuggcugauguggcugaucaucaaccugguccagauggcccccaucuccgcgauggugcgcauguacaucuucuucgccagcuucuacuacguguggaagagcuacguccacgugguggacggcugcaacuccagcaccugcaugaugugcuacaagcggaaccgcgccacgcgggucgagugcaccaccaucgugaacgggguccgccgguccuucuacguguacgccaacggcggcaagggguucugcaagcuccacaacuggaacugcgugaacugcgacaccuucugcgccggcagcacguucaucuccgacgaggucgcgcgcgaccugagccugcaguucaagcggccgaucaaccccaccgaccaguccagcuacaucguggacuccgugaccgucaagaacgggagcauccaccucuacuucgacaaggccggccagaagaccuacgagcgccacucccugagccacuucgugaaccuggacaaccuccgggccaacaacacgaaggggucccugcccaucaacgugaucgucuucgacggcaagagcaagugcgaggaguccagcgccaaguccgccagcguguacuacucccagcugaugugccagcccauccuccugcuggaccaggcgcucgugagcgacgucggcgacagcgccgagguggccgugaagauguucgacgccuacgucaacaccuucuccagcaccuucaacgugccgauggagaagcugaagacccugguggccacggcggaggccgagcucgccaagaacgucucccuggacaacgugcugagcaccuucaucuccgccgcgcgccagggguucguggacagcgacgucgagaccaaggacgugguggagugccucaagcugucccaccagagcgacaucgaggucaccggcgacuccugcaacaacuacaugcugacguacaacaagguggagaacaugaccccccgggaccucggggccugcaucgacugcagcgcccgccacaucaacgcccagguggccaagucccacaacaucgcgcugaucuggaacgucaaggacuucaugagccuguccgagcagcuccggaagcagauccgcagcgccgccaagaagaacaaccugcccuucaagcugaccugcgccaccacgcgccagguggugaacgucgugaccaccaagaucgcccucaagggcggguga

SEQ ID NO: 17765 - RNA, 5841 nt, Artificial Sequence
  SARS-CoV-2__MT831131.1__non-structural protein 3 (NSP3) CDS gc
auggcccccaccaaggugaccuucggcgacgacacggucaucgaggugcagggguacaagagcgugaacaucaccuucgagcuggacgagcgcaucgacaagguccucaacgagaagugcuccgccuacaccguggagcugggcaccgaggugaacgaguucgcgugcgucguggccgacgccgugaucaagacgcugcagccggucagcgagcuccugaccccccuggggaucgaccucgacgagugguccauggccaccuacuaccuguucgacgagagcggcgaguucaagcuggccucccacauguacugcagcuucuacccccccgacgaggacgaggaggagggggacugcgaggaggaggaguucgagccguccacccaguacgaguacggcacggaggacgacuaccagggcaagccccucgaguucggggcgaccagcgccgcccugcagcccgaggaggagcaggaggaggacuggcuggacgacgacucccagcagaccgugggccagcaggacgggagcgaggacaaccagaccacgaccauccagaccaucguggagguccagccccagcucgagauggagcugaccccgguggugcagacgaucgaggucaacuccuucagcggcuaccugaagcucaccgacaacguguacaucaagaacgccgacaucguggaggaggcgaagaaggucaagcccaccgugguggucaacgccgccaacguguaccugaagcacgggggcggcguggccggggcccugaacaaggcgaccaacaacgccaugcaggucgaguccgacgacuacaucgccacgaacggcccccucaagguggggggcagcugcguccuguccggccacaaccuggccaagcacugccuccacgugguggggcccaacgucaacaagggcgaggacauccagcugcugaagagcgccuacgagaacuucaaccagcacgaggugcuccuggcgccgcugcucuccgccgggaucuucggcgccgaccccauccacagccugcgggugugcgucgacaccgugcgcaccaacguguaccuggccgucuucgacaagaaccucuacgacaagcugguguccagcuuccuggagaugaagagcgagaagcagguggagcagaagaucgccgagauccccaaggaggaggucaagcccuucaucaccgaguccaagccgagcguggagcagcggaagcaggacgacaagaagaucaaggcgugcguggaggaggucacgaccacccucgaggagaccaaguuccugacggagaaccugcuccuguacaucgacaucaacgggaaccugcaccccgacuccgccacccucgugagcgacaucgacaucaccuuccugaagaaggacgcccccuacaucgugggcgacgucgugcaggagggcgugcugaccgccgucgugauccccacgaagaaggccgggggcaccaccgagaugcucgcgaaggcccugcgcaaggugccgaccgacaacuacaucacgaccuaccccgggcagggccugaacggguacaccgucgaggaggccaagaccgugcucaagaagugcaaguccgccuucuacauccugcccagcaucaucuccaacgagaagcaggagauccugggcaccgugagcuggaaccuccgggagaugcuggcgcacgccgaggagacgcgcaagcugaugcccgucugcguggagaccaaggccaucguguccaccauccagcggaaguacaagggcaucaagauccaggagggggucguggacuacggcgcccgcuucuacuucuacaccagcaagacgaccguggccucccugaucaacacccucaacgaccugaacgagacccuggucacgaugccgcucggguacgugacccacggccugaaccuggaggaggcggcccgguacaugcgcagccucaaggugcccgccaccgucuccgugagcucccccgacgccgugaccgccuacaacggguaccugacgagcuccagcaagacccccgaggagcacuucaucgagaccaucucccuggcgggcagcuacaaggacuggagcuacuccggccagagcacccagcucgggaucgaguuccugaagcggggcgacaaguccgucuacuacacgagcaacccgaccaccuuccaccuggacggggaggugaucaccuucgacaaccucaagacgcugcugucccuccgcgaggugcggaccaucaaggucuucaccaccguggacaacaucaaccugcacacgcagguggucgacaugagcaugaccuacggccagcaguucggccccaccuaccuggacggggccgacgugaccaagaucaagccccacaacucccacgagggcaagacguucuacgugcucccgaacgacgacacccugcgcgucgaggccuucgaguacuaccacaccaccgaccccagcuuccuggggcgguacauguccgcccucaaccacacgaagaaguggaaguacccccaggugaacggccugaccagcaucaagugggccgacaacaacugcuaccuggcgaccgcccuccugacccugcagcagaucgagcucaaguucaaccccccggcccugcaggacgccuacuaccgcgcgcgggccggggaggccgccaacuucugcgcccugauccucgcguacugcaacaagacggugggcgagcugggcgacguccgcgagaccauguccuaccuguuccagcacgccaaccucgacagcugcaagcgggugcugaacgucgugugcaagaccugcgggcagcagcagaccacccugaagggcguggaggccgucauguacauggggacgcucuccuacgagcaguucaagaagggcgugcagauccccugcaccugcgggaagcaggccaccaaguaccuggugcagcaggagagccccuucgucaugauguccgcccccccggcgcaguacgagcugaagcacggcaccuucacgugcgccagcgaguacaccggcaacuaccagugcgggcacuacaagcacaucaccuccaaggagacccucuacugcaucgacggcgcccugcugacgaagagcagcgaguacaaggggcccaucaccgacguguucuacaaggagaacuccuacaccaccacgaucaagcccgugaccuacaagcucgacggcgucgugugcaccgagaucgaccccaagcuggacaacuacuacaagaaggacaacagcuacuucaccgagcagccgaucgaccuggugcccaaccagcccuaccccaacgccuccuucgacaacuucaaguucgucugcgacaacaucaaguucgccgacgaccucaaccagcugacgggguacaagaagccggcgagccgcgagcugaaggugaccuucuuccccgaccucaacggcgacguggucgccaucgacuacaagcacuacacccccuccuucaagaagggcgccaagcugcugcacaagcccaucguguggcacgugaacaacgccaccaacaaggcgacguacaagccgaacaccuggugcauccggugccucuggagcaccaagcccgucgagaccuccaacagcuucgacgugcugaaguccgaggacgcccaggggauggacaaccuggccugcgaggaccucaagcccgugagcgaggaggucguggagaaccccacgauccagaaggacgugcuggagugcaacgucaagaccaccgagguggugggcgacaucauccugaagccggccaacaacucccucaagaucaccgaggaggucgggcacacggaccugauggccgcguacguggacaacagcucccugaccaucaagaagcccaacgagcucagccgcgugcugggccugaagacccucgccacccacgggcuggccgccgucaacuccgugcccugggacacgaucgccaacuacgcgaagccguuccugaacaagguggucagcaccaccaccaacaucgugacgcgcugccucaaccgggugugcaccaacuacaugcccuacuucuucacccugcugcuccagcugugcaccuucacccgcuccacgaacagccggaucaaggccuccaugcccaccaccaucgccaagaacaccgucaagagcgugggcaaguucugccuggaggccagcuucaacuaccucaagucccccaacuucagcaagcugaucaacaucaucaucugguuccugcuccuguccgugugccugggcagccucaucuacuccacggccgcgcuggggguccugaugagcaaccucggcaugccguccuacugcaccggguaccgcgagggcuaccugaacagcaccaacgugaccaucgccacguacugcaccggcuccauccccugcagcgugugccuguccgggcucgacagccuggacaccuaccccucccuggagaccauccagaucacgaucagcuccuucaagugggaccucaccgccuucggccuggucgccgagugguuccuggccuacauccucuucacccgguucuucuacgugcuggggcuggcggccaucaugcagcucuucuucagcuacuucgccgugcacuucaucuccaacagcuggcugauguggcugaucaucaaccugguccagauggcccccaucuccgcgauggugcgcauguacaucuucuucgccagcuucuacuacguguggaagagcuacguccacgugguggacggcugcaacuccagcaccugcaugaugugcuacaagcggaaccgcgccacgcgggucgagugcaccaccaucgugaacgggguccgccgguccuucuacguguacgccaacggcggcaagggguucugcaagcuccacaacuggaacugcgugaacugcgacaccuucugcgccggcagcacguucaucuccgacgaggucgcgcgcgaccugagccugcaguucaagcggccgaucaaccccaccgaccaguccagcuacaucguggacuccgugaccgucaagaacgggagcauccaccucuacuucgacaaggccggccagaagaccuacgagcgccacucccugagccacuucgugaaccuggacaaccuccgggccaacaacacgaaggggucccugcccaucaacgugaucgucuucgacggcaagagcaagugcgaggaguccagcgccaaguccgccagcguguacuacucccagcugaugugccagcccauccuccugcuggaccaggcgcucgugagcgacgucggcgacagcgccgagguggccgugaagauguucgacgccuacgucaacaccuucuccagcaccuucaacaucccgauggagaagcugaagacccugguggccacggcggaggccgagcucgccaagaacgugucccuggacaacguccugagcaccuucaucuccgccgcgcgccagggguucguggacagcgacguggagaccaaggacgucguggagugccucaagcugucccaccagagcgacaucgaggugaccggcgacuccugcaacaacuacaugcugacguacaacaaggucgagaacaugaccccccgggaccucggggccugcaucgacugcagcgcccgccacaucaacgcccagguggccaagucccacaacaucgcgcugaucuggaacgugaaggacuucaugagccuguccgagcagcuccggaagcagauccgcagcgccgccaagaagaacaaccugcccuucaagcugaccugcgccaccacgcgccaggucgugaacguggucaccaccaagaucgcccucaagggcggguga

SEQ ID NO: 17766 - RNA, 5841 nt, Artificial Sequence
  SARS-CoV-2__MT831162.1__non-structural protein 3 (NSP3) CDS gc
auggcccccaccaaggugaccuucggcgacgacacggucaucgaggugcagggguacaagagcgugaacaucaccuucgagcuggacgagcgcaucgacaagguccucaacgagaagugcuccgccuacaccguggagcugggcaccgaggugaacgaguucgcgugcgucguggccgacgccgugaucaagacgcugcagccggucagcgagcuccugaccccccuggggaucgaccucgacgagugguccauggccaccuacuaccuguucgacgagagcggcgaguucaagcuggccucccacauguacugcagcuucuacccccccgacgaggacgaggaggagggggacugcgaggaggaggaguucgagccguccacccaguacgaguacggcacggaggacgacuaccagggcaagccccucgaguucggggcgaccagcgccgcccugcagcccgaggaggagcaggaggaggacuggcuggacgacgacucccagcagaccgugggccagcaggacgggagcgaggacaaccagaccacgaccauccagaccaucguggagguccagccccagcucgagauggagcugaccccgguggugcagacgaucgaggucaacuccuucagcggcuaccugaagcucaccgacaacguguacaucaagaacgccgacaucguggaggaggcgaagaaggucaagcccaccgugguggucaacgccgccaacguguaccugaagcacgggggcggcguggccggggcccugaacaaggcgaccaacaacgccaugcaggucgaguccgacgacuacaucgccacgaacggcccccucaagguggggggcagcugcguccuguccggccacaaccuggccaagcacugccuccacgugguggggcccaacgucaacaagggcgaggacauccagcugcugaagagcgccuacgagaacuucaaccagcacgaggugcuccuggcgccgcugcucuccgccgggaucuucggcgccgaccccauccacagccugcgggugugcgucgacaccgugcgcaccaacguguaccuggccgucuucgacaagaaccucuacgacaagcugguguccagcuuccuggagaugaagagcgagaagcagguggagcagaagaucgccgagauccccaaggaggaggucaagcccuucaucaccgaguccaagccgagcguggagcagcggaagcaggacgacaagaagaucaaggcgugcguggaggaggucacgaccacccucgaggagaccaaguuccugacggagaaccugcuccuguacaucgacaucaacgggaaccugcaccccgacuccgccacccucgugagcgacaucgacaucaccuuccugaagaaggacgcccccuacaucgugggcgacgucgugcaggagggcgugcugaccgccgucgugauccccacgaagaaggccgggggcaccaccgagaugcucgcgaaggcccugcgcaaggugccgaccgacaacuacaucacgaccuaccccgggcagggccugaacggguacaccgucgaggaggccaagaccgugcucaagaagugcaaguccgccuucuacauccugcccagcaucaucuccaacgagaagcaggagauccugggcaccgugagcuggaaccuccgggagaugcuggcgcacgccgaggagacgcgcaagcugaugcccgucugcguggagaccaaggccaucguguccaccauccagcggaaguacaagggcaucaagauccaggagggggucguggacuacggcgcccgcuucuacuucuacaccagcaagacgaccguggccucccugaucaacacccucaacgaccugaacgagacccuggucacgaugccgcucggguacgugacccacggccugaaccuggaggaggcggcccgguacaugcgcagccucaaggugcccgccaccgucuccgugagcucccccgacgccgugaccgccuacaacggguaccugacgagcuccagcaagacccccgaggagcacuucaucgagaccaucucccuggcgggcagcuacaaggacuggagcuacuccggccagagcacccagcucgggaucgaguuccugaagcggggcgacaaguccgucuacuacacgagcaacccgaccaccuuccaccuggacggggaggugaucaccuucgacaaccucaagacgcugcugucccuccgcgaggugcggaccaucaaggucuucaccaccguggacaacaucaaccugcacacgcagguggucgacaugagcaugaccuacggccagcaguucggccccaccuaccuggacggggccgacgugaccaagaucaagccccacaacucccacgagggcaagacguucuacgugcucccgaacgacgacacccugcgcgucgaggccuucgaguacuaccacaccaccgaccccagcuuccuggggcgguacauguccgcccucaaccacacgaagaaguggaaguacccccaggugaacggccugaccagcaucaagugggccgacaacaacugcuaccuggcgaccgcccuccugacccugcagcagaucgagcucaaguucaaccccccggcccugcaggacgccuacuaccgcgcgcgggccggggaggccgccaacuucugcgcccugauccucgcguacugcaacaagacggugggcgagcugggcgacguccgcgagaccauguccuaccuguuccagcacgccaaccucgacagcugcaagcgggugcugaacgucgugugcaagaccugcgggcagcagcagaccacccugaagggcguggaggccgucauguacauggggacgcucuccuacgagcaguucaagaagggcgugcagauccccugcaccugcgggaagcaggccaccaaguaccuggugcagcaggagagccccuucgucaugauguccgcccccccggcgcaguacgagcugaagcacggcaccuucacgugcgccagcgaguacaccggcaacuaccagugcgggcacuacaagcacaucaccuccaaggagacccucuacugcaucgacggcgcccugcugacgaagagcagcgaguacaaggggcccaucaccgacguguucuacaaggagaacuccuacaccaccacgaucaagcccgugaccuacaagcucgacggcgucgugugcaccgagaucgaccccaagcuggacaacuacuacaagaaggacaacagcuacuucaccgagcagccgaucgaccuggugcccaaccagcccuaccccaacgccuccuucgacaacuucaaguucgucugcgacaacaucaaguucgccgacgaccucaaccagcugacgggguacaagaagccggcgagccgcgagcugaaggugaccuucuuccccgaccucaacggcgacguggucgccaucgacuacaagcacuacacccccuccuucaagaagggcgccaagcugcugcacaagcccaucguguggcacgugaacaacgccaccaacaaggcgacguacaagccgaacaccuggugcauccggugccucuggagcaccaagcccgucgagaccuccaacagcuucgacgugcugaaguccgaggacgcccaggggauggacaaccuggccugcgaggaccucaagcccgugagcgaggaggucguggagaaccccacgauccagaaggacgugcuggagugcaacgucaagaccaccgagguggugggcgacaucauccugaagccggccaacaacucccucaagaucaccgaggaggucgggcacacggaccugauggccgcguacguggacaacagcucccugaccaucaagaagcccaacgagcucagccgcgugcugggccugaagacccucgccacccacgggcuggccgccgucaacuccgugcccugggacacgaucgccaacuacgcgaagccguuccugaacaagguggucagcaccaccaccaacaucgugacgcgcugccucaaccgggugugcaccaacuacaugcccuacuucuucacccugcugcuccagcugugcaccuucacccgcuccacgaacagccggaucaaggccuccaugcccaccaccaucgccaagaacaccgucaagagcgugggcaaguucugccuggaggccagcuucaacuaccucaagucccccaacuucagcaagcugaucaacaucaucaucugguuccugcuccuguccgugugccugggcagccucaucuacuccacggccgcgcuggggguccugaugagcaaccucggcaugccguccuacugcaccggguaccgcgagggcuaccugaacagcaccaacgugaccaucgccacguacugcaccggcuccauccccugcagcgugugccuguccgggcucgacagccuggacaccuaccccucccuggagaccauccagaucacgaucagcuccuucaagugggaccucaccgccuucggccuggucgccgagugguuccuggccuacauccucuucacccgguucuucuacgugcuggggcuggcggccaucaugcagcucuucuucagcuacuucgccgugcacuucaucuccaacagcuggcugauguggcugaucaucaaccugguccagauggcccccaucuccgcgauggugcgcauguacaucuucuucgccagcuucuacuacguguggaagagcuacguccacgugguggacggcugcaacuccagcaccugcaugaugugcuacaagcggaaccgcgccacgcgggucgagugcaccaccaucgugaacgggguccgccgguccuucuacguguacgccaacggcggcaagggguucugcaagcuccacaacuggaacugcgugaacugcgacaccuucugcgccggcagcacguucaucuccgacgaggucgcgcgcgaccugagccugcaguucaagcggccgaucaaccccaccgaccaguccagcuacaucguggacuccgugaccgucaagaacgggagcauccaccucuacuucgacaaggccggccagaagaccuacgagcgccacucccugagccacuucgugaaccuggacaaccuccgggccaacaacaucaaggggucccugcccaucaacgugaucgucuucgacggcaagagcaagugcgaggaguccagcgccaaguccgccagcguguacuacucccagcugaugugccagcccauccuccugcuggaccaggcgcucgugagcgacgucggcgacagcgccgagguggccgugaagauguucgacgccuacgucaacacguucuccagcaccuucaacgugccgauggagaagcugaagacccugguggccaccgcggaggccgagcucgccaagaacgucucccuggacaacgugcugagcacguucaucuccgccgcgcgccagggguucguggacagcgacgucgagaccaaggacgugguggagugccucaagcugucccaccagagcgacaucgaggucaccggcgacuccugcaacaacuacaugcugaccuacaacaagguggagaacaugacgccccgggaccucggggccugcaucgacugcagcgcccgccacaucaacgcccagguggccaagucccacaacaucgcgcugaucuggaacgucaaggacuucaugagccuguccgagcagcuccggaagcagauccgcagcgccgccaagaagaacaaccugcccuucaagcugaccugcgccaccacccgccagguggugaacgucgugacgaccaagaucgcccucaagggcggguga

SEQ ID NO: 17767 - RNA, 5841 nt, Artificial Sequence
  SARS-CoV-2__MT831168.1__non-structural protein 3 (NSP3) CDS gc
auggcccccaccaaggugaccuucggcgacgacacggucaucgaggugcagggguacaagagcgugaacaucaccuucgagcuggacgagcgcaucgacaagguccucaacgagaagugcuccgccuacaccguggagcugggcaccgaggugaacgaguucgcgugcgucguggccgacgccgugaucaagacgcugcagccggucagcgagcuccugaccccccuggggaucgaccucgacgagugguccauggccaccuacuaccuguucgacgagagcggcgaguucaagcuggccucccacauguacugcagcuucuacccccccgacgaggacgaggaggagggggacugcgaggaggaggaguucgagccguccacccaguacgaguacggcacggaggacgacuaccagggcaagccccucgaguucggggcgaccagcgccgcccugcagcccgaggaggagcaggaggaggacuggcuggacgacgacucccagcagaccgugggccagcaggacgggagcgaggacaaccagaccacgaccauccagaccaucguggagguccagccccagcucgagauggagcugaccccgguggugcagacgaucgaggucaacuccuucagcggcuaccugaagcucaccgacaacguguacaucaagaacgccgacaucguggaggaggcgaagaaggucaagcccaccgugguggucaacgccgccaacguguaccugaagcacgggggcggcguggccggggcccugaacaaggcgaccaacaacgccaugcaggucgaguccgacgacuacaucgccacgaacggcccccucaagguggggggcagcugcguccuguccggccacaaccuggccaagcacugccuccacgugguggggcccaacgucaacaagggcgaggacauccagcugcugaagagcgccuacgagaacuucaaccagcacgaggugcuccuggcgccgcugcucuccgccgggaucuucggcgccgaccccauccacagccugcgggugugcgucgacaucgugcgcaccaacguguaccuggccgucuucgacaagaaccucuacgacaagcugguguccagcuuccuggagaugaagagcgagaagcagguggagcagaagaucgccgagauccccaaggaggaggucaagcccuucaucaccgaguccaagccgagcguggagcagcggaagcaggacgacaagaagaucaaggcgugcguggaggaggucaccacgacccucgaggagaccaaguuccugaccgagaaccugcuccuguacaucgacaucaacgggaaccugcaccccgacuccgccacgcucgugagcgacaucgacaucaccuuccugaagaaggacgcccccuacaucgugggcgacgucgugcaggagggcgugcugaccgccgucgugauccccaccaagaaggccgggggcacgaccgagaugcucgcgaaggcccugcgcaaggugccgaccgacaacuacaucaccacguaccccgggcagggccugaacggguacaccgucgaggaggccaagaccgugcucaagaagugcaaguccgccuucuacauccugcccagcaucaucuccaacgagaagcaggagauccugggcaccgugagcuggaaccuccgggagaugcuggcgcacgccgaggagacccgcaagcugaugcccgucugcguggagacgaaggccaucguguccaccauccagcggaaguacaagggcaucaagauccaggagggggucguggacuacggcgcccgcuucuacuucuacaccagcaagaccacgguggccucccugaucaacacccucaacgaccugaacgagacccuggucaccaugccgcucggguacgugacgcacggccugaaccuggaggaggcggcccgguacaugcgcagccucaaggugcccgccaccgucuccgugagcucccccgacgccgugaccgccuacaacggguaccugaccagcuccagcaagacgcccgaggagcacuucaucgagaccaucucccuggcgggcagcuacaaggacuggagcuacuccggccagagcacccagcucgggaucgaguuccugaagcggggcgacaaguccgucuacuacaccagcaacccgacgaccuuccaccuggacggggaggugaucaccuucgacaaccucaagacccugcugucccuccgcgaggugcggacgaucaaggucuucaccaccguggacaacaucaaccugcacacccagguggucgacaugagcaugacguacggccagcaguucggccccaccuaccuggacggggccgacgugaccaagaucaagccccacaacucccacgagggcaagaccuucuacgugcucccgaacgacgacacgcugcgcgucgaggccuucgaguacuaccacaccaccgaccccagcuuccuggggcgguacauguccgcccucaaccacaccaagaaguggaaguacccccaggugaacggccugacgagcaucaagugggccgacaacaacugcuaccuggcgaccgcccuccugacccugcagcagaucgagcucaaguucaaccccccggcccugcaggacgccuacuaccgcgcgcgggccggggaggccgccaacuucugcgcccugauccucgcguacugcaacaagaccgugggcgagcugggcgacguccgcgagacgauguccuaccuguuccagcacgccaaccucgacagcugcaagcgggugcugaacgucgugugcaagaccugcgggcagcagcagaccacccugaagggcguggaggccgucauguacauggggacccucuccuacgagcaguucaagaagggcgugcagauccccugcacgugcgggaagcaggccaccaaguaccuggugcagcaggagagccccuucgucaugauguccgcccccccggcgcaguacgagcugaagcacggcaccuucaccugcgccagcgaguacacgggcaacuaccagugcgggcacuacaagcacaucaccuccaaggagacccucuacugcaucgacggcgcccugcugaccaagagcagcgaguacaaggggcccaucacggacguguucuacaaggagaacuccuacaccaccaccaucaagcccgugacguacaagcucgacggcgucgugugcaccgagaucgaccccaagcuggacaacuacuacaagaaggacaacagcuacuucaccgagcagccgaucgaccuggugcccaaccagcccuaccccaacgccuccuucgacaacuucaaguucgucugcgacaacaucaaguucgccgacgaccucaaccagcugaccggguacaagaagccggcgagccgcgagcugaaggugacguucuuccccgaccucaacggcgacguggucgccaucgacuacaagcacuacacccccuccuucaagaagggcgccaagcugcugcacaagcccaucguguggcacgugaacaacgccaccaacaaggcgaccuacaagccgaacacguggugcauccggugccucuggagcaccaagcccgucgagaccuccaacagcuucgacgugcugaaguccgaggacgcccaggggauggacaaccuggccugcgaggaccucaagcccgugagcgaggaggucguggagaaccccaccauccagaaggacgugcuggagugcaacgucaagacgaccgagguggugggcgacaucauccugaagccggccaacaacucccucaagaucaccgaggaggucgggcacaccgaccugauggccgcguacguggacaacagcucccugacgaucaagaagcccaacgagcucagccgcgugcugggccugaagacccucgccacccacgggcuggccgccgucaacuccgugcccugggacaccaucgccaacuacgcgaagccguuccugaacaagguggucagcacgaccaccaacaucgugacccgcugccucaaccgggugugcacgaacuacaugcccuacuucuucacccugcugcuccagcugugcaccuucacccgcuccaccaacagccggaucaaggccuccaugcccacgaccaucgccaagaacaccgucaagagcgugggcaaguucugccuggaggccagcuucaacuaccucaagucccccaacuucagcaagcugaucaacaucaucaucugguuccugcuccuguccgugugccugggcagccucaucuacuccaccgccgcgcuggggguccugaugagcaaccucggcaugccguccuacugcacgggguaccgcgagggcuaccugaacagcaccaacgugaccaucgccaccuacugcacgggcuccauccccugcagcgugugccuguccgggcucgacagccuggacaccuaccccucccuggagaccauccagaucaccaucagcuccuucaagugggaccucacggccuucggccuggucgccgagugguuccuggccuacauccucuucacccgguucuucuacgugcuggggcuggcggccaucaugcagcucuucuucagcuacuucgccgugcacuucaucuccaacagcuggcugauguggcugaucaucaaccugguccagauggcccccaucuccgcgauggugcgcauguacaucuucuucgccagcuucuacuacguguggaagagcuacguccacgugguggacggcugcaacuccagcaccugcaugaugugcuacaagcggaaccgcgccacccgggucgagugcacgaccaucgugaacgggguccgccgguccuucuacguguacgccaacggcggcaagggguucugcaagcuccacaacuggaacugcgugaacugcgacaccuucugcgccggcagcaccuucaucuccgacgaggucgcgcgcgaccugagccugcaguucaagcggccgaucaaccccacggaccaguccagcuacaucguggacuccgugaccgucaagaacgggagcauccaccucuacuucgacaaggccggccagaagaccuacgagcgccacucccugagccacuucgugaaccuggacaaccuccgggccaacaacaccaaggggucccugcccaucaacgugaucgucuucgacggcaagagcaagugcgaggaguccagcgccaaguccgccagcguguacuacucccagcugaugugccagcccauccuccugcuggaccaggcgcucgugagcgacgucggcgacagcgccgagguggccgugaagauguucgacgccuacgucaacacguucuccagcaccuucaacgugccgauggagaagcugaagacccugguggccaccgcggaggccgagcucgccaagaacgucucccuggacaacgugcugagcacguucaucuccgccgcgcgccagggguucguggacagcgacgucgagaccaaggacgugguggagugccucaagcugucccaccagagcgacaucgaggucaccggcgacuccugcaacaacuacaugcugaccuacaacaagguggagaacaugacgccccgggaccucggggccugcaucgacugcagcgcccgccacaucaacgcccagguggccaagucccacaacaucgcgcugaucuggaacgucaaggacuucaugagccuguccgagcagcuccggaagcagauccgcagcgccgccaagaagaacaaccugcccuucaagcugaccugcgccaccacccgccagguggugaacgucgugacgaccaagaucgcccucaagggcggguga

SEQ ID NO: 17768 - RNA, 5841 nt, Artificial Sequence
  SARS-CoV-2__MT831173.1__non-structural protein 3 (NSP3) CDS gc
auggcccccaccaaggugaccuucggcgacgacacggucaucgaggugcagggguacaagagcgugaacaucaccuucgagcuggacgagcgcaucgacaagguccucaacgagaagugcuccgccuacaccguggagcugggcaccgaggugaacgaguucgcgugcgucguggccgacgccgugaucaagacgcugcagccggucagcgagcuccugaccccccuggggaucgaccucgacgagugguccauggccaccuacuaccuguucgacgagagcggcgaguucaagcuggccucccacauguacugcagcuucuacccccccgacgaggacgaggaggagggggacugcgaggaggaggaguucgagccguccacccaguacgaguacggcacggaggacgacuaccagggcaagccccucgaguucggggcgaccagcgccgcccugcagcccgaggaggagcaggaggaggacuggcuggacgacgacucccagcagaccgugggccagcaggacgggagcgaggacaaccagaccacgaccauccagaccaucguggagguccagccccagcucgagauggagcugaccccgguggugcagacgaucgaggucaacuccuucagcggcuaccugaagcucaccgacaacguguacaucaagaacgccgacaucguggaggaggcgaagaaggucaagcccaccgugguggucaacgccgccaacguguaccugaagcacgggggcggcguggccggggcccugaacaaggcgaccaacaacgccaugcaggucgaguccgacgacuacaucgccacgaacggcccccucaagguggggggcagcugcguccuguccggccacaaccuggccaagcacugccuccacgugguggggcccaacgucaacaagggcgaggacauccagcugcugaagagcgccuacgagaacuucaaccagcacgaggugcuccuggcgccgcugcucuccgccgggaucuucggcgccgaccccauccacagccugcgggugugcgucgacaccgugcgcaccaacguguaccuggccgucuucgacaagaaccucuacgacaagcugguguccagcuuccuggagaugaagagcgagaagcagguggagcagaagaucgccgagauccccaaggaggaggucaagcccuucaucaccgaguccaagccgagcguggagcagcggaagcaggacgacaagaagaucaaggcgugcguggaggaggucacgaccacccucgaggagaccaaguuccugacggagaaccugcuccuguacaucgacaucaacgggaaccugcaccccgacuccgccacccucgugagcgacaucgacaucaccuuccugaagaaggacgcccccuacaucgugggcgacgucgugcaggagggcgugcugaccgccgucgugauccccacgaagaaggccgggggcaccaccgagaugcucgcgaaggcccugcgcaaggugccgaccgacaacuacaucacgaccuaccccgggcagggccugaacggguacaccgucgaggaggccaagaccgugcucaagaagugcaaguccgccuucuacauccugcccagcaucaucuccaacgagaagcaggagauccugggcaccgugagcuggaaccuccgggagaugcuggcgcacgccgaggagacgcgcaagcugaugcccgucugcguggagaccaaggccaucguguccaccauccagcggaaguacaagggcaucaagauccaggagggggucguggacuacggcgcccgcuucuacuucuacaccagcaagacgaccguggccucccugaucaacacccucaacgaccugaacgagacccuggucacgaugccgcucggguacgugacccacggccugaaccuggaggaggcggcccgguacaugcgcagccucaaggugcccgccaccgucuccgugagcucccccgacgccgugaccgccuacaacggguaccugacgagcuccagcaagacccccgaggagcacuucaucgagaccaucucccuggcgggcagcuacaaggacuggagcuacuccggccagagcacccagcucgggaucgaguuccugaagcggggcgacaaguccgucuacuacacgagcaacccgaccaccuuccaccuggacggggaggugaucaccuucgacaaccucaagacgcugcugucccuccgcgaggugcggaccaucaaggucuucaccaccguggacaacaucaaccugcacacgcagguggucgacaugagcaugaccuacggccagcaguucggccccaccuaccuggacggggccgacgugaccaagaucaagccccacaacucccacgagggcaagacguucuacgugcucccgaacgacgacacccugcgcgucgaggccuucgaguacuaccacaccaccgaccccagcuuccuggggcgguacauguccgcccucaaccacacgaagaaguggaaguacccccaggugaacggccugaccagcaucaagugggccgacaacaacugcuaccuggcgaccgcccuccugacccugcagcagaucgagcucaaguucaaccccccggcccugcaggacgccuacuaccgcgcgcgggccggggaggccgccaacuucugcgcccugauccucgcguacugcaacaagacggugggcgagcugggcgacguccgcgagaccauguccuaccuguuccagcacgccaaccucgacagcugcaagcgggugcugaacgucgugugcaagaccugcgggcagcagcagaccacccugaagggcguggaggccgucauguacauggggacgcucuccuacgagcaguucaagaagggcgugcagauccccugcaccugcgggaagcaggccaccaaguaccuggugcagcaggagagccccuucgucaugauguccgcccccccggcgcaguacgagcugaagcacggcaccuucacgugcgccagcgaguacaccggcaacuaccagugcgggcacuacaagcacaucaccuccaaggagacccucuacugcaucgacggcgcccugcugacgaagagcagcgaguacaaggggcccaucaccgacguguucuacaaggagaacuccuacaccaccacgaucaagcccgugaccuacaagcucgacggcgucgugugcaccgagaucgaccccaagcuggacaacuacuacaagaaggacaacagcuacuucaccgagcagccgaucgaccuggugcccaaccagcccuaccccaacgccuccuucgacaacuucaaguucgucugcgacaacaucaaguucgccgacgaccucaaccagcugacgggguacaagaagccggcgagccgcgagcugaaggugaccuucuuccccgaccucaacggcgacguggucgccaucgacuacaagcacuacacccccuccuucaagaagggcgccaagcugcugcacaagcccaucguguggcacgugaacaacgccaccaacaaggcgacguacaagccgaacaccuggugcauccggugccucuggagcaccaagcccgucgagaccuccaacagcuucgacgugcugaaguccgaggacgcccaggggauggacaaccuggccugcgaggaccucaagcccgugagcgaggaggucguggagaaccccacgauccagaaggacgugcuggagugcaacgucaagaccaccgagguggugggcgacaucauccugaagccggccaacaacucccucaagaucaccgaggaggucgggcacacggaccugauggccgcguacguggacaacagcucccugaccaucaagaagcccaacgagcucagccgcgugcugggccugaagacccucgccacccacgggcuggccgccgucaacuccgugcccugggacacgaucgccaacuacgcgaagccguuccugaacaagguggucagcaccaccaccaacaucgugacgcgcugccucaaccgggugugcaccaacuacaugcccuacuucuucacccugcugcuccagcugugcaccuucacccgcuccacgaacagccggaucaaggccuccaugcccaccaccaucgccaagaacaccgucaagagcgugggcaaguucugccuggaggccagcuucaacuaccucaagucccccaacuucagcaagcugaucaacaucaucaucugguuccugcuccuguccgugugccugggcagccucaucuacuccacggccgcgcuggggguccugaugagcaaccucggcaugccguccuacugcaccggguaccgcgagggcuaccugaacagcaccaacgugaccaucgccacguacugcaccggcuccauccccugcagcgugugccuguccgggcucgacagccuggacaccuaccccucccuggagaccauccagaucacgaucagcuccuucaagugggaccucaccgccuucggccuggucgccgagugguuccuggccuacauccucuucacccgguucuucuacgugcuggggcuggcggccaucaugcagcucuucuucagcuacuucgccgugcacuucaucuccaacagcuggcugauguggcugaucaucaaccugguccagauggcccccaucuccgcgauggugcgcauguacaucuucuucgccagcuucuacuacguguggaagagcuacguccacgugguggacggcugcaacuccagcaccugcaugaugugcuacaagcggaaccgcgccacgcgggucgagugcaccaccaucgugaacgggguccgccgguccuucuacguguacgccaacggcggcaagggguucugcaagcuccacaacuggaacugcgugaacugcgacaccuucugcgccggcagcacguucaucuccgacgaggucgcgcgcgaccugagccugcaguucaagcggccgaucaaccccaccgaccaguccagcuacaucguggacuccgugaccgucaagaacgggagcauccaccucuacuucgacaaggccggccagaagaccuacgagcgccacucccugagccacuucgugaaccuggacaaccuccgggccaacaacacgaaggggucccugcccaucaacgugaucgucuucgacggcaagagcaagugcgaggaguccagcgccaaguccgccagcguguacuacucccagcugaugugccagcccauccuccugcuggaccaggcgcucgugagcgacgucggcgacagcgccgagguggccgugaagauguucgacgccuacgucaacaccuucuccagcaccuucaacgugccgauggagaagcugaagacccugguggccacggcggaggccgagcucgccaagaacgucucccuggacaacgugcugagcaccuucaucuccgccgcgcgccagggguucguggacagcgacgucgagaccaaggacgugguggagugccucaagcugucccaccagagcgacaucgaggucaccggcgacuccugcaacaacuacaugcugacguacaacaagguggagaacaugaccccccgggaccucggggugugcaucgacugcagcgcccgccacaucaacgcccaggucgccaagucccacaacaucgcccugaucuggaacgugaaggacuucaugagccuguccgagcagcuccggaagcagauccgcagcgcggccaagaagaacaaccugcccuucaagcugaccugcgccaccacgcgccagguggucaacguggugaccaccaagaucgcccucaagggcggguga

SEQ ID NO: 17769 - RNA, 5841 nt, Artificial Sequence
  SARS-CoV-2__MT831177.1__non-structural protein 3 (NSP3) CDS gc
auggcccccaccaaggugaccuucggcgacgacacggucaucgaggugcagggguacaagagcgugaacaucaccuucgagcuggacgagcgcaucgacaagguccucaacgagaagugcuccgccuacaccguggagcugggcaccgaggugaacgaguucgcgugcgucguggccgacgccgugaucaagacgcugcagccggucagcgagcuccugaccccccuggggaucgaccucgacgagugguccauggccaccuacuaccuguucgacgagagcggcgaguucaagcuggccucccacauguacugcagcuucuacccccccgacgaggacgaggaggagggggacugcgaggaggaggaguucgagccguccacccaguacgaguacggcacggaggacgacuaccagggcaagccccucgaguucggggcgaccagcgccgcccugcagcccgaggaggagcaggaggaggacuggcuggacgacgacucccagcagaccgugggccagcaggacgggagcgaggacaaccagaccacgaccauccagaccaucguggagguccagccccagcucgagauggagcugaccccgguggugcagacgaucgaggucaacuccuucagcggcuaccugaagcucaccgacaacguguacaucaagaacgccgacaucguggaggaggcgaagaaggucaagcccaccgugguggucaacgccgccaacguguaccugaagcacgggggcggcguggccggggcccugaacaaggcgaccaacaacgccaugcaggucgaguccgacgacuacaucgugacgaacggcccccucaaggucgggggcagcugcgugcuguccggccacaaccuggccaagcacugccuccacguggucgggcccaacgugaacaagggcgaggacauccagcugcugaagagcgccuacgagaacuucaaccagcacgaggugcuccuggccccgcugcucuccgcggggaucuucggcgccgaccccauccacagccugcgggucugcguggacaccgugcgcaccaacgucuaccuggccguguucgacaagaaccucuacgacaagcugguguccagcuuccuggagaugaagagcgagaagcaggucgagcagaagaucgccgagauccccaaggaggaggugaagcccuucaucaccgaguccaagccgagcguggagcagcggaagcaggacgacaagaagaucaaggccugcgucgaggaggugacgaccacccucgaggagaccaaguuccugacggagaaccugcuccuguacaucgacaucaacgggaaccugcaccccgacuccgcgacccucgugagcgacaucgacaucaccuuccugaagaaggacgcccccuacaucgucggcgacguggugcaggagggcguccugaccgccguggugauccccacgaagaaggccgggggcaccaccgagaugcucgccaaggcgcugcgcaaggucccgaccgacaacuacaucacgaccuaccccgggcagggccugaacggguacaccguggaggaggccaagaccgugcucaagaagugcaaguccgccuucuacauccugcccagcaucaucuccaacgagaagcaggagauccugggcaccgucagcuggaaccuccgggagaugcuggcccacgcggaggagacgcgcaagcugaugcccgugugcguggagaccaaggccaucgucuccaccauccagcggaaguacaagggcaucaagauccaggagggggugguggacuacggcgcccgcuucuacuucuacaccagcaagacgaccgucgccucccugaucaacacccucaacgaccugaacgagacccuggugacgaugccgcucggguacgugacccacggccugaaccuggaggaggccgcgcgguacaugcgcagccucaagguccccgccaccguguccgugagcucccccgacgccgucaccgccuacaacggguaccugacgagcuccagcaagacccccgaggagcacuucaucgagaccaucucccuggccggcagcuacaaggacuggagcuacuccggccagagcacccagcucgggaucgaguuccugaagcggggcgacaaguccguguacuacacgagcaacccgaccaccuuccaccuggacggggaggugaucaccuucgacaaccucaagacgcugcugucccuccgcgagguccggaccaucaagguguucaccaccguggacaacaucaaccugcacacgcaggucguggacaugagcaugaccuacggccagcaguucggccccaccuaccuggacggggcggacgugaccaagaucaagccccacaacucccacgagggcaagacguucuacguccucccgaacgacgacacccugcgcguggaggccuucgaguacuaccacaccaccgaccccagcuuccuggggcgguacauguccgcccucaaccacacgaagaaguggaaguacccccaggugaacggccugaccagcaucaagugggccgacaacaacugcuaccuggccaccgcgcuccugacccugcagcagaucgagcucaaguucaaccccccggcccugcaggacgccuacuaccgcgcccgggcgggggaggccgccaacuucugcgcccugauccucgccuacugcaacaagacggucggcgagcugggcgacgugcgcgagaccauguccuaccuguuccagcacgcgaaccucgacagcugcaagcggguccugaacguggugugcaagaccugcgggcagcugcagaccacccucaagggcgucgaggccgugauguacauggggacgcuguccuacgagcaguucaagaagggcgugcagauccccugcaccugcgggaagcaggccaccaaguaccugguccagcaggagagccccuucgugaugauguccgcccccccggcccaguacgagcucaagcacggcaccuucacgugcgcgagcgaguacaccggcaacuaccagugcgggcacuacaagcacaucaccuccaaggagacccuguacugcaucgacggcgcccugcucacgaagagcagcgaguacaaggggcccaucaccgacguguucuacaaggagaacuccuacaccaccacgaucaagcccgucaccuacaagcuggacggcguggugugcaccgagaucgaccccaagcuggacaacuacuacaagaaggacaacagcuacuucaccgagcagccgaucgaccucguccccaaccagcccuaccccaacgccuccuucgacaacuucaaguucgugugcgacaacaucaaguucgccgacgaccugaaccagcugacgggguacaagaagccggccagccgcgagcucaaggugaccuucuuccccgaccugaacggcgacgucguggcgaucgacuacaagcacuacacccccuccuucaagaagggcgccaagcugcuccacaagcccaucguguggcacgucaacaacgccaccaacaaggccacguacaagccgaacaccuggugcauccggugccuguggagcaccaagcccguggagaccuccaacagcuucgacgugcugaaguccgaggacgcgcaggggauggacaaccucgccugcgaggaccugaagcccgucagcgaggaggugguggagaaccccacgauccagaaggacguccuggagugcaacgugaagaccaccgagguggucggcgacaucauccucaagccggccaacaacucccugaagaucaccgaggagguggggcacacggaccugauggccgccuacguggacaacagcucccucaccaucaagaagcccaacgagcugagccgcguccugggccucaagacccuggcgacccacgggcuggccgccgugaacuccgugcccugggacacgaucgccaacuacgccaagccguuccucaacaaggucgugagcaccaccaccaacaucgugacgcgcugccugaaccgggucugcaccaacuacaugcccuacuucuucacccugcuccugcagcugugcaccuucacccgcuccacgaacagccggaucaaggcguccaugcccaccaccaucgccaagaacaccgugaagagcgugggcaaguucugccucgaggccagcuucaacuaccugaagucccccaacuucagcaagcugaucaacaucaucaucugguuccuccugcuguccgucugccucggcagccugaucuacuccacggccgcccugggggugcucaugagcaaccugggcaugccguccuacugcaccggguaccgcgagggcuaccugaacagcaccaacgugaccaucgcgacguacugcaccggcuccauccccugcagcgucugccucuccgggcuggacagccuggacaccuaccccucccucgagaccauccagaucacgaucagcuccuucaagugggaccugaccgccuucggccugguggccgagugguuccucgccuacauccuguucacccgguucuucuacgugcuggggcucgccgcgaucaugcagcuguucuucagcuacuucgccguccacuucaucuccaacagcuggcugauguggcugaucaucaaccucgugcagauggcccccaucuccgccauggugcgcauguacaucuucuucgcgagcuucuacuacgucuggaagagcuacgugcacguggucgacggcugcaacuccagcaccugcaugaugugcuacaagcggaaccgcgccacgcggguggagugcaccaccaucgucaacggggugcgccgguccuucuacguguacgccaacggcggcaagggguucugcaagcugcacaacuggaacugcgucaacugcgacaccuucugcgccggcagcacguucaucuccgacgagguggcccgcgaccugagccuccaguucaagcggccgaucaaccccaccgaccaguccagcuacaucguggacuccgucaccgugaagaacgggagcauccaccuguacuucgacaaggcgggccagaagaccuacgagcgccacucccugagccacuucgugaaccucgacaaccugcgggccaacaacacgaaggggucccugcccaucaacgucaucguguucgacggcaagagcaagugcgaggaguccagcgccaaguccgccagcguguacuacucccagcucaugugccagcccauccugcugcucgaccaggcccuggucagcgacgugggcgacagcgcggagguggccgucaagauguucgacgccuacgugaacaccuucuccagcaccuucaacgugccgauggagaagcugaagacccucgucgccacggccgaggcggagcuggccaagaacgugucccuggacaacgugcucagcaccuucaucuccgccgcccgccagggguucgucgacagcgacguggagaccaaggacguggucgagugccugaagcugucccaccagagcgacaucgaggugaccggcgacuccugcaacaacuacaugcucacguacaacaagguggagaacaugaccccccgggaccugggggcgugcaucgacugcagcgcccgccacaucaacgcccaggucgccaagucccacaacaucgcccugaucuggaacgugaaggacuucaugagccucuccgagcagcugcggaagcagauccgcagcgcggccaagaagaacaaccugcccuucaagcucaccugcgccaccacgcgccagguggucaacguggugaccaccaagaucgcccugaagggcggguga

SEQ ID NO: 17770 - RNA, 5841 nt, Artificial Sequence
  SARS-CoV-2__MT831190.1__non-structural protein 3 (NSP3) CDS gc
auggcccccaccaaggugaccuucggcgacgacacggucaucgaggugcagggguacaagagcgugaacaucaccuucgagcuggacgagcgcaucgacaagguccucaacgagaagugcuccgccuacaccguggagcugggcaccgaggugaacgaguucgcgugcgucguggccgacgccgugaucaagacgcugcagccggucagcgagcuccugaccccccuggggaucgaccucgacgagugguccauggccaccuacuaccuguucgacgagagcggcgaguucaagcuggccucccacauguacugcagcuucuacccccccgacgaggacgaggaggagggggacugcgaggaggaggaguucgagccguccacccaguacgaguacggcacggaggacgacuaccagggcaagccccucgaguucggggcgaccagcgccgcccugcagcccgaggaggagcaggaggaggacuggcuggacgacgacucccagcagaccgugggccagcaggacgggagcgaggacaaccagaccacgaccauccagaccaucguggagguccagccccagcucgagauggagcugaccccgguggugcagacgaucgaggucaacuccuucagcggcuaccugaagcucaccgacaacguguacaucaagaacgccgacaucguggaggaggcgaagaaggucaagcccaccgugguggucaacgccgccaacguguaccugaagcacgggggcggcguggccggggcccugaacaaggcgaccaacaacgccaugcaggucgaguccgacgacuacaucgccacgaacggcccccucaagguggggggcagcugcguccuguccggccacaaccuggccaagcacugccuccacgugguggggcccaacgucaacaagggcgaggacauccagcugcugaagagcgccuacgagaacuucaaccagcacgaggugcuccuggcgccgcugcucuccgccgggaucuucggcgccgaccccauccacagccugcgggugugcgucgacaccgugcgcaccaacguguaccuggccgucuucgacaagaaccucuacgacaagcugguguccagcuuccuggagaugaagagcgagaagcagguggagcagaagaucgccgagauccccaaggaggaggucaagcccuucaucaccgaguccaagccgagcguggagcagcggaagcaggacgacaagaagaucaaggcgugcguggaggaggucacgaccacccucgaggagaccaaguuccugacggagaaccugcuccuguacaucgacaucaacgggaaccugcaccccgacuccgccacccucgugagcgacaucgacaucaccuuccugaagaaggacgcccccuacaucgugggcgacgucgugcaggagggcgugcugaccgccgucgugauccccacgaagaaggccgggggcaccaccgagaugcucgcgaaggcccugcgcaaggugccgaccgacaacuacaucacgaccuaccccgggcagggccugaacggguacaccgucgaggaggccaagaccgugcucaagaagugcaaguccgccuucuacauccugcccagcaucaucuccaacgagaagcaggagauccugggcaccgugagcuggaaccuccgggagaugcuggcgcacgccgaggagacgcgcaagcugaugcccgucugcguggagaccaaggccaucguguccaccauccagcggaaguacaagggcaucaagauccaggagggggucguggacuacggcgcccgcuucuacuucuacaccagcaagacgaccguggccucccugaucaacacccucaacgaccugaacgagacccuggucacgaugccgcucggguacgugacccacggccugaaccuggaggaggcggcccgguacaugcgcagccucaaggugcccgccaccgucuccgugagcucccccgacgccgugaccgccuacaacggguaccugacgagcuccagcaagacccccgaggagcacuucaucgagaccaucucccuggcgggcagcuacaaggacuggagcuacuccggccagagcacccagcucgggaucgaguuccugaagcggggcgacaaguccgucuacuacacgagcaacccgaccaccuuccaccuggacggggaggugaucaccuucgacaaccucaagacgcugcugucccuccgcgaggugcggaccaucaaggucuucaccaccguggacaacaucaaccugcacacgcagguggucgacaugagcaugaccuacggccagcaguucggccccaccuaccuggacggggccgacgugaccaagaucaagccccacaacucccacgagggcaagacguucuacgugcucccgaacgacgacacccugcgcgucgaggccuucgaguacuaccacaccaccgaccccagcuuccuggggcgguacauguccgcccucaaccacacgaagaaguggaaguacccccaggugaacggccugaccagcaucaagugggccgacaacaacugcuaccuggcgaccgcccuccugacccugcagcagaucgagcucaaguucaaccccccggcccugcaggacgccuacuaccgcgcgcgggccggggaggccgccaacuucugcgcccugauccucgcguacugcaacaagacggugggcgagcugggcgacguccgcgagaccauguccuaccuguuccagcacgccaaccucgacagcugcaagcgggugcugaacgucgugugcaagaccugcgggcagcagcagaccacccugaagggcguggaggccgucauguacauggggacgcucuccuacgagcaguucaagaagggcgugcagauccccugcaccugcgggaagcaggccaccaaguaccuggugcagcaggagagccccuucgucaugauguccgcccccccggcgcaguacgagcugaagcacggcaccuucacgugcgccagcgaguacaccggcaacuaccagugcgggcacuacaagcacaucaccuccaaggagacccucuacugcaucgacggcgcccugcugacgaagagcagcgaguacaaggggcccaucaccgacguguucuacaaggagaacuccuacaccaccacgaucaagcccgugaccuacaagcucgacggcgucgugugcaccgagaucgaccccaagcuggacaacuacuacaagaaggacaacagcuacuucaccgagcagccgaucgaccuggugcccaaccagcccuaccccaacgccuccuucgacaacuucaaguucgucugcgacaacaucaaguucgccgacgaccucaaccagcugacgggguacaagaagccggcgagccgcgagcugaaggugaccuucuuccccgaccucaacggcgacguggucgccaucgacuacaagcacuacacccccuccuucaagaagggcgccaagcugcugcacaagcccaucguguggcacgugaacaacgccaccaacaaggcgacguacaagccgaacaccuggugcauccggugccucuggagcaccaagcccgucgagacccccaacuccuucgacgugcugaagagcgaggacgcccaggggauggacaaccuggccugcgaggaccucaagcccguguccgaggaggucguggagaacccgacgauccagaaggacgugcuggagugcaacgucaagaccaccgagguggugggcgacaucauccugaagcccgccaacaacagccucaagaucaccgaggaggucgggcacacggaccugauggccgcguacguggacaacuccagccugaccaucaagaagcccaacgagcucucccgcgugcugggccugaagacccucgccacccacgggcuggccgccgucaacagcgugccgugggacacgaucgccaacuacgcgaagcccuuccugaacaagguggucuccaccaccaccaacaucgugacgcgcugccucaaccgggugugcaccaacuacaugcccuacuucuucacccugcugcuccagcugugcaccuucacccgcagcacgaacucccggaucaaggccagcaugcccaccaccaucgccaagaacaccgucaaguccgugggcaaguucugccuggaggccagcuucaacuaccucaagagcccgaacuucuccaagcugaucaacaucaucaucugguuccugcuccugagcgugugccugggcucccucaucuacagcacggccgcgcuggggguccugauguccaaccucggcaugcccagcuacugcaccggguaccgcgagggcuaccugaacuccaccaacgugaccaucgccacguacugcaccggcagcauccccugcuccgugugccugagcgggcucgacucccuggacaccuaccccagccuggagaccauccagaucacgaucuccagcuucaagugggaccucaccgccuucggccuggucgccgagugguuccuggccuacauccucuucacccgguucuucuacgugcuggggcuggcggccaucaugcagcucuucuucuccuacuucgccgugcacuucaucagcaacuccuggcugauguggcugaucaucaaccugguccagauggccccgaucagcgcgauggugcgcauguacaucuucuucgccuccuucuacuacguguggaagagcuacguccacgugguggacggcugcaacagcuccaccugcaugaugugcuacaagcggaaccgcgccacgcgggucgagugcaccaccaucgugaacgggguccgccggagcuucuacguguacgccaacggcggcaagggguucugcaagcuccacaacuggaacugcgugaacugcgacaccuucugcgccggcuccacguucaucagcgacgaggucgcgcgcgaccugucccugcaguucaagcggcccaucaaccccaccgaccagagcuccuacaucguggacagcgugaccgucaagaacggguccauccaccucuacuucgacaaggccggccagaagaccuacgagcgccacagccugucccacuucgugaaccuggacaaccuccgggccaacaacacgaaggggagccugcccaucaacgugaucgucuucgacggcaaguccaagugcgaggagagcuccgccaagagcgccuccguguacuacagccagcugaugugccagccgauccuccugcuggaccaggcgcucguguccgacgucggcgacagcgccgagguggccgugaagauguucgacgccuacgucaacaccuucagcuccaccuucaacgugcccauggagaagcugaagacccugguggccacggcggaggccgagcucgccaagaacgucagccuggacaacgugcuguccaccuucaucagcgccgcgcgccagggguucguggacuccgacgucgagaccaaggacgugguggagugccucaagcugagccaccaguccgacaucgaggucaccggcgacagcugcaacaacuacaugcugacguacaacaagguggagaacaugaccccccgggaccucggggccugcaucgacugcuccgcccgccacaucaacgcccagguggccaagagccacaacaucgcgcugaucuggaacgucaaggacuucaugucccugagcgagcagcuccggaagcagauccgcuccgccgccaagaagaacaaccugcccuucaagcugaccugcgccaccacgcgccagguggugaacgucgugaccaccaagaucgcccucaagggcggguga

SEQ ID NO: 17771 - RNA, 5841 nt, Artificial Sequence
  SARS-CoV-2__MT831198.1__non-structural protein 3 (NSP3) CDS gc
auggcccccaccaaggugaccuucggcgacgacacggucaucgaggugcagggguacaagagcgugaacaucaccuucgagcuggacgagcgcaucgacaagguccucaacgagaagugcuccgccuacaccguggagcugggcaccgaggugaacgaguucgcgugcgucguggccgacgccgugaucaagacgcugcagccggucagcgagcuccugaccccccuggggaucgaccucgacgagugguccauggccaccuacuaccuguucgacgagagcggcgaguucaagcuggccucccacauguacugcagcuucuacccccccgacgaggacgaggaggagggggacugcgaggaggaggaguucgagccguccacccaguacgaguacggcacggaggacgacuaccagggcaagccccucgaguucggggcgaccagcgccgcccugcagcccgaggaggagcaggaggaggacuggcuggacgacgacucccagcagaccguggugcagcaggacggcagcgaggacaaccagaccacgaccauccagaccaucgucgaggugcagccccagcucgagauggagcugaccccggugguccagacgaucgaggugaacuccuucagcggguaccugaagcucaccgacaacguguacaucaagaacgccgacaucgucgaggaggcgaagaaggugaagcccaccguggucgugaacgccgccaacguguaccugaagcacggcgggggcgucgccggcgcccugaacaaggcgaccaacaacgccaugcagguggaguccgacgacuacaucgccacgaacgggccccucaaggucggcgggagcugcgugcuguccggccacaaccuggccaagcacugccuccacguggucggccccaacgugaacaagggggaggacauccagcugcugaagagcgccuacgagaacuucaaccagcacgaggugcuccuggcgccgcugcucuccgccggcaucuucggggccgaccccauccacagccugcgggucugcguggacaccgugcgcaccaacgucuaccuggccguguucgacaagaaccucuacgacaagcugguguccagcuuccuggagaugaagagcgagaagcaggucgagcagaagaucgccgagauccccaaggaggaggugaagcccuucaucaccgaguccaagccgagcguggagcagcggaagcaggacgacaagaagaucaaggcgugcgucgaggaggugacgaccacccucgaggagaccaaguuccugacggagaaccugcuccuguacaucgacaucaacggcaaccugcaccccgacuccgccacccucgugagcgacaucgacaucaccuuccugaagaaggacgcccccuacaucgucggggacguggugcaggagggcguccugaccgccguggugauccccacgaagaaggccggcgggaccaccgagaugcucgcgaaggcccugcgcaaggucccgaccgacaacuacaucacgaccuaccccggccaggggcugaacggcuacaccguggaggaggccaagaccgugcucaagaagugcaaguccgccuucuacauccugcccagcaucaucuccaacgagaagcaggagauccuggggaccgucagcuggaaccuccgggagaugcuggcgcacgccgaggagacgcgcaagcugaugcccgugugcguggagaccaaggccaucgucuccaccauccagcggaaguacaagggcaucaagauccaggagggcgugguggacuacggggcccgcuucuacuucuacaccagcaagacgaccgucgccucccugaucaacacccucaacgaccugaacgagacccuggugacgaugccgcucggcuacgugacccacgggcugaaccuggaggaggcggcccgguacaugcgcagccucaagguccccgccaccguguccgugagcucccccgacgccgucaccgccuacaacggcuaccugacgagcuccagcaagacccccgaggagcacuucaucgagaccaucucccuggcggggagcuacaaggacuggagcuacuccggccagagcacccagcucggcaucgaguuccugaagcggggggacaaguccguguacuacacgagcaacccgaccaccuuccaccuggacggcgaggugaucaccuucgacaaccucaagacgcugcugucccuccgcgagguccggaccaucaagguguucaccaccguggacaacaucaaccugcacacgcaggucguggacaugagcaugaccuacgggcagcaguucggccccaccuaccuggacggcgccgacgugaccaagaucaagccccacaacucccacgaggggaagacguucuacguccucccgaacgacgacacccugcgcguggaggccuucgaguacuaccacaccaccgaccccagcuuccugggccgguacauguccgcccucaaccacacgaagaaguggaaguacccccaggugaacgggcugaccagcaucaagugggccgacaacaacugcuaccuggcgaccgcccuccugacccugcagcagaucgagcucaaguucaaccccccggcccugcaggacgccuacuaccgcgcgcgggccggcgaggccgccaacuucugcgcccugauccucgcguacugcaacaagacggucggggagcugggcgacgugcgcgagaccauguccuaccuguuccagcacgccaaccucgacagcugcaagcggguccugaacguggugugcaagaccugcggccagcagcagaccacccugaagggggucgaggccgugauguacaugggcacgcucuccuacgagcaguucaagaagggggugcagauccccugcaccugcggcaagcaggccaccaaguaccugguccagcaggagagccccuucgugaugauguccgcccccccggcgcaguacgagcugaagcacgggaccuucacgugcgccagcgaguacaccggcaacuaccagugcggccacuacaagcacaucaccuccaaggagacccucuacugcaucgacggggcccugcugacgaagagcagcgaguacaagggccccaucaccgacguguucuacaaggagaacuccuacaccaccacgaucaagcccgucaccuacaagcucgacgggguggugugcaccgagaucgaccccaagcuggacaacuacuacaagaaggacaacagcuacuucaccgagcagccgaucgaccugguccccaaccagcccuaccccaacgccuccuucgacaacuucaaguucgugugcgacaacaucaaguucgccgacgaccucaaccagcugacgggcuacaagaagccggcgagccgcgagcugaaggugaccuucuuccccgaccucaacggggacgucguggccaucgacuacaagcacuacacccccuccuucaagaagggcgccaagcugcugcacaagcccaucguguggcacgucaacaacgccaccaacaaggcgacguacaagccgaacaccuggugcauccggugccucuggagcaccaagcccguggagaccuccaacagcuucgacgugcugaaguccgaggacgcccagggcauggacaaccuggccugcgaggaccucaagcccgucagcgaggaggugguggagaaccccacgauccagaaggacguccuggagugcaacgugaagaccaccgagguggucggggacaucauccugaagccggccaacaacucccucaagaucaccgaggaggugggccacacggaccugauggccgcguacguggacaacagcucccugaccaucaagaagcccaacgagcucagccgcguccuggggcugaagacccucgccacccacggccuggccgccgugaacuccgugcccugggacacgaucgccaacuacgcgaagccguuccugaacaaggucgugagcaccaccaccaacaucgugacgcgcugccucaaccgggucugcaccaacuacaugcccuacuucuucacccugcugcuccagcugugcaccuucacccgcuccacgaacagccggaucaaggccuccaugcccaccaccaucgccaagaacaccgugaagagcguggggaaguucugccuggaggccagcuucaacuaccucaagucccccaacuucagcaagcugaucaacaucaucaucugguuccugcuccuguccgucugccugggcagccucaucuacuccacggccgcgcugggcgugcugaugagcaaccucgggaugccguccuacugcaccggcuaccgcgagggguaccugaacagcaccaacgugaccaucgccacguacugcaccggcuccauccccugcagcgucugccuguccggccucgacagccuggacaccuaccccucccuggagaccauccagaucacgaucagcuccuucaagugggaccucaccgccuucgggcugguggccgagugguuccuggccuacauccucuucacccgguucuucuacgugcugggccuggcggccaucaugcagcucuucuucagcuacuucgccguccacuucaucuccaacagcuggcugauguggcugaucaucaaccuggugcagauggcccccaucuccgcgauggugcgcauguacaucuucuucgccagcuucuacuacgucuggaagagcuacgugcacguggucgacgggugcaacuccagcaccugcaugaugugcuacaagcggaaccgcgccacgcggguggagugcaccaccaucgucaacggcgugcgccgguccuucuacguguacgccaacgggggcaagggcuucugcaagcuccacaacuggaacugcgucaacugcgacaccuucugcgccgggagcacguucaucuccgacgagguggcgcgcgaccugagccugcaguucaagcggccgaucaaccccaccgaccaguccagcuacaucguggacuccgucaccgugaagaacggcagcauccaccucuacuucgacaaggccgggcagaagaccuacgagcgccacucccugagccacuucgugaaccuggacaaccuccgggccaacaacacgaagggcucccugcccaucaacgucaucguguucgacgggaagagcaagugcgaggaguccagcgccaaguccgccagcguguacuacucccagcugaugugccagcccauccuccugcuggaccaggcgcucgucagcgacgugggcgacagcgccgagguggccgucaagauguucgacgccuacgugaacaccuucuccagcaccuucaacaucccgauggagaagcugaagacccugguggccacggcggaggccgagcucgccaagaacgucucccuggacaacgugcugagcaccuucaucuccgccgcgcgccagggcuucguggacagcgacgucgagaccaaggacgugguggagugccucaagcugucccaccagagcgacaucgaggucaccggggacuccugcaacaacuacaugcugacguacaacaagguggagaacaugaccccccgggaccucggcgccugcaucgacugcagcgcccgccacaucaacgcccagguggccaagucccacaacaucgcgcugaucuggaacgucaaggacuucaugagccuguccgagcagcuccggaagcagauccgcagcgccgccaagaagaacaaccugcccuucaagcugaccugcgccaccacgcgccagguggugaacgucgugaccaccaagaucgcccucaaggggggcuga

SEQ ID NO: 17772 - RNA, 5841 nt, Artificial Sequence
  SARS-CoV-2__MT831202.1__non-structural protein 3 (NSP3) CDS gc
auggcccccaccaaggugaccuucggcgacgacacggucaucgaggugcagggguacaagagcgugaacaucaccuucgagcuggacgagcgcaucgacaagguccucaacgagaagugcuccgccuacaccguggagcugggcaccgaggugaacgaguucgcgugcgucguggccgacgccgugaucaagacgcugcagccggucagcgagcuccugaccccccuggggaucgaccucgacgagugguccauggccaccuacuaccuguucgacgagagcggcgaguucaagcuggccucccacauguacugcagcuucuacccccccgacgaggacgaggaggagggggacugcgaggaggaggaguucgagccguccacccaguacgaguacggcacggaggacgacuaccagggcaagccccucgaguucggggcgaccagcgccgcccugcagcccgaggaggagcaggaggaggacuggcuggacgacgacucccagcagaccgugggccagcaggacgggagcgaggacaaccagaccacgaccauccagaccaucguggagguccagccccagcucgagauggagcugaccccgguggugcagacgaucgaggucaacuccuucagcggcuaccugaagcucaccgacaacguguacaucaagaacgccgacaucguggaggaggcgaagaaggucaagcccaccgugguggucaacgccgccaacguguaccugaagcacgggggcggcguggccggggcccugaacaaggcgaccaacaacgccaugcaggucgaguccgacgacuacaucgccacgaacggcccccucaagguggggggcagcugcguccuguccggccacaaccuggccaagcacugccuccacgugguggggcccaacgucaacaagggcgaggacauccagcugcugaagagcgccuacgagaacuucaaccagcacgaggugcuccuggcgccgcugcucuccgccgggaucuucggcgccgaccccauccacagccugcgggugugcgucgacaccgugcgcaccaacguguaccuggccgucuucgacaagaaccucuacgacaagcugguguccagcuuccuggagaugaagagcgagaagcagguggagcagaagaucgccgagauccccaaggaggaggucaagcccuucaucaccgaguccaagccgagcguggagcagcggaagcaggacgacaagaagaucaaggcgugcguggaggaggucacgaccacccucgaggagaccaaguuccugacggagaaccugcuccuguacaucgacaucaacgggaaccugcaccccgacuccgccacccucgugagcgacaucgacaucaccuuccugaagaaggacgcccccuacaucgugggcgacgucgugcaggagggcgugcugaccgccgucgugauccccacgaagaaggccgggggcaccaccgagaugcucgcgaaggcccugcgcaaggugccgaccgacaacuacaucacgaccuaccccgggcagggccugaacggguacaccgucgaggaggccaagaccgugcucaagaagugcaaguccgccuucuacauccugcccagcaucaucuccaacgagaagcaggagauccugggcaccgugagcuggaaccuccgggagaugcuggcgcacgccgaggagacgcgcaagcugaugcccgucugcguggagaccaaggccaucguguccaccauccagcggaaguacaagggcaucaagauccaggagggggucguggacuacggcgcccgcuucuacuucuacaccagcaagacgaccguggccucccugaucaacacccucaacgaccugaacgagacccuggucacgaugccgcucggguacgugacccacggccugaaccuggaggaggcggcccgguacaugcgcagccucaaggugcccgccaccgucuccgugagcucccccgacgccgugaccgccuacaacggguaccugacgagcuccagcaagacccccgaggagcacuucaucgagaccaucucccuggcgggcagcuacaaggacuggagcuacuccggccagagcacccagcucgggaucgaguuccugaagcggggcgacaaguccgucuacuacacgagcaacccgaccaccuuccaccuggacggggaggugaucaccuucgacaaccucaagacgcugcugucccuccgcgaggugcggaccaucaaggucuucaccaccguggacaacaucaaccugcacacgcagguggucgacaugagcaugaccuacggccagcaguucggccccaccuaccuggacggggccgacgugaccaagaucaagccccacaacucccacgagggcaagacguucuacgugcucccgaacgacgacacccugcgcgucgaggccuucgaguacuaccacaccaccgaccccagcuuccuggggcgguacauguccgcccucaaccacacgaagaaguggaaguacccccaggugaacggccugaccagcaucaagugggccgacaacaacugcuaccuggcgaccgcccuccugacccugcagcagaucgagcucaaguucaaccccccggcccugcaggacgccuacuaccgcgcgcgggccggggaggccgccaacuucugcgcccugauccucgcguacugcaacaagacggugggcgagcugggcgacguccgcgagaccauguccuaccuguuccagcacgccaaccucgacagcugcaagcgggugcugaacgucgugugcaagaccugcgggcagcagcagaccacccugaagggcguggaggccgucauguacauggggacgcucuccuacgagcaguucaagaagggcgugcagauccccugcaccugcgggaagcaggccaccaaguaccuggugcagcaggagagccccuucgucaugauguccgcccccccggcgcaguacgagcugaagcacggcaccuucacgugcgccagcgaguacaccggcaacuaccagugcgggcacuacaagcacaucaccuccaaggagacccucuacugcaucgacggcgcccugcugacgaagagcagcgaguacaaggggcccaucaccgacguguucuacaaggagaacuccuacaccaccacgaucaagcccgugaccuacaagcucgacggcgucgugugcaccgagaucgaccccaagcuggacaacuacuacaagaaggacaacagcuacuucaccgagcagccgaucgaccuggugcccaaccagcccuaccccaacgccuccuucgacaacuucaaguucgucugcgacaacaucaaguucgccgacgaccucaaccagcugacgggguacaagaagccggcgagccgcgagcugaaggugaccuucuuccccgaccucaacggcgacguggucgccaucgacuacaagcacuacacccccuccuucaagaagggcgccaagcugcugcacaagcccaucguguggcacgugaacaacgccaccaacaaggcgacguacaagccgaacaccuggugcauccggugccucuggagcaccaagcccgucgagaccuccaacagcuucgacgugcugaaguccgaggacgcccaggggauggacaaccuggccugcgaggaccucaagcccgugagcgaggaggucguggagaaccccacgauccagaaggacgugcuggagugcaacgucaagaccaccgagguggugggcgacaucauccugaagccggccaacaacucccucaagaucaccgaggaggucgggcacacggaccugauggccgcguacguggacaacuucagccugaccaucaagaagcccaacgagcucucccgcgugcugggccugaagacccucgccacccacgggcuggccgccgucaacagcgugcccugggacacgaucgccaacuacgcgaagccguuccugaacaagguggucuccaccaccaccaacaucgugacgcgcugccucaaccgggugugcaccaacuacaugcccuacuucuucacccugcugcuccagcugugcaccuucacccgcagcacgaacucccggaucaaggccagcaugcccaccaccaucgccaagaacaccgucaaguccgugggcaaguucugccuggaggccagcuucaacuaccucaagagccccaacuucuccaagcugaucaacaucaucaucugguuccugcuccugagcgugugccugggcucccucaucuacagcacggccgcgcuggggguccugauguccaaccucggcaugccgagcuacugcaccggguaccgcgagggcuaccugaacuccaccaacgugaccaucgccacguacugcaccggcagcauccccugcuccgugugccugagcgggcucgacucccuggacaccuaccccagccuggagaccauccagaucacgaucuccagcuucaagugggaccucaccgccuucggccuggucgccgagugguuccuggccuacauccucuucacccgguucuucuacgugcuggggcuggcggccaucaugcagcucuucuucuccuacuucgccgugcacuucaucagcaacuccuggcugauguggcugaucaucaaccugguccagauggcccccaucagcgcgauggugcgcauguacaucuucuucgccuccuucuacuacguguggaagagcuacguccacgugguggacggcugcaacagcuccaccugcaugaugugcuacaagcggaaccgcgccacgcgggucgagugcaccaccaucgugaacgggguccgccggagcuucuacguguacgccaacggcggcaagggguucugcaagcuccacaacuggaacugcgugaacugcgacaccuucugcgccggcuccacguucaucagcgacgaggucgcgcgcgaccugucccugcaguucaagcggccgaucaaccccaccgaccagagcuccuacaucguggacagcgugaccgucaagaacggguccauccaccucuacuucgacaaggccggccagaagaccuacgagcgccacagccugucccacuucgugaaccuggacaaccuccgggccaacaacacgaaggggagccugcccaucaacgugaucgucuucgacggcaaguccaagugcgaggagagcuccgccaagagcgccuccguguacuacagccagcugaugugccagcccauccuccugcuggaccaggcgcucguguccgacgucggcgacagcgccgagguggccgugaagauguucgacgccuacgucaacaccuucagcuccaccuucaacgugccgauggagaagcugaagacccugguggccacggcggaggccgagcucgccaagaacgucagccuggacaacgugcuguccaccuucaucagcgccgcgcgccagggguucguggacuccgacgucgagaccaaggacgugguggagugccucaagcugagccaccaguccgacaucgaggucaccggcgacagcugcaacaacuacaugcugacguacaacaagguggagaacaugaccccccgggaccucggggccugcaucgacugcuccgcccgccacaucaacgcccagguggccaagagccacaacaucgcgcugaucuggaacgucaaggacuucaugucccugagcgagcagcuccggaagcagauccgcuccgccgccaagaagaacaaccugcccuucaagcugaccugcgccaccacgcgccagguggugaacgucgugaccaccaagaucgcccucaagggcggguga

SEQ ID NO: 17773 - RNA, 5841 nt, Artificial Sequence
  SARS-CoV-2__MT831205.1__non-structural protein 3 (NSP3) CDS gc
auggcccccaccaaggugaccuucggcgacgacacggucaucgaggugcagggguacaagagcgugaacaucaccuucgagcuggacgagcgcaucgacaagguccucaacgagaagugcuccgccuacaccguggagcugggcaccgaggugaacgaguucgcgugcgucguggccgacgccgugaucaagacgcugcagccggucagcgagcuccugaccccccuggggaucgaccucgacgagugguccauggccaccuacuaccuguucgacgagagcggcgaguucaagcuggccucccacauguacugcagcuucuacccccccgacgaggacgaggaggagggggacugcgaggaggaggaguucgagccguccacccaguacgaguacggcacggaggacgacuaccagggcaagccccucgaguucggggcgaccagcgccgcccugcagcccgaggaggagcaggaggaggacuggcuggacgacgacucccagcagaccgugggccagcaggacgggagcgaggacaaccagaccacgaccauccagaccaucguggagguccagccccagcucgagauggagcugaccccgguggugcagacgaucgaggucaacuccuucagcggcuaccugaagcucaccgacaacguguacaucaagaacgccgacaucguggaggaggcgaagaaggucaagcccaccgugguggucaacgccgccaacguguaccugaagcacgggggcggcguggccggggcccugaacaaggcgaccaacaacgccaugcaggucgaguccgacgacuacaucgccacgaacggcccccucaagguggggggcagcugcguccuguccggccacaaccuggccaagcacugccuccacgugguggggcccaacgucaacaagggcgaggacauccagcugcugaagagcgccuacgagaacuucaaccagcacgaggugcuccuggcgccgcugcucuccgccgggaucuucggcgccgaccccauccacagccugcgggugugcgucgacaccgugcgcaccaacguguaccuggccgucuucgacaagaaccucuacgacaagcugguguccagcuuccuggagaugaagagcgagaagcagguggagcagaagaucgccgagauccccaaggaggaggucaagcccuucaucaccgaguccaagccgagcguggagcagcggaagcaggacgacaagaagaucaaggcgugcguggaggaggucacgaccacccucgaggagaccaaguuccugacggagaaccugcuccuguacaucgacaucaacgggaaccugcaccccgacuccgccacccucgugagcgacaucgacaucaccuuccugaagaaggacgcccccuacaucgugggcgacgucgugcaggagggcgugcugaccgccgucgugauccccacgaagaaggccgggggcaccaccgagaugcucgcgaaggcccugcgcaaggugccgaccgacaacuacaucacgaccuaccccgggcagggccugaacggguacaccgucgaggaggccaagaccgugcucaagaagugcaaguccgccuucuacauccugcccagcaucaucuccaacgagaagcaggagauccugggcaccgugagcuggaaccuccgggagaugcuggcgcacgccgaggagacgcgcaagcugaugcccgucugcguggagaccaaggccaucguguccaccauccagcggaaguacaagggcaucaagauccaggagggggucguggacuacggcgcccgcuucuacuucuacaccagcaagacgaccguggccucccugaucaacacccucaacgaccugaacgagacccuggucacgaugccgcucggguacgugacccacggccugaaccuggaggaggcggcccgguacaugcgcagccucaaggugcccgccaccgucuccgugagcucccccgacgccgugaccgccuacaacggguaccugacgagcuccagcaagacccccgaggagcacuucaucgagaccaucucccuggcgggcagcuacaaggacuggagcuacuccggccagagcacccagcucgggaucgaguuccugaagcggggcgacaaguccgucuacuacacgagcaacccgaccaccuuccaccuggacggggaggugaucaccuucgacaaccucaagacgcugcugucccuccgcgaggugcggaccaucaaggucuucaccaccguggacaacaucaaccugcacacgcagguggucgacaugagcaugaccuacggccagcaguucggccccaccuaccuggacggggccgacgugaccaagaucaagccccacaacucccacgagggcaagacguucuacgugcucccgaacgacgacacccugcgcgucgaggccuucgaguacuaccacaccaccaaccccagcuuccuggggcgguacauguccgcccucaaccacacgaagaaguggaaguacccccaggugaacggccugaccagcaucaagugggccgacaacaacugcuaccuggcgaccgcccuccugacccugcagcagaucgagcucaaguucaaccccccggcccugcaggacgccuacuaccgcgcgcgggccggggaggccgccaacuucugcgcccugauccucgcguacugcaacaagacggugggcgagcugggcgacguccgcgagaccauguccuaccuguuccagcacgccaaccucgacagcugcaagcgggugcugaacgucgugugcaagaccugcgggcagcagcagaccacccugaagggcguggaggccgucauguacauggggacgcucuccuacgagcaguucaagaagggcgugcagauccccugcaccugcgggaagcaggccaccaaguaccuggugcagcaggagagccccuucgucaugauguccgcccccccggcgcaguacgagcugaagcacggcaccuucacgugcgccagcgaguacaccggcaacuaccagugcgggcacuacaagcacaucaccuccaaggagacccucuacugcaucgacggcgcccugcugacgaagagcagcgaguacaaggggcccaucaccgacguguucuacaaggagaacuccuacaccaccacgaucaagcccgugaccuacaagcucgacggcgucgugugcaccgagaucgaccccaagcuggacaacuacuacaagaaggacaacagcuacuucaccgagcagccgaucgaccuggugcccaaccagcccuaccccaacgccuccuucgacaacuucaaguucgucugcgacaacaucaaguucgccgacgaccucaaccagcugacgggguacaagaagccggcgagccgcgagcugaaggugaccuucuuccccgaccucaacggcgacguggucgccaucgacuacaagcacuacacccccuccuucaagaagggcgccaagcugcugcacaagcccaucguguggcacgugaacaacgccaccaacaaggcgacguacaagccgaacaccuggugcauccggugccucuggagcaccaagcccgucgagaccuccaacagcuucgacgugcugaaguccgaggacgcccaggggauggacaaccuggccugcgaggaccucaagcccgugagcgaggaggucguggagaaccccacgauccagaaggacgugcuggagugcaacgucaagaccaccgagguggugggcgacaucauccugaagccggccaacaacucccucaagaucaccgaggaggucgggcacacggaccugauggccgcguacguggacaacagcucccugaccaucaagaagcccaacgagcucagccgcgugcugggccugaagacccucgccacccacgggcuggccgccgucaacuccgugcccugggacacgaucgccaacuacgcgaagccguuccugaacaagguggucagcaccaccaccaacaucgugacgcgcugccucaaccgggugugcaccaacuacaugcccuacuucuucacccugcugcuccagcugugcaccuucacccgcuccacgaacagccggaucaaggccuccaugcccaccaccaucgccaagaacaccgucaagagcgugggcaaguucugccuggaggccagcuucaacuaccucaagucccccaacuucagcaagcugaucaacaucaucaucugguuccugcuccuguccgugugccugggcagccucaucuacuccacggccgcgcuggggguccugaugagcaaccucggcaugccguccuacugcaccggguaccgcgagggcuaccugaacagcaccaacgugaccaucgccacguacugcaccggcuccauccccugcagcgugugccuguccgggcucgacagccuggacaccuaccccucccuggagaccauccagaucacgaucagcuccuucaagugggaccucaccgccuucggccuggucgccgagugguuccuggccuacauccucuucacccgguucuucuacgugcuggggcuggcggccaucaugcagcucuucuucagcuacuucgccgugcacuucaucuccaacagcuggcugauguggcugaucaucaaccugguccagauggcccccaucuccgcgauggugcgcauguacaucuucuucgccagcuucuacuacguguggaagagcuacguccacgugguggacggcugcaacuccagcaccugcaugaugugcuacaagcggaaccgcgccacgcgggucgagugcaccaccaucgugaacgggguccgccgguccuucuacguguacgccaacggcggcaagggguucugcaagcuccacaacuggaacugcgugaacugcgacaccuucugcgccggcagcacguucaucuccgacgaggucgcgcgcgaccugagccugcaguucaagcggccgaucaaccccaccgaccaguccagcuacaucguggacuccgugaccgucaagaacgggagcauccaccucuacuucgacaaggccggccagaagaccuacgagcgccacucccugagccacuucgugaaccuggacaaccuccgggccaacaacacgaaggggucccugcccaucaacgugaucgucuucgacggcaagagcaagugcgaggaguccagcgccaaguccgccagcguguacuacucccagcugaugugccagcccauccuccugcuggaccaggcgcucgugagcgacgucggcgacagcgccgagguggccgugaagauguucgacgccuacgucaacaccuucuccagcaccuucaacgugccgauggagaagcugaagacccugguggccacggcggaggccgagcucgccaagaacgucucccuggacaacgugcugagcaccuucaucuccgccgcgcgccagggguucguggacagcgacgucgagaccaaggacgugguggagugccucaagcugucccaccagagcgacaucgaggucaccggcgacuccugcaacaacuacaugcugacguacaacaagguggagaacaugaccccccgggaccucggggccugcaucgacugcagcgcccgccacaucaacgcccagguggccaagucccacaacaucgcgcugaucuggaacgucaaggacuucaugagccuguccgagcagcuccggaagcagauccgcagcgccgccaagaagaacaaccugcccuucaagcugaccugcgccaccacgcgccagguggugaacgucgugaccaccaagaucgcccucaagggcggguga

SEQ ID NO: 17774 - RNA, 5841 nt, Artificial Sequence
  SARS-CoV-2__MT831223.1__non-structural protein 3 (NSP3) CDS gc
auggcccccaccaaggugaccuucggcgacgacacggucaucgaggugcagggguacaagagcgugaacaucaccuucgagcuggacgagcgcaucgacaagguccucaacgagaagugcuccgccuacaccguggagcugggcaccgaggugaacgaguucgcgugcgucguggccgacgccgugaucaagacgcugcagccggucagcgagcuccugaccccccuggggaucgaccucgacgagugguccauggccaccuacuaccuguucgacgagagcggcgaguucaagcuggccucccacauguacugcagcuucuacccccccgacgaggacgaggaggagggggacugcgaggaggaggaguucgagccguccacccaguacgaguacggcacggaggacgacuaccagggcaagccccucgaguucggggcgaccagcgccgcccugcagcccgaggaggagcaggaggaggacuggcuggacgacgacucccagcagaccgugggccagcaggacgggagcgaggacaaccagaccacgaccauccagaccaucguggagguccagccccagcucgagauggagcugaccccgguggugcagacgaucgaggucaacuccuucagcggcuaccugaagcucaccgacaacguguacaucaagaacgccgacaucguggaggaggcgaagaaggucaagcccaccgugguggucaacgccgccaacguguaccugaagcacgggggcggcguggccggggcccugaacaaggcgaccaacaacgccaugcaggucgaguccgacgacuacaucgccacgaacggcccccucaagguggggggcagcugcguccuguccggccacaaccuggccaagcacugccuccacgugguggggcccaacgucaacaagggcgaggacauccagcugcugaagagcgccuacgagaacuucaaccagcacgaggugcuccuggcgccgcugcucuccgccgggaucuucggcgccgaccccauccacagccugcgggugugcgucgacaccgugcgcaccaacguguaccuggccgucuucgacaagaaccucuacgacaagcugguguccagcuuccuggagaugaagagcgagaagcagguggagcagaagaucgccgagauccccaaggaggaggucaagcccuucaucaccgaguccaagccgagcguggagcagcggaagcaggacgacaagaagaucaaggcgugcguggaggaggucacgaccacccucgaggagaccaaguuccugacggagaaccugcuccuguacaucgacaucaacgggaaccugcaccccgacuccgccacccucgugagcgacaucgacaucaccuuccugaagaaggacgcccccuacaucgugggcgacgucgugcaggagggcgugcugaccgccgucgugauccccacgaagaaggccgggggcaccaccgagaugcucgcgaaggcccugcgcaaggugccgaccgacaacuacaucacgaccuaccccgggcagggccugaacggguacaccgucgaggaggccaagaccgugcucaagaagugcaaguccgccuucuacauccugcccagcaucaucuccaacgagaagcaggagauccugggcaccgugagcuggaaccuccgggagaugcuggcgcacgccgaggagacgcgcaagcugaugcccgucugcguggagaccaaggccaucguguccaccauccagcggaaguacaagggcaucaagauccaggagggggucguggacuacggcgcccgcuucuacuucuacaccagcaagacgaccguggccucccugaucaacacccucaacgaccugaacgagacccuggucacgaugccgcucggguacgugacccacggccugaaccuggaggaggcggcccgguacaugcgcagccucaaggugcccgccaccgucuccgugagcucccccgacgccgugaccgccuacaacggguaccugacgagcuccagcaagacccccgaggagcacuucaucgagaccaucucccuggcgggcagcuacaaggacuggagcuacuccggccagagcacccagcucgggaucgaguuccugaagcggggcgacaaguccgucuacuacacgagcaacccgaccaccuuccaccuggacggggaggugaucaccuucgacaaccucaagacgcugcugucccuccgcgaggugcggaccaucaaggucuucaccaccguggacaacaucaaccugcacacgcagguggucgacaugagcaugaccuacggccagcaguucggccccaccuaccuggacggggccgacgugaccaagaucaagccccacaacucccacgagggcaagacguucuacgugcucccgaacgacgacacccugcgcgucgaggccuucgaguacuaccacaccaccgaccccagcuuccuggggcgguacauguccgcccucaaccacacgaagaaguggaaguacccccaggugaacggccugaccagcaucaagugggccgacaacaacugcuaccuggcgaccgcccuccugacccugcagcagaucgagcucaaguucaaccccccggcccugcaggacgccuacuaccgcgcgcgggccggggaggccgccaacuucugcgcccugauccucgcguacugcaacaagacggugggcgagcugggcgacguccgcgagaccauguccuaccuguuccagcacgccaaccucgacagcugcaagcgggugcugaacgucgugugcaagaccugcgggcagcagcagaccacccugaagggcguggaggccgucauguacauggggacgcucuccuacgagcaguucaagaagggcgugcagauccccugcaccugcgggaagcaggccaccaaguaccuggugcagcaggagagccccuucgucaugauguccgcccccccggcgcaguacgagcugaagcacggcaccuucacgugcgccagcgaguacaccggcaacuaccagugcgggcacuacaagcacaucaccuccaaggagacccucuacugcaucgacggcgcccugcugacgaagagcagcgaguacaaggggcccaucaccgacguguucuacaaggagaacuccuacaccaccacgaucaagcccgugaccuacaagcucgacggcgucgugugcaccgagaucgaccccaagcuggacaacuacuacaagaaggacaacagcuacuucaccgagcagccgaucgaccuggugcccaaccagcccuaccccaacgccuccuucgacaacuucaaguucgucugcgacaacaucaaguucgccgacgaccucaaccagcugacgggguacaagaagccggcgagccgcgagcugaaggugaccuucuuccccgaccucaacggcgacguggucgccaucgacuacaagcacuacacccccuccuucaagaagggcgccaagcugcugcacaagcccaucguguggcacgugaacaacgccaccaacaaggcgacguacaagccgaacaccuggugcauccggugccucuggagcaccaagcccgucgagaccuccaacagcuucgacgugcugaaguccgaggacgcccaggggauggacaaccuggccugcgaggaccucaagcccuucagcgaggagguggucgagaaccccacgauccagaaggacgugcuggagugcaacgugaagaccaccgaggucgugggcgacaucauccugaagccggccaacaacucccucaagaucaccgaggagguggggcacacggaccugauggccgcguacgucgacaacagcucccugaccaucaagaagcccaacgagcucagccgcgugcugggccugaagacccucgccacccacgggcuggccgccgugaacuccguccccugggacacgaucgccaacuacgcgaagccguuccugaacaagguggugagcaccaccaccaacaucgucacgcgcugccucaaccgggugugcaccaacuacaugcccuacuucuucacccugcugcuccagcugugcaccuucacccgcuccacgaacagccggaucaaggccuccaugcccaccaccaucgccaagaacaccgugaagagcgucggcaaguucugccuggaggccagcuucaacuaccucaagucccccaacuucagcaagcugaucaacaucaucaucugguuccugcuccuguccgugugccugggcagccucaucuacuccacggccgcgcugggggugcugaugagcaaccucggcaugccguccuacugcaccggguaccgcgagggcuaccugaacagcaccaacgucaccaucgccacguacugcaccggcuccauccccugcagcgugugccuguccgggcucgacagccuggacaccuaccccucccuggagaccauccagaucacgaucagcuccuucaagugggaccucaccgccuucggccugguggccgagugguuccuggccuacauccucuucacccgguucuucuacguccuggggcuggcggccaucaugcagcucuucuucagcuacuucgccgugcacuucaucuccaacagcuggcugauguggcugaucaucaaccuggugcagauggcccccaucuccgcgaugguccgcauguacaucuucuucgccagcuucuacuacguguggaagagcuacgugcacgucguggacggcugcaacuccagcaccugcaugaugugcuacaagcggaaccgcgccacgcggguggagugcaccaccaucgucaacggggugcgccgguccuucuacgucuacgccaacggcggcaagggguucugcaagcuccacaacuggaacugcgugaacugcgacaccuucugcgccggcagcacguucaucuccgacgagguggcgcgcgaccugagccugcaguucaagcggccgaucaaccccaccgaccaguccagcuacaucgucgacuccgugaccgugaagaacgggagcauccaccucuacuucgacaaggccggccagaagaccuacgagcgccacucccugagccacuucgucaaccuggacaaccuccgggccaacaacacgaaggggucccugcccaucaacgugaucguguucgacggcaagagcaagugcgaggaguccagcgccaaguccgccagcgucuacuacucccagcugaugugccagcccauccuccugcuggaccaggcgcucgugagcgacgugggcgacagcgccgaggucgccgugaagauguucgacgccuacgugaacaccuucuccagcaccuucaacgucccgauggagaagcugaagacccugguggccacggcggaggccgagcucgccaagaacgugucccuggacaacguccugagcaccuucaucuccgccgcgcgccagggguucguggacagcgacguggagaccaaggacgucguggagugccucaagcugucccaccagagcgacaucgaggugaccggcgacuccugcaacaacuacaugcugacguacaacaaggucgagaacaugaccccccgggaccucggggccugcaucgacugcagcgcccgccacaucaacgcccagguggccaagucccacaacaucgcgcugaucuggaacgugaaggacuucaugagccuguccgagcagcuccggaagcagauccgcagcgccgccaagaagaacaaccugcccuucaagcugaccugcgccaccacgcgccaggucgugaacguggucaccaccaagaucgcccucaagggcggguga

SEQ ID NO: 17775 - RNA, 5841 nt, Artificial Sequence
  SARS-CoV-2__MT831261.1__non-structural protein 3 (NSP3) CDS gc
auggcccccaccaaggugaccuucggcgacgacacggucaucgaggugcagggguacaagagcgugaacaucaccuucgagcuggacgagcgcaucgacaagguccucaacgagaagugcuccgccuacaccguggagcugggcaccgaggugaacgaguucgcgugcgucguggccgacgccgugaucaagacgcugcagccggucagcgagcuccugaccccccuggggaucgaccucgacgagugguccauggccaccuacuaccuguucgacgagagcggcgaguucaagcuggccucccacauguacugcagcuucuacccccccgacgaggacgaggaggagggggacugcgaggaggaggaguucgagccguccacccaguacgaguacggcacggaggacgacuaccagggcaagccccucgaguucggggcgaccagcgccgcccugcagcccgaggaggagcaggaggaggacuggcuggacgacgacucccagcagaccgugggccagcaggacgggagcgaggacaaccagaccacgaccauccagaccaucguggagguccagccccagcucgagauggagcugaccccgguggugcagacgaucgaggucaacuccuucagcggcuaccugaagcucaccgacaacguguacaucaagaacgccgacaucguggaggaggcgaagaaggucaagcccaccgugguggucaacgccgccaacguguaccugaagcacgggggcggcguggccggggcccugaacaaggcgaccaacaacgccaugcaggucgaguccgacgacuacaucgccacgaacggcccccucaagguggggggcagcugcguccuguccggccacaaccuggccaagcacugccuccacgugguggggcccaacgucaacaagggcgaggacauccagcugcugaagagcgccuacgagaacuucaaccagcacgaggugcuccuggcgccgcugcucuccgccgggaucuucggcgccgaccccauccacagccugcgggugugcgucgacaccgugcgcaccaacguguaccuggccgucuucgacaagaaccucuacgacaagcugguguccagcuuccuggagaugaagagcgagaagcagguggagcagaagaucgccgagauccccaaggaggaggucaagcccuucaucaccgaguccaagccgagcguggagcagcggaagcaggacgacaagaagaucaaggcgugcguggaggaggucacgaccacccucgaggagaccaaguuccugacggagaaccugcuccuguacaucgacaucaacgggaaccugcaccccgacuccgccacccucgugagcgacaucgacaucaccuuccugaagaaggacgcccccuacaucgugggcgacgucgugcaggagggcgugcugaccgccgucgugauccccacgaagaaggccgggggcaccaccgagaugcucgcgaaggcccugcgcaaggugccgaccgacaacuacaucacgaccuaccccgggcagggccugaacggguacaccgucgaggaggccaagaccgugcucaagaagugcaaguccgccuucuacauccugcccagcaucaucuccaacgagaagcaggagauccugggcaccgugagcuggaaccuccgggagaugcuggcgcacgccgaggagacgcgcaagcugaugcccgucugcguggagaccaaggccaucguguccaccauccagcggaaguacaagggcaucaagauccaggagggggucguggacuacggcgcccgcuucuacuucuacaccagcaagacgaccguggccucccugaucaacacccucaacgaccugaacgagacccuggucacgaugccgcucggguacgugacccacggccugaaccuggaggaggcggcccgguacaugcgcagccucaaggugcccgccaccgucuccgugagcucccccgacgccgugaccgccuacaacggguaccugacgagcuccagcaagacccccgaggagcacuucaucgagaccaucucccuggcgggcagcuacaaggacuggagcuacuccggccagagcacccagcucgggaucgaguuccugaagcggggcgacaaguccgucuacuacacgagcaacccgaccaccuuccaccuggacggggaggugaucaccuucgacaaccucaagacgcugcugucccuccgcgaggugcggaccaucaaggucuucaccaccguggacaacaucaaccugcacacgcagguggucgacaugagcaugaccuacggccagcaguucggccccaccuaccuggacggggccgacgugaccaagaucaagccccacaacucccacgagggcaagacguucuacgugcucccgaacgacgacacccugcgcgucgaggccuucgaguacuaccacaccaccgaccccagcuuccuggggcgguacauguccgcccucaaccacacgaagaaguggaaguacccccaggugaacggccugaccagcaucaagugggccgacaacaacugcuaccuggcgaccgcccuccugacccugcagcagaucgagcucaaguucaaccccccggcccugcaggacgccuacuaccgcgcgcgggccggggaggccgccaacuucugcgcccugauccucgcguacugcaacaagacggugggcgagcugggcgacguccgcgagaccauguccuaccuguuccagcacgccaaccucgacagcugcaagcgggugcugaacgucgugugcaagaccugcgggcagcagcagaccacccugaagggcguggaggccgucauguacauggggacgcucuccuacgagcaguucaagaagggcgugcagauccccugcaccugcgggaagcaggccaccaaguaccuggugcagcaggagagccccuucgucaugauguccgcccccccggcgcaguacgagcugaagcacggcaccuucacgugcgccagcgaguacaccggcaacuaccagugcgggcacuacaagcacaucaccuccaaggagacccucuacugcaucgacggcgcccugcugacgaagagcagcgaguacaaggggcccaucaccgacguguucuacaaggagaacuccuacaccaccacgaucaagcccgugaccuacaagcucgacggcgucgugugcaccgagaucgaccccaagcuggacaacuacuacaagaaggacaacagcuacuucaccgagcagccgaucgaccuggugcccaaccagcccuaccccaacgucuccuucgacaacuucaaguucgugugcgacaacaucaaguucgccgacgaccucaaccagcugacgggguacaagaagccggccagccgcgagcugaaggugaccuucuuccccgaccucaacggcgacgucguggcgaucgacuacaagcacuacacccccuccuucaagaagggcgccaagcugcugcacaagcccaucguguggcacgucaacaacgccaccaacaaggccacguacaagccgaacaccuggugcauccggugccucuggagcaccaagcccguggagaccuccaacagcuucgacgugcugaaguccgaggacgcgcaggggauggacaaccuggccugcgaggaccucaagcccgucagcgaggaggugguggagaaccccacgauccagaaggacguccuggagugcaacgugaagaccaccgagguggucggcgacaucauccugaagccggccaacaacucccucaagaucaccgaggagguggggcacacggaccugauggccgccuacguggacaacagcucccugaccaucaagaagcccaacgagcucagccgcguccugggccugaagacccucgcgacccacgggcuggccgccgugaacuccgugcccugggacacgaucgccaacuacgccaagccguuccugaacaaggucgugagcaccaccaccaacaucgugacgcgcugccucaaccgggucugcaccaacuacaugcccuacuucuucacccugcugcuccagcugugcaccuucacccgcuccacgaacagccggaucaaggcguccaugcccaccaccaucgccaagaacaccgugaagagcgugggcaaguucugccuggaggccagcuucaacuaccucaagucccccaacuucagcaagcugaucaacaucaucaucugguuccugcuccuguccgucugccugggcagccucaucuacuccacggccgcccugggggugcugaugagcaaccucggcaugccguccuacugcaccggguaccgcgagggcuaccugaacagcaccaacgugaccaucgcgacguacugcaccggcuccauccccugcagcgucugccuguccgggcucgacagccuggacaccuaccccucccuggagaccauccagaucacgaucagcuccuucaagugggaccucaccgccuucggccugguggccgagugguuccuggccuacauccucuucacccgguucuucuacgugcuggggcuggccgcgaucaugcagcucuucuucagcuacuucgccguccacuucaucuccaacagcuggcugauguggcugaucaucaaccuggugcagauggcccccaucuccgccauggugcgcauguacaucuucuucgcgagcuucuacuacgucuggaagagcuacgugcacguggucgacggcugcaacuccagcaccugcaugaugugcuacaagcggaaccgcgccacgcggguggagugcaccaccaucgucaacggggugcgccgguccuucuacguguacgccaacggcggcaagggguucugcaagcuccacaacuggaacugcgucaacugcgacaccuucugcgccggcagcacguucaucuccgacgagguggcccgcgaccugagccugcaguucaagcggccgaucaaccccaccgaccaguccagcuacaucguggacuccgucaccgugaagaacgggagcauccaccucuacuucgacaaggcgggccagaagaccuacgagcgccacucccugagccacuucgugaaccuggacaaccuccgggccaacaacacgaaggggucccugcccaucaacgucaucguguucgacggcaagagcaagugcgaggaguccagcgccaaguccgccagcguguacuacucccagcugaugugccagcccauccuccugcuggaccaggcccucgucagcgacgugggcgacagcgcggagguggccgucaagauguucgacgccuacgugaacaccuucuccagcaccuucaacgugccgauggagaagcugaagacccuggucgccacggccgaggcggagcucgccaagaacgugucccuggacaacgugcugagcaccuucaucuccgccgcccgccagggguucgucgacagcgacguggagaccaaggacguggucgagugccucaagcugucccaccagagcgacaucgaggugaccggcgacuccugcaacaacuacaugcugacguacaacaagguggagaacaugaccccccgggaccucggggcgugcaucgacugcagcgcccgccacaucaacgcccaggucgccaagucccacaacaucgcccugaucuggaacgugaaggacuucaugagccuguccgagcagcuccggaagcagauccgcagcgcggccaagaagaacaaccugcccuucaagcugaccugcgccaccacgcgccagguggucaacguggugaccaccaagaucgcccucaagggcggguga

SEQ ID NO: 17776 - RNA, 5841 nt, Artificial Sequence
  SARS-CoV-2__MT831296.1__non-structural protein 3 (NSP3) CDS gc
auggcccccaccaaggugaccuucggcgacgacacggucaucgaggugcagggguacaagagcgugaacaucaccuucgagcuggacgagcgcaucgacaagguccucaacgagaagugcuccgccuacaccguggagcugggcaccgaggugaacgaguucgcgugcgucguggccgacgccgugaucaagacgcugcagccggucagcgagcuccugaccccccuggggaucgaccucgacgagugguccauggccaccuacuaccuguucgacgagagcggcgaguucaagcuggccucccacauguacugcagcuucuacccccccgacgaggacgaggaggagggggacugcgaggaggaggaguucgagccguccacccaguacgaguacggcacggaggacgacuaccagggcaagccccucgaguucggggcgaccagcgccgcccugcagcccgaggaggagcaggaggaggacuggcuggacgacgacucccagcagaccgugggccagcaggacgggagcgaggacaaccagaccacgaccauccagaccaucguggagguccagccccagcucgagauggagcugaccccgguggugcagacgaucgaggucaacuccuucagcggcuaccugaagcucaccgacaacguguacaucaagaacgccgacaucguggaggaggcgaagaaggucaagcccaccgugguggucaacgccgccaacguguaccugaagcacgggggcggcguggccggggcccugaacaaggcgaccaacaacgccaugcaggucgaguccgacgacuacaucgccacgaacggcccccucaagguggggggcagcugcguccuguccggccacaaccuggccaagcacugccuccacgugguggggcccaacgucaacaagggcgaggacauccagcugcugaagagcgccuacgagaacuucaaccagcacgaggugcuccuggcgccgcugcucuccgccgggaucuucggcgccgaccccauccacagccugcgggugugcgucgacaccgugcgcaccaacguguaccuggccgucuucgacaagaaccucuacgacaagcugguguccagcuuccuggagaugaagagcgagaagcagguggagcagaagaucgccgagauccccaaggaggaggucaagcccuucaucaccgaguccaagccgagcguggagcagcggaagcaggacgacaagaagaucaaggcgugcguggaggaggucacgaccacccucgaggagaccaaguuccugacggagaaccugcuccuguacaucgacaucaacgggaaccugcaccccgacuccgccacccucgugagcgacaucgacaucaccuuccugaagaaggacgcccccuacaucgugggcgacgucgugcaggagggcgugcugaccgccgucgugauccccacgaagaaggccgggggcaccaccgagaugcucgcgaaggcccugcgcaaggugccgaccgacaacuacaucacgaccuaccccgggcagggccugaacggguacaccgucgaggaggccaagaccgugcucaagaagugcaaguccgccuucuacauccugcccagcaucaucuccaacgagaagcaggagauccugggcaccgugagcuggaaccuccgggagaugcuggcgcacgccgaggagacgcgcaagcugaugcccgucugcguggagaccaaggccaucguguccaccauccagcggaaguacaagggcaucaagauccaggagggggucguggacuacggcgcccgcuucuacuucuacaccagcaagacgaccguggccucccugaucaacacccucaacgaccugaacgagacccuggucacgaugccgcucggguacgugacccacggccugaaccuggaggaggcggcccgguacaugcgcagccucaaggugcccgccaccgucuccgugagcucccccgacgccgugaccgccuacaacggguaccugacgagcuccagcaagacccccgaggagcacuucaucgagaccaucucccuggcgggcagcuacaaggacuggagcuacuccggccagagcacccagcucgggaucgaguuccugaagcggggcgacaaguccgucuacuacacgagcaacccgaccaccuuccaccuggacggggaggugaucaccuucgacaaccucaagacgcugcugucccuccgcgaggugcggaccaucaaggucuucaccaccguggacaacaucaaccugcacacgcagguggucgacaugagcaugaccuacggccagcaguucggccccaccuaccuggacggggccgacgugaccaagaucaagccccacaacucccacgagggcaagacguucuacgugcucccgaacgacgacacccugcgcgucgaggccuucgaguacuaccacaccaccgaccccagcuuccuggggcgguacauguccgcccucaaccacacgaagaaguggaaguacccccaggugaacggccugaccagcaucaagugggccgacaacaacugcuaccuggcgaccgcccuccugacccugcagcagaucgagcucaaguucaaccccccggcccugcaggacgccuacuaccgcgcgcgggccggggaggccgccaacuucugcgcccugauccucgcguacugcaacaagacggugggcgagcugggcgacguccgcgagaccauguccuaccuguuccagcacgccaaccucgacagcugcaagcgggugcugaacgucgugugcaagaccugcgggcagcagcagaccacccugaagggcguggaggccgucauguacauggggacgcucuccuacgagcaguucaagaagggcgugcagauccccugcaccugcgggaagcaggugaccaaguaccugguccagcaggagagccccuucgugaugauguccgcccccccggcccaguacgagcugaagcacggcaccuucacgugcgcgagcgaguacaccggcaacuaccagugcgggcacuacaagcacaucaccuccaaggagacccucuacugcaucgacggcgcccugcugacgaagagcagcgaguacaaggggcccaucaccgacguguucuacaaggagaacuccuacaccaccacgaucaagcccgucaccuacaagcucgacggcguggugugcaccgagaucgaccccaagcuggacaacuacuacaagaaggacaacagcuacuucaccgagcagccgaucgaccugguccccaaccagcccuaccccaacgccuccuucgacaacuucaaguucgugugcgacaacaucaaguucgccgacgaccucaaccagcugacgggguacaagaagccggccagccgcgagcugaaggugaccuucuuccccgaccucaacggcgacgucguggcgaucgacuacaagcacuacacccccuccuucaagaagggcgccaagcugcugcacaagcccaucguguggcacgucaacaacgccaccaacaaggccacguacaagccgaacaccuggugcauccggugccucuggagcaccaagcccguggagaccuccaacagcuucgacgugcugaaguccgaggacgcgcaggggauggacaaccuggccugcgaggaccucaagcccgucagcgaggaggugguggagaaccccacgauccagaaggacguccuggagugcaacgugaagaccaccgagguggucggcgacaucauccugaagccggccaacaacucccucaagaucaccgaggagguggggcacacggaccugauggccgccuacguggacaacagcucccugaccaucaagaagcccaacgagcucagccgcguccugggccugaagacccucgcgacccacgggcuggccgccgugaacuccgugcccugggacacgaucgccaacuacgccaagccguuccugaacaaggucgugagcaccaccaccaacaucgugacgcgcugccucaaccgggucugcaccaacuacaugcccuacuucuucacccugcugcuccagcugugcaccuucacccgcuccacgaacagccggaucaaggcguccaugcccaccaccaucgccaagaacaccgugaagagcgugggcaaguucugccuggaggccagcuucaacuaccucaagucccccaacuucagcaagcugaucaacaucaucaucugguuccugcuccuguccgucugccugggcagccucaucuacuccacggccgcccugggggugcugaugagcaaccucggcaugccguccuacugcaccggguaccgcgagggcuaccugaacagcaccaacgugaccaucgcgacguacugcaccggcuccauccccugcagcgucugccuguccgggcucgacagccuggacaccuaccccucccuggagaccauccagaucacgaucagcuccuucaagugggaccucaccgccuucggccugguggccgagugguuccuggccuacauccucuucacccgguucuucuacgugcuggggcuggccgcgaucaugcagcucuucuucagcuacuucgccguccacuucaucuccaacagcuggcugauguggcugaucaucaaccuggugcagauggcccccaucuccgccauggugcgcauguacaucuucuucgcgagcuucuacuacgucuggaagagcuacgugcacguggucgacggcugcaacuccagcaccugcaugaugugcuacaagcggaaccgcgccacgcggguggagugcaccaccaucgucaacggggugcgccgguccuucuacguguacgccaacggcggcaagggguucugcaagcuccacaacuggaacugcgucaacugcgacaccuucugcgccggcagcacguucaucuccgacgagguggcccgcgaccugagccugcaguucaagcggccgaucaaccccaccgaccaguccagcuacaucguggacuccgucaccgugaagaacgggagcauccaccucuacuucgacaaggcgggccagaagaccuacgagcgccacucccugagccacuucgugaaccuggacaaccuccgggccaacaacacgaaggggucccugcccaucaacgucaucguguucgacggcaagagcaagugcgaggaguccagcgccaaguccgccagcguguacuacucccagcugaugugccagcccauccuccugcuggaccaggcccucgucagcgacgugggcgacagcgcggagguggccgucaagauguucgacgccuacgugaacaccuucuccagcaccuucaacgugccgauggagaagcugaagacccuggucgccacggccgaggcggagcucgccaagaacgugucccuggacaacgugcugagcaccuucaucuccgccgcccgccagggguucgucgacagcgacguggagaccaaggacguggucgagugccucaagcugucccaccagagcgacaucgaggugaccggcgacuccugcaacaacuacaugcugacguacaacaagguggagaacaugaccccccgggaccucggggcgugcaucgacugcagcgcccgccacaucaacgcccaggucgccaagucccacaacaucgcccugaucuggaacgugaaggacuucaugagccuguccgagcagcuccggaagcagauccgcagcgcggccaagaagaacaaccugcccuucaagcugaccugcgccaccacgcgccagguggucaacguggugaccaccaagaucgcccucaagggcggguga

SEQ ID NO: 17777 - RNA, 5841 nt, Artificial Sequence
  SARS-CoV-2__MT831301.1__non-structural protein 3 (NSP3) CDS gc
auggcccccaccaaggugaccuucggcgacgacacggucaucgaggugcagggguacaagagcgugaacaucaccuucgagcuggacgagcgcaucgacaagguccucaacgagaagugcuccgccuacaccguggagcugggcaccgaggugaacgaguucgcgugcgucguggccgacgccgugaucaagacgcugcagccggucagcgagcuccugaccccccuggggaucgaccucgacgagugguccauggccaccuacuaccuguucgacgagagcggcgaguucaagcuggccucccacauguacugcagcuucuacccccccgacgaggacgaggaggagggggacugcgaggaggaggaguucgagccguccacccaguacgaguacggcacggaggacgacuaccagggcaagccccucgaguucggggcgaccagcgccgcccugcagcccgaggaggagcaggaggaggacuggcuggacgacgacucccagcagaccgugggccagcaggacgggagcgaggacaaccagaccacgaccauccagaccaucguggagguccagccccagcucgagauggagcugaccccgguggugcagacgaucgaggucaacuccuucagcggcuaccugaagcucaccgacaacguguacaucaagaacgccgacaucguggaggaggcgaagaaggucaagcccaccgugguggucaacgccgccaacguguaccugaagcacgggggcggcguggccggggcccugaacaaggcgaccaacaacgccaugcaggucgaguccgacgacuacaucgccacgaacggcccccucaagguggggggcagcugcguccuguccggccacaaccuggccaagcacugccuccacgugguggggcccaacgucaacaagggcgaggacauccagcugcugaagagcgccuacgagaacuucaaccagcacgaggugcuccuggcgccgcugcucuccgccgggaucuucggcgccgaccccauccacagccugcgggugugcgucgacaccgugcgcaccaacguguaccuggccgucuucgacaagaaccucuacgacaagcugguguccagcuuccuggagaugaagagcgagaagcagguggagcagaagaucgccgagauccccaaggaggaggucaagcccuucaucaccgaguccaagccgagcguggagcagcggaagcaggacgacaagaagaucaaggcgugcguggaggaggucacgaccacccucgaggagaccaaguuccugacggagaaccugcuccuguacaucgacaucaacgggaaccugcaccccgacuccgccacccucgugagcgacaucgacaucaccuuccugaagaaggacgcccccuacaucgugggcgacgucgugcaggagggcgugcugaccgccgucgugauccccacgaagaaggccgggggcaccaccgagaugcucgcgaaggcccugcgcaaggugccgaccgacaacuacaucacgaccuaccccgggcagggccugaacggguacaccgucgaggaggccaagaccgugcucaagaagugcaaguccgccuucuacauccugcccagcaucaucuccaacgagaagcaggagauccugggcaccgugagcuggaaccuccgggagaugcuggcgcacgccgaggagacgcgcaagcugaugcccgucugcguggagaccaaggccaucguguccaccauccagcggaaguacaagggcaucaagauccaggagggggucguggacuacggcgcccgcuucuacuucuacaccagcaagacgaccguggccucccugaucaacacccucaacgaccugaacgagacccuggucacgaugccgcucggguacgugacccacggccugaaccuggaggaggcggcccgguacaugcgcagccucaaggugcccgccaccgucuccgugagcucccccgacgccgugaccgccuacaacggguaccugacgagcuccagcaagacccccgaggagcacuucaucgagaccaucucccuggcgggcagcuacaaggacuggagcuacuccggccagagcacccagcucgggaucgaguuccugaagcggggcgacaaguccgucuacuacacgagcaacccgaccaccuuccaccuggacggggaggugaucaccuucgacaaccucaagacgcugcugucccuccgcgaggugcggaccaucaaggucuucaccaccguggacaacaucaaccugcacacgcagguggucgacaugagcaugaccuacggccagcaguucggccccaccuaccuggacggggccgacgugaccaagaucaagccccacaacucccacgagggcaagacguucuacgugcucccgaacgacgacacccugcgcgucgaggccuucgaguacuaccacaccaccgaccccagcuuccuggggcgguacauguccgcccucaaccacacgaagaaguggaaguacccccaggugaacggccugaccagcaucaagugggccgacaacaacugcuaccuggcgaccgcccuccugacccugcagcagaucgagcucaaguucaaccccccggcccugcaggacgccuacuaccgcgcgcgggccggggaggccgccaacuucugcgcccugauccucgcguacugcaacaagacggugggcgagcugggcgacguccgcgagaccauguccuaccuguuccagcacgccaaccucgacagcugcaagcgggugcugaacgucgugugcaagaccugcgggcagcagcagaccacccugaagggcguggaggccgucauguacauggggacgcucuccuacgagcaguucaagaagggcgugcagauccccugcaccugcgggaagcaggccaccaaguaccuggugcagcaggagagccccuucgucaugauguccgcccccccggcgcaguacgagcugaagcacggcaccuucacgugcgccagcgaguacaccggcaacuaccagugcgggcacuacaagcacaucaccuccaaggagacccucuacugcaucgacggcgcccugcugacgaagagcagcgaguacaaggggcccaucaccgacguguucuacaaggagaacuccuacaccaccacgaucaagcccgugaccuacaagcucgacggcgucgugugcaccgagaucgaccccaagcuggacaacuacuacaagaaggacaacagcuacuucaccgagcagccgaucgaccuggugcccaaccagcccuaccccaacgccuccuucgacaacuucaaguucgucugcgacaacaucaaguucgccgacgaccucaaccagcugacgggguacaagaagccggcgagccgcgagcugaaggugaccuucuuccccgaccucaacggcgacguggucgccaucgacuacaagcacuacacccccuccuucaagaagggcgccaagcugcugcacaagcccaucguguggcacgugaacaacgccaccaacaaggcgacguacaagccgaacaccuggugcauccggugccucuggagcaccaagcccgucgagaccuccaacagcuucgacgugcugaaguccgaggacgcccaggggauggacaaccuggccugcgaggaccucaagcccgugagcgaggaggucguggagaaccccacgauccagaaggacgugcuggagugcaacgucaagaccaccgagguggugggcgacaucauccugaagccggccaacaacucccucaagaucaccgaggaggucgggcacacggaccugauggccgcguacguggacaacagcucccugaccaucaagaagcccaacgagcucagccgcgugcugggccugaagacccucgccacccacgggcuggccgccgucaacuccgugcccugggacacgaucgccaacuacgcgaagccguuccugaacaagguggucagcaccaccaccaacaucgugacgcgcugccucaaccgggugugcaccaacuacaugcccuacuucuucacccugcugcuccagcugugcaccuucacccgcuccacgaacagccggaucaaggccuccaugcccaccaccaucgccaagaacaccgucaagagcgugggcaaguucugccuggaggccagcuucaacuaccucaagucccccaacuucagcaagcugaucaacaucaucaucugguuccugcuccuguccgugugccugggcagccucaucuacuccacggccgcgcuggggguccugaugagcaaccucggcaugccguccuacugcaccggguaccgcgagggcuaccugaacagcaccaacgugaccaucgccacguacugcaccggcuccauccccugcagcgugugccuguccgggcucgacagccuggacaccuaccccucccuggagaccauccagaucacgaucagcuccuucaagugggaccucaccgccuucggccuggucgccgagugguuccuggccuacauccucuucacccgguucuucuacgugcuggggcuggcggccaucaugcagcucuucuucagcuacuucgccgugcacuucaucuccaacagcuggcugauguggcugaucaucaaccugguccagauggcccccaucuccgcgauggugcgcauguacaucuucuucgccagcuucuacuacguguggaagagcuacguccacgugguggacggcugcaacuccagcaccugcaugaugugcuacaagcggaaccgcgccacgcgggucgagugcaccaccaucgugaacgggguccgccgguccuucuacguguacgccaacggcggcaagggguucugcaagcuccacaacuggaacugcgugaacugcgacaccuucugcgccggcagcacguucaucuccgacgaggucgcgcgcgaccugagccugcaguucaagcggccgaucaaccccaccgaccaguccagcuacaucguggacuccgugaccgucaagaacgggagcauccaccucuacuucgacaaggccggccagaagaccuacgagcgccacucccugagccacuucgugaaccuggacaaccuccgggccaacaacacgaaggggucccugcccaucaacgugaucgucuucgacggcaagagcaagugcgaggaguccagcgccaaguccgccagcguguacuacucccagcugaugugccagcccauccuccugcuggaccaggcgcucgugagcgacgucggcgacagcgccgagguggccgugaagauguucgacgccuacgucaacaccuucuccagcaccuucaacgugccgauggagaagcugaagacccugguggccacggcggaggccgagcucgccaagaacgucucccuggacaacgugcugagcaacuucaucuccgccgcgcgccagggguucguggacagcgacgucgagaccaaggacgugguggagugccucaagcugucccaccagagcgacaucgaggucaccggcgacuccugcaacaacuacaugcugaccuacaacaagguggagaacaugacgccccgggaccucggggccugcaucgacugcagcgcccgccacaucaacgcccagguggccaagucccacaacaucgcgcugaucuggaacgucaaggacuucaugagccuguccgagcagcuccggaagcagauccgcagcgccgccaagaagaacaaccugcccuucaagcugaccugcgccaccacccgccagguggugaacgucgugacgaccaagaucgcccucaagggcggguga

SEQ ID NO: 17778 - RNA, 5841 nt, Artificial Sequence
  SARS-CoV-2__MT831340.1__non-structural protein 3 (NSP3) CDS gc
auggcccccaccaaggugaccuucggcgacgacacggucaucgaggugcagggguacaagagcgugaacaucaccuucgagcuggacgagcgcaucgacaagguccucaacgagaagugcuccgccuacaccguggagcugggcaccgaggugaacgaguucgcgugcgucguggccgacgccgugaucaagacgcugcagccggucagcgagcuccugaccccccuggggaucgaccucgacgagugguccauggccaccuacuaccuguucgacgagagcggcgaguucaagcuggccucccacauguacugcagcuucuacccccccgacgaggacgaggaggagggggacugcgaggaggaggaguucgagccguccacccaguacgaguacggcacggaggacgacuaccagggcaagccccucgaguucggggcgaccagcgccgcccugcagcccgaggaggagcaggaggaggacuggcuggacgacgacucccagcagaccgugggccagcaggacgggagcgaggacaaccagaccacgaccauccagaccaucguggagguccagccccagcucgagauggagcugaccccgguggugcagacgaucgaggucaacaucuucuccggcuaccugaagcucaccgacaacguguacaucaagaacgccgacaucguggaggaggcgaagaaggucaagcccaccgugguggucaacgccgccaacguguaccugaagcacgggggcggcguggccggggcccugaacaaggcgaccaacaacgccaugcaggucgagagcgacgacuacaucgccacgaacggcccccucaagguggggggcuccugcguccugagcggccacaaccuggccaagcacugccuccacgugguggggcccaacgucaacaagggcgaggacauccagcugcugaaguccgccuacgagaacuucaaccagcacgaggugcuccuggcgccgcugcucagcgccgggaucuucggcgccgaccccauccacucccugcgggugugcgucgacaccgugcgcaccaacguguaccuggccgucuucgacaagaaccucuacgacaagcuggugagcuccuuccuggagaugaagagcgagaagcagguggagcagaagaucgccgagauccccaaggaggaggucaagcccuucaucaccgagagcaagccguccguggagcagcggaagcaggacgacaagaagaucaaggcgugcguggaggaggucacgaccacccucgaggagaccaaguuccugacggagaaccugcuccuguacaucgacaucaacgggaaccugcaccccgacagcgccacccucguguccgacaucgacaucaccuuccugaagaaggacgcccccuacaucgugggcgacgucgugcaggagggcgugcugaccgccgucgugauccccacgaagaaggccgggggcaccaccgagaugcucgcgaaggcccugcgcaaggugccgaccgacaacuacaucacgaccuaccccgggcagggccugaacggguacaccgucgaggaggccaagaccgugcucaagaagugcaagagcgccuucuacauccugcccuccaucaucagcaacgagaagcaggagauccugggcaccguguccuggaaccuccgggagaugcuggcgcacgccgaggagacgcgcaagcugaugcccgucugcguggagaccaaggccaucgugagcaccauccagcggaaguacaagggcaucaagauccaggagggggucguggacuacggcgcccgcuucuacuucuacaccuccaagacgaccguggccagccugaucaacacccucaacgaccugaacgagacccuggucacgaugccgcucggguacgugacccacggccugaaccuggaggaggcggcccgguacaugcgcucccucaaggugcccgccaccgucagcguguccagccccgacgccgugaccgccuacaacggguaccugacguccagcuccaagacccccgaggagcacuucaucgagaccaucagccuggcgggcuccuacaaggacuggagcuacagcggccaguccacccagcucgggaucgaguuccugaagcggggcgacaagagcgucuacuacacguccaacccgaccaccuuccaccuggacggggaggugaucaccuucgacaaccucaagacgcugcugagccuccgcgaggugcggaccaucaaggucuucaccaccguggacaacaucaaccugcacacgcagguggucgacauguccaugaccuacggccagcaguucggccccaccuaccuggacggggccgacgugaccaagaucaagccccacaacagccacgagggcaagacguucuacgugcucccgaacgacgacacccugcgcgucgaggccuucgaguacuaccacaccaccgaccccuccuuccuggggcgguacaugagcgcccucaaccacacgaagaaguggaaguacccccaggugaacggccugaccuccaucaagugggccgacaacaacugcuaccuggcgaccgcccuccugacccugcagcagaucgagcucaaguucaaccccccggcccugcaggacgccuacuaccgcgcgcgggccggggaggccgccaacuucugcgcccugauccucgcguacugcaacaagacggugggcgagcugggcgacguccgcgagaccaugagcuaccuguuccagcacgccaaccucgacuccugcaagcgggugcugaacgucgugugcaagaccugcgggcagcagcagaccacccugaagggcguggaggccgucauguacauggggacgcucagcuacgagcaguucaagaagggcgugcagauccccugcaccugcgggaagcaggccaccaaguaccuggugcagcaggagucccccuucgucaugaugagcgcccccccggcgcaguacgagcugaagcacggcaccuucacgugcgccuccgaguacaccggcaacuaccagugcgggcacuacaagcacaucaccagcaaggagacccucuacugcaucgacggcgcccugcugacgaaguccagcgaguacaaggggcccaucaccgacguguucuacaaggagaacagcuacaccaccacgaucaagcccgugaccuacaagcucgacggcgucgugugcaccgagaucgaccccaagcuggacaacuacuacaagaaggacaacuccuacuucaccgagcagccgaucgaccuggugcccaaccagcccuaccccaacgccagcuucgacaacuucaaguucgucugcgacaacaucaaguucgccgacgaccucaaccagcugacgggguacaagaagccggcgucccgcgagcugaaggugaccuucuuccccgaccucaacggcgacguggucgccaucgacuacaagcacuacacccccagcuucaagaagggcgccaagcugcugcacaagcccaucguguggcacgugaacaacgccaccaacaaggcgacguacaagccgaacaccuggugcauccggugccucugguccaccaagcccgucgagaccagcaacuccuucgacgugcugaagagcgaggacgcccaggggauggacaaccuggccugcgaggaccucaagcccguguccgaggaggucguggagaaccccacgauccagaaggacgugcuggagugcaacgucaagaccaccgagguggugggcgacaucauccugaagccggccaacaacagccucaagaucaccgaggaggucgggcacacggaccugauggccgcguacguggacaacuccagccugaccaucaagaagcccaacgagcucucccgcgugcugggccugaagacccucgccacccacgggcuggccgccgucaacagcgugcccugggacacgaucgccaacuacgcgaagccguuccugaacaagguggucuccaccaccaccaacaucgugacgcgcugccucaaccgggugugcaccaacuacaugcccuacuucuucacccugcugcuccagcugugcaccuucacccgcagcacgaacucccggaucaaggccagcaugcccaccaccaucgccaagaacaccgucaaguccgugggcaaguucugccuggaggccagcuucaacuaccucaagagccccaacuucuccaagcugaucaacaucaucaucugguuccugcuccugagcgugugccugggcucccucaucuacagcacggccgcgcuggggguccugauguccaaccucggcaugccgagcuacugcaccggguaccgcgagggcuaccugaacuccaccaacgugaccaucgccacguacugcaccggcagcauccccugcuccgugugccugagcgggcucgacucccuggacaccuaccccagccuggagaccauccagaucacgaucuccagcuucaagugggaccucaccgccuucggccuggucgccgagugguuccuggccuacauccucuucacccgguucuucuacgugcuggggcuggcggccaucaugcagcucuucuucuccuacuucgccgugcacuucaucagcaacuccuggcugauguggcugaucaucaaccugguccagauggcccccaucagcgcgauggugcgcauguacaucuucuucgccuccuucuacuacguguggaagagcuacguccacgugguggacggcugcaacagcuccaccugcaugaugugcuacaagcggaaccgcgccacgcgggucgagugcaccaccaucgugaacgggguccgccggagcuucuacguguacgccaacggcggcaagggguucugcaagcuccacaacuggaacugcgugaacugcgacaccuucugcgccggcuccacguucaucagcgacgaggucgcgcgcgaccugucccugcaguucaagcggccgaucaaccccaccgaccagagcuccuacaucguggacagcgugaccgucaagaacggguccauccaccucuacuucgacaaggccggccagaagaccuacgagcgccacagccugucccacuucgugaaccuggacaaccuccgggccaacaacacgaaggggagccugcccaucaacgugaucgucuucgacggcaaguccaagugcgaggagagcuccgccaagagcgccuccguguacuacagccagcugaugugccagcccauccuccugcuggaccaggcgcucguguccgacgucggcgacagcgccgagguggccgugaagauguucgacgccuacgucaacaccuucagcuccaccuucaacgugccgauggagaagcugaagacccugguggccacggcggaggccgagcucgccaagaacgucagccuggacaacgugcuguccaccuucaucagcgccgcgcgccagggguucguggacuccgacgucgagaccaaggacgugguggagugccucaagcugagccaccaguccgacaucgaggucaccggcgacagcugcaacaacuacaugcugacguacaacaagguggagaacaugaccccccgggaccucggggccugcaucgacugcuccgcccgccacaucaacgcccagguggccaagagccacaacaucgcgcugaucuggaacgucaaggacuucaugucccugagcgagcagcuccggaagcagauccgcuccgccgccaagaagaacaaccugcccuucaagcugaccugcgccaccacgcgccagguggugaacgucgugaccaccaagaucgcccucaagggcggguga

SEQ ID NO: 17779 - RNA, 5841 nt, Artificial Sequence
  SARS-CoV-2__MT831347.1__non-structural protein 3 (NSP3) CDS gc
auggcccccaccaaggugaccuucggcgacgacacggucaucgaggugcagggguacaagagcgugaacaucaccuucgagcuggacgagcgcaucgacaagguccucaacgagaagugcuccgccuacaccguggagcugggcaccgaggugaacgaguucgcgugcgucguggccgacgccgugaucaagacgcugcagccggucagcgagcuccugaccccccuggggaucgaccucgacgagugguccauggccaccuacuaccuguucgacgagagcggcgaguucaagcuggccucccacauguacugcagcuucuacccccccgacgaggacgaggaggagggggacugcgaggaggaggaguucgagccguccacccaguacgaguacggcacggaggacgacuaccagggcaagccccucgaguucggggcgaccagcgccgcccugcagcccgaggaggagcaggaggaggacuggcuggacgacgacucccagcagaccgugggccagcaggacgggagcgaggacaaccagaccacgaccauccagaccaucguggagguccagccccagcucgagauggagcugaccccgguggugcagacgaucgaggucaacuccuucagcggcuaccugaagcucaccgacaacguguacaucaagaacgccgacaucguggaggaggcgaagaaggucaagcccaccgugguggucaacgccgccaacguguaccugaagcacgggggcggcguggccggggcccugaacaaggcgaccaacaacgccaugcaggucgaguccgacgacuacaucgccacgaacggcccccucaagguggggggcagcugcguccuguccggccacaaccuggccaagcacugccuccacgugguggggcccaacgucaacaagggcgaggacauccagcugcugaagagcgccuacgagaacuucaaccagcacgaggugcuccuggcgccgcugcucuccgccgggaucuucggcgccgaccccauccacagccugcgggugugcgucgacaccgugcgcaccaacguguaccuggccgucuucgacaagaaccucuacgacaagcugguguccagcuuccuggagaugaagagcgagaagcagguggagcagaagaucgccgagauccccaaggaggaggucaagcccuucaucaccgaguccaagccgagcguggagcagcggaagcaggacgacaagaagaucaaggcgugcguggaggaggucacgaccacccucgaggagaccaaguuccugacggagaaccugcuccuguacaucgacaucaacgggaaccugcaccccgacuccgccacccucgugagcgacaucgacaucaccuuccugaagaaggacgcccccuacaucgugggcgacgucgugcaggagggcgugcugaccgccgucgugauccccacgaagaaggccgggggcaccaccgagaugcucgcgaaggcccugcgcaaggugccgaccgacaacuacaucacgaccuaccccgggcagggccugaacggguacaccgucgaggaggccaagaccgugcucaagaagugcaaguccgccuucuacauccugcccagcaucaucuccaacgagaagcaggagauccugggcaccgugagcuggaaccuccgggagaugcuggcgcacgccgaggagacgcgcaagcugaugcccgucugcguggagaccaaggccaucguguccaccauccagcggaaguacaagggcaucaagauccaggagggggucguggacuacggcgcccgcuucuacuucuacaccagcaagacgaccguggccucccugaucaacacccucaacgaccugaacgagacccuggucacgaugccgcucggguacgugacccacggccugaaccuggaggaggcggcccgguacaugcgcagccucaaggugcccgccaccgucuccgugagcucccccgacgccgugaccgccuacaacggguaccugacgagcuccagcaagacccccgaggagcacuucaucgagaccaucucccuggcgggcagcuacaaggacuggagcuacuccggccagagcacccagcucgggaucgaguuccugaagcggggcgacaaguccgucuacuacacgagcaacccgaccaccuuccaccuggacggggaggugaucaccuucgacaaccucaagacgcugcugucccuccgcgaggugcggaccaucaaggucuucaccaccguggacaacaucaaccugcacacgcagguggucgacaugagcaugaccuacggccagcaguucggccccaccuaccuggacggggccgacgugaccaagaucaagccccacaacucccacgagggcaagacguucuacgugcucccgaacgacgacacccugcgcgucgaggccuucgaguacuaccacaccaccgaccccagcuuccuggggcgguacauguccgcccucaaccacacgaagaaguggaaguacccccaggugaacggccugaccagcaucaagugggccgacaacaacugcuaccuggcgaccgcccuccugacccugcagcagaucgagcucaaguucaaccccccggcccugcaggacgccuacuaccgcgcgcgggccggggaggccgccaacuucugcgcccugauccucgcguacugcaacaagacggugggcgagcugggcgacguccgcgagaccauguccuaccuguuccagcacgccaaccucgacagcugcaagcgggugcugaacgucgugugcaagaccugcgggcagcagcagaccacccugaagggcguggaggccgucauguacauggggacgcucuccuacgagcaguucaagaagggcgugcagauccccugcaccugcgggaagcaggccaccaaguaccuggugcagcaggagagccccuucgucaugauguccgcccccccggcgcaguacgagcugaagcacggcaccuucacgugcgccagcgaguacaccggcaacuaccagugcgggcacuacaagcacaucaccuccaaggagacccucuacugcaucgacggcgcccugcugacgaagagcagcgaguacaaggggcccaucaccgacguguucuacaaggagaacuccuacaccaccacgaucaagcccgugaccuacaagcucgacggcgucgugugcaccgagaucgaccccaagcuggacaacuacuacaagaaggacaacagcuacuucaccgagcagccgaucgaccuggugcccaaccagcccuaccccaacgccuccuucgacaacuucaaguucgucugcgacaacaucaaguucgccgacgaccucaaccagcugacgggguacaagaagccggcgagccgcgagcugaaggugaccuucuuccccgaccucaacggcgacguggucgccaucgacuacaagcacuacacccccuccuucaagaagggcgccaagcugcugcacaagcccaucguguggcacgugaacaacgccaccaacaaggcgacguacaagccgaacaccuggugcauccggugccucuggagcaccaagcccgucgagaccuccaacagcuucgacgugcugaaguccgaggacgcccaggggauggacaaccuggccugcgaggaccucaagcccgugagcgaggaggucguggagaaccccacgauccagaaggacgugcuggagugcaacgucaagaccaccgagguggugggcgacaucauccugaagccggccaacaacucccucaagaucaccgaggaggucgggcacacggaccugauggccgcguacguggacaacagcucccugaccaucaagaagcccaacgagcucagccgcgugcugggccugaagacccucgccacccacgggcuggccgccgucaacuccgugcccugggacacgaucgccaacuacgcgaagccguuccugaacaagguggucagcaccaccaccaacaucgugacgcgcugccucaaccgggugugcaccaacuacaugcccuacuucuucacccugcugcuccagcugugcaccuucacccgcuccacgaacagccggaucaaggccuccaugcccaccaccaucgccaagaacaccgucaagagcgugggcaaguucugccuggaggccagcuucaacuaccucaagucccccaacuucagcaagcugaucaacaucaucaucugguuccugcuccuguccgugugccugggcagccucaucuacuccacggccgcgcuggggguccugaugagcaaccucggcaugccguccuacugcaccggguaccgcgagggcuaccugaacagcaccaacgugaccaucgccacguacugcaccggcuccauccccugcagcgugugccuguccgggcucgacagccuggacaccuaccccucccuggagaccauccagaucacgaucagcuccuucaagugggaccucaccgccuucggccuggucgccgagugguuccuggccuacauccucuucacccgguucuucuacgugcuggggcuggcggccaucaugcagcucuucuucagcuacuucgccgugcacuucaucuccaacagcuggcugauguggcugaucaucaaccugguccagauggcccccaucuccgcgauggugcgcauguacaucuucuucgugagcuucuacuacgucuggaagagcuacgugcacguggucgacggcugcaacuccagcaccugcaugaugugcuacaagcggaaccgcgccacgcggguggagugcaccaccaucgucaacggggugcgccgguccuucuacguguacgccaacggcggcaagggguucugcaagcuccacaacuggaacugcgucaacugcgacaccuucugcgccggcagcacguucaucuccgacgagguggcccgcgaccugagccugcaguucaagcggccgaucaaccccaccgaccaguccagcuacaucguggacuccgucaccgugaagaacgggagcauccaccucuacuucgacaaggcgggccagaagaccuacgagcgccacucccugagccacuucgugaaccuggacaaccuccgggccaacaacacgaaggggucccugcccaucaacgucaucguguucgacggcaagagcaagugcgaggaguccagcgccaaguccgccagcguguacuacucccagcugaugugccagcccauccuccugcuggaccaggcccucgucagcgacgugggcgacagcgcggagguggccgucaagauguucgacgccuacgugaacaccuucuccagcaccuucaacgugccgauggagaagcugaagacccuggucgccacggccgaggcggagcucgccaagaacgugucccuggacaacgugcugagcaccuucaucuccgccgcccgccagggguucgucgacagcgacguggagaccaaggacguggucgagugccucaagcugucccaccagagcgacaucgaggugaccggcgacuccugcaacaacuacaugcugacguacaacaagguggagaacaugaccccccgggaccucggggcgugcaucgacugcagcgcccgccacaucaacgcccaggucgccaagucccacaacaucgcccugaucuggaacgugaaggacuucaugagccuguccgagcagcuccggaagcagauccgcagcgcggccaagaagaacaaccugcccuucaagcugaccugcgccaccacgcgccagguggucaacguggugaccaccaagaucgcccucaagggcggguga

SEQ ID NO: 17780 - RNA, 5841 nt, Artificial Sequence
  SARS-CoV-2__MT831353.1__non-structural protein 3 (NSP3) CDS gc
auggcccccaccaaggugaccuucggcgacgacacggucaucgaggugcagggguacaagagcgugaacaucaccuucgagcuggacgagcgcaucgacaagguccucaacgagaagugcuccgccuacaccguggagcugggcaccgaggugaacgaguucgcgugcgucguggccgacgccgugaucaagacgcugcagccggucagcgagcuccugaccccccuggggaucgaccucgacgagugguccauggccaccuacuaccuguucgacgagagcggcgaguucaagcuggccucccacauguacugcagcuucuacccccccgacgaggacgaggaggagggggacugcgaggaggaggaguucgagccguccacccaguacgaguacggcacggaggacgacuaccagggcaagccccucgaguucggggcgaccagcgccgcccugcagcccgaggaggagcaggaggaggacuggcuggacgacgacucccagcagaccgugggccagcaggacgggagcgaggacaaccagaccacgaccauccagaccaucguggagguccagccccagcucgagauggagcugaccccgguggugcagacgaucgaggucaacuccuucagcggcuaccugaagcucaccgacaacguguacaucaagaacgccgacaucguggaggaggcgaagaaggucaagcccaccgugguggucaacgccgccaacguguaccugaagcacgggggcggcguggccggggcccugaacaaggcgaccaacaacgccaugcaggucgaguccgacgacuacaucgccacgaacggcccccucaagguggggggcagcugcguccuguccggccacaaccuggccaagcacugccuccacgugguggggcccaacgucaacaagggcgaggacauccagcugcugaagagcgccuacgagaacuucaaccagcacgaggugcuccuggcgccgcugcucuccgccgggaucuucggcgccgaccccauccacagccugcgggugugcgucgacaccgugcgcaccaacguguaccuggccgucuucgacaagaaccucuacgacaagcugguguccagcuuccuggagaugaagagcgagaagcagguggagcagaagaucgccgagauccccaaggaggaggucaagcccuucaucaccgaguccaagccgagcguggagcagcggaagcaggacgacaagaagaucaaggcgugcguggaggaggucacgaccacccucgaggagaccaaguuccugacggagaaccugcuccuguacaucgacaucaacgggaaccugcaccccgacuccgccacccucgugagcgacaucgacaucaccuuccugaagaaggacgcccccuacaucgugggcgacgucgugcaggagggcgugcugaccgccgucgugauccccacgaagaaggccgggggcaccaccgagaugcucgcgaaggcccugcgcaaggugccgaccgacaacuacaucacgaccuaccccgggcagggccugaacggguacaccgucgaggaggccaagaccgugcucaagaagugcaaguccgccuucuacauccugcccagcaucaucuccaacgagaagcaggagauccugggcaccgugagcuggaaccuccgggagaugcuggcgcacgccgaggagacgcgcaagcugaugcccgucugcguggagaccaaggccaucguguccaccauccagcggaaguacaagggcaucaagauccaggagggggucguggacuacggcgcccgcuucuacuucuacaccagcaagacgaccguggccucccugaucaacacccucaacgaccugaacgagacccuggucacgaugccgcucggguacgugacccacggccugaaccuggaggaggcggcccgguacaugcgcagccucaaggugcccgccaccgucuccgugagcucccccgacgccgugaccgccuacaacggguaccugacgagcuccagcaagacccccgaggagcacuucaucgagaccaucucccuggcgggcagcuacaaggacuggagcuacuccggccagagcacccagcucgggaucgaguuccugaagcggggcgacaaguccgucuacuacacgagcaacccgaccaccuuccaccuggacggggaggugaucaccuucgacaaccucaagacgcugcugucccuccgcgaggugcggaccaucaaggucuucaccaccguggacaacaucaaccugcacacgcagguggucgacaugagcaugaccuacggccagcaguucggccccaccuaccuggacggggccgacgugaccaagaucaagccccacaacucccacgagggcaagacguucuacgugcucccgaacgacgacacccugcgcgucgaggccuucgaguacuaccacaccaccgaccccagcuuccuggggcgguacauguccgcccucaaccacacgaagaaguggaaguacccccaggugaacggccugaccagcaucaagugggccgacaacaacugcuaccuggcgaccgcccuccugacccugcagcagaucgagcucaaguucaaccccccggcccugcaggacgccuacuaccgcgcgcgggccggggaggccgccaacuucugcgcccugauccucgcguacugcaacaagacggugggcgagcugggcgacguccgcgagaccauguccuaccuguuccagcacgccaaccucgacagcugcaagcgggugcugaacgucgugugcaagaccugcgggcagcagcagaccacccugaagggcguggaggccgucauguacauggggacgcucuccuacgagcaguucaagaagggcgugcagauccccugcaccugcgggaagcaggccaccaaguaccuggugcagcaggagagccccuucgucaugauguccgcccccccggcgcaguacgagcugaagcacggcaccuucacgugcgccagcgaguacaccggcaacuaccagugcgggcacuacaagcacaucaccuccaaggagacccucuacugcaucgacggcgcccugcugacgaagagcagcgaguacaaggggcccaucaccgacguguucuacaaggagaacuccuacaccaccacgaucaagcccgugaccuacaagcucgacggcgucgugugcaccgagaucgaccccaagcuggacaacuacuacaagaaggacaacagcuacuucaccgagcagccgaucgaccuggugcccaaccagcccuaccccaacgccuccuucgacaacuucaaguucgucugcgacaacaucaaguucgccgacgaccucaaccagcugacgggguacaagaagccggcgagccgcgagcugaaggugaccuucuuccccgaccucaacggcgacguggucgccaucgacuacaagcacuacacccccuccuucaagaagggcgccaagcugcugcacaagcccaucguguggcacgugaacaacgccaccaacaaggcgacguacaagccgaacaccuggugcauccggugccucuggagcaccaagcccgucgagaccuccaacagcuucgacgugcugaaguccgaggacgcccaggggauggacaaccuggccugcgaggaccucaagcccgugagcgaggaggucguggagaaccccacgauccagaaggacgugcuggagugcaacgucaagaccaccgagguggugggcgacaucauccugaagccggccaacaacucccucaagaucaccgaggaggucgggcacacggaccugauggccgcguacguggacaacagcucccugaccaucaagaagcccaacgagcucagccgcgugcugggccugaagacccucgccacccacgggcuggccgccgucaacuccgugcccugggacacgaucgccaacuacgcgaagccguuccugaacaagguggucagcaccaccaccaacaucgugacgcgcugccucaaccgggugugcaccaacuacaugcccuacuucuucacccugcugcuccagcugugcaccuucacccgcuccacgaacagccggaucaaggccuccaugcccaccaccaucgccaagaacaccgucaagagcgugggcaaguucugccuggaggccagcuucaacuaccucaagucccccaacuucagcaagcugaucaacaucaucaucugguuccugcuccuguccgugugccugggcagccucaucuacuccacggccgcgcuggggguccugaugagcaaccucggcaugccguccuacugcaccggguaccgcgagggcuaccugaacagcaccaacgugaccaucgccacguacugcaccggcuccauccccugcagcgugugccuguccgggcucgacagccuggacaccuaccccucccuggagaccauccagaucacgaucagcuccuucaagugggaccucaccgccuucggccuggucgccgagugguuccuggccuacauccucuucacccgguucuucuacgugcuggggcuggcggccaucaugcagcucuucuucagcuacuucgccgugcacuucaucuccaacagcuggcugauguggcugaucaucaaccugguccagauggcccccaucuccgcgauggugcgcauguacaucuucuucgccagcuucuacuacguguggaagagcuacguccacgugguggacggcugcaacuccagcaccugcaugaugugcuacaagcggaaccgcgccacgcgggucgagugcaccaccaucgugaacgggguccgccgguccuucuacguguacgccaacggcggcaagggguucugcaagcuccacaacuggaacugcgugaacugcgacaccuucugcgccggcagcacguucaucuccgacgaggucgcgcgcgaccugagccugcaguucaagcggccgaucaaccccaccgaccaguccagcuacaucguggacuccgugaccgucaagaacgggagcauccaccucuacuucgacaaggccggccagaagaccuacgagcgccacucccugagccacuucgugaaccuggacaaccuccgggccaacaacacgaaggggucccugcccaucaacgugaucgucuucgacggcaagagcaagugcgaggaguccagcgccaaguccgccagcguguacuacucccagcugaugugccagcccauccuccugcuggaccaggcgcucgugagcgacgucggcgacagcgccgagguggccgugaagauguucgacgccuacgucaacaccuucuccagcaccuucaacgugccgauggagaagcugaagacccugguggccacggcggaggccgagcucgccaagaacgucucccuggacaacgugcugagcaccuucaucuccgccgugcgccagggguucgucgacagcgacguggagaccaaggacguggucgagugccucaagcugucccaccagagcgacaucgaggugaccggcgacuccugcaacaacuacaugcugacguacaacaagguggagaacaugaccccccgggaccucggggcgugcaucgacugcagcgcccgccacaucaacgcccaggucgccaagucccacaacaucgcccugaucuggaacgugaaggacuucaugagccuguccgagcagcuccggaagcagauccgcagcgcggccaagaagaacaaccugcccuucaagcugaccugcgccaccacgcgccagguggucaacguggugaccaccaagaucgcccucaagggcggguga

SEQ ID NO: 17781 - RNA, 5841 nt, Artificial Sequence
  SARS-CoV-2__MT831405.1__non-structural protein 3 (NSP3) CDS gc
auggcccccaccaaggugaccuucggcgacgacacggucaucgaggugcagggguacaagagcgugaacaucaccuucgagcuggacgagcgcaucgacaagguccucaacgagaagugcuccgccuacaccguggagcugggcaccgaggugaacgaguucgcgugcgucguggccgacgccgugaucaagacgcugcagccggucagcgagcuccugaccccccuggggaucgaccucgacgagugguccauggccaccuacuaccuguucgacgagagcggcgaguucaagcuggccucccacauguacugcagcuucuacccccccgacgaggacgaggaggagggggacugcgaggaggaggaguucgagccguccacccaguacgaguacggcacggaggacgacuaccagggcaagccccucgaguucggggcgaccagcgccgcccugcagcccgaggaggagcaggaggaggacuggcuggacgacgacucccagcagaccgugggccagcaggacgggagcgaggacaaccagaccacgaccauccagaccaucguggagguccagccccagcucgagauggagcugaccccgguggugcagacgaucgaggucaacuccuucagcggcuaccugaagcucaccgacaacguguacaucaagaacgccgacaucguggaggaggcgaagaaggucaagcccaccgugguggucaacgccgccaacguguaccugaagcacgggggcggcguggccggggcccugaacaaggcgaccaacaacgccaugcaggucgaguccgacgacuacaucgccacgaacggcccccucaagguggggggcagcugcguccuguccggccacaaccuggccaagcacugccuccacgugguggggcccaacgucaacaagggcgaggacauccagcugcugaagagcgccuacgagaacuucaaccagcacgaggugcuccuggcgccgcugcucuccgccgggaucuucggcgccgaccccauccacagccugcgggugugcgucgacaccgugcgcaccaacguguaccuggccgucuucgacaagaaccucuacgacaagcugguguccagcuuccuggagaugaagagcgagaagcagguggagcagaagaucgccgagauccccaaggaggaggucaagcccuucaucaccgaguccaagccgagcguggagcagcggaagcaggacgacaagaagaucaaggcgugcguggaggaggucacgaccacccucgaggagaccaaguuccugacggagaaccugcuccuguacaucgacaucaacgggaaccugcaccccgacuccgccacccucgugagcgacaucgacaucaccuuccugaagaaggacgcccccuacaucgugggcgacgucgugcaggagggcgugcugaccgccgucgugauccccacgaagaaggccgggggcaccaccgagaugcucgcgaaggcccugcgcaaggugccgaccgacaacuacaucacgaccuaccccgggcagggccugaacggguacaccgucgaggaggccaagaccgugcucaagaagugcaaguccgccuucuacauccugcccagcaucaucuccaacgagaagcaggagauccugggcaccgugagcuggaaccuccgggagaugcuggcgcacgccgaggagacgcgcaagcugaugcccgucugcguggagaccaaggccaucguguccaccauccagcggaaguacaagggcaucaagauccaggagggggucguggacuacggcgcccgcuucuacuucuacaccagcaagacgaccguggccucccugaucaacacccucaacgaccugaacgagacccuggucacgaugccgcucggguacgugacccacggccugaaccuggaggaggcggcccgguacaugcgcagccucaaggugcccgccaccgucuccgugagcucccccgacgccgugaccgccuacaacggguaccugacgagcuccagcaagacccccgaggagcacuucaucgagaccaucucccuggcgggcagcuacaaggacuggagcuacuccggccagagcacccagcucgggaucgaguuccugaagcggggcgacaaguccgucuacuacacgagcaacccgaccaccuuccaccuggacggggaggugaucaccuucgacaaccucaagacgcugcugucccuccgcgaggugcggaccaucaaggucuucaccaccguggacaacaucaaccugcacacgcagguggucgacaugagcaugaccuacggccagcaguucggccccaccuaccuggacggggccgacgugaccaagaucaagccccacaacucccacgagggcaagacguucuacgugcucccgaacgacgacacccugcgcgucgaggccuucgaguacuaccacaccaccgaccccagcuuccuggggcgguacauguccgcccucaaccacacgaagaaguggaaguacccccaggugaacggccugaccagcaucaagugggccgacaacaacugcuaccuggcgaccgcccuccugacccugcagcagaucgagcucaaguucaaccccccggcccugcaggacgccuacuaccgcgcgcgggccggggaggccgccaacuucugcgcccugauccucgcguacugcaacaagacggugggcgagcugggcgacguccgcgagaccauguccuaccuguuccagcacgccaaccucgacagcugcaagcgggugcugaacgucgugugcaagaccugcgggcagcagcagaccacccugaagggcguggaggccgucauguacauggggacgcucuccuacgagcaguucaagaagggcgugcagauccccugcaccugcgggaagcaggccaccaaguaccuggugcagcaggagagccccuucgucaugauguccgcccccccggcgcaguacgagcugaagcacggcaccuucacgugcgccagcgaguacaccggcaacuaccagugcgggcacuacaagcacaucaccuccaaggagacccucuacugcaucgacggcgcccugcugacgaagagcagcgaguacaaggggcccaucaccgacguguucuacaaggagaacuccuacaccaccacgaucaagcccgugaccuacaagcucgacggcgucgugugcaccgagaucgaccccaagcuggacaacuacuacaagaaggacaacagcuacuucaccgagcagccgaucgaccuggugcccaaccagcccuaccccaacgccuccuucgacaacuucaaguucgucugcgacaacaucaaguucgccgacgaccucaaccagcugacgggguacaagaagccggcgagccgcgagcugaaggugaccuucuuccccgaccucaacggcgacguggucgccaucgacuacaagcacuacacccccuccuucaagaagggcgccaagcugcugcacaagcccaucguguggcacgugaacaacgccaccaacaaggcgacguacaagccgaacaccuggugcauccggugccucuggagcaccaagcccgucgagaccuccaacagcuucgacgugcugaaguccgaggacgcccaggggauggacaaccuggccugcgaggaccucaagcccgugagcgaggaggucguggagaaccccacgauccagaaggacgugcuggagugcaacgucaagaccaccgagguggugggcgacaucauccugaagccggccaacaacucccucaagaucaccgaggaggucgggcacacggaccugauggccgcguacguggacaacagcucccugaccaucaagaagcccaacgagcucagccgcgugcugggccugaagacccucgccacccacgggcuggccgccgucaacuccgugcccugggacacgaucgccaacuacgcgaagccguuccugaacaagguggucagcaccaccaccaacaucgugacgcgcugccucaaccgggugugcaccaacuacaugcccuacuucuucacccugcugcuccagcugugcaccuucacccgcuccacgaacagccggaucaaggccuccaugcccaccaccaucgccaagaacaccgucaagagcgugggcaaguucugccuggaggccagcuucaacuaccucaagucccccaacuucagcaagcugaucaacaucaucaucugguuccugcuccuguccgugugccugggcagccucaucuacuccacggccgcgcuggggguccugaugagcaaccucggcaugccguccuacugcaccggguaccgcgagggcuaccugaacagcaccaacgugaccaucgccacguacugcaccggcuccauccccugcagcgugugccuguccgggcucgacagccuggacaccuaccccucccuggagaccauccagaucacgaucagcuccuucaagugggaccucaccgccuucggccuggucgccgagugguuccuggccuacauccucuucacccgguucuucuacgugcuggggcuggcggccaucaugcagcucuucuucagcuacuucgccgugcacuucaucuccaacagcuggcugauguggcugaucaucaaccugguccagauggcccccaucuccgcgauggugcgcauguacaucuucuucgccagcuucuacuacguguggaagagcuacguccacgugguggacggcugcaacuccagcaccugcaugaugugcuacaagcggaaccgcgccacgcgggucgagugcaccaccaucgugaacgggguccgccgguccuucuacguguacgccaacggcggcaagggguucugcaagcuccacaacuggaacugcgugaacugcgacaccuucugcgccggcagcacguucaucuccgacgaggucgcgcgcgaccugagccugcaguucaagcggccgaucaaccccaccgaccaguccagcuacaucguggacuccgugaccgucaagaacgggagcauccaccucuacuucgacaaggccggccagaacaccuacgagcgccacucccugagccacuucgugaaccuggacaaccuccgggccaacaacacgaaggggucccugcccaucaacgugaucgucuucgacggcaagagcaagugcgaggaguccagcgccaaguccgccagcguguacuacucccagcugaugugccagcccauccuccugcuggaccaggcgcucgugagcgacgucggcgacagcgccgagguggccgugaagauguucgacgccuacgucaacaccuucuccagcaccuucaacgugccgauggagaagcugaagacccugguggccacggcggaggccgagcucgccaagaacgucucccuggacaacgugcugagcaccuucaucuccgccgcgcgccagggguucguggacagcgacgucgagaccaaggacgugguggagugccucaagcugucccaccagagcgacaucgaggucaccggcgacuccugcaacaacuacaugcugacguacaacaagguggagaacaugaccccccgggaccucggggccugcaucgacugcagcgcccgccacaucaacgcccagguggccaagucccacaacaucgcgcugaucuggaacgucaaggacuucaugagccuguccgagcagcuccggaagcagauccgcagcgccgccaagaagaacaaccugcccuucaagcugaccugcgccaccacgcgccagguggugaacgucgugaccaccaagaucgcccucaagggcggguga

SEQ ID NO: 17782 - RNA, 5841 nt, Artificial Sequence
  SARS-CoV-2__MT831416.1__non-structural protein 3 (NSP3) CDS gc
auggcccccaccaaggugaccuucggcgacgacacggucaucgaggugcagggguacaagagcgugaacaucaccuucgagcuggacgagcgcaucgacaagguccucaacgagaagugcuccgccuacaccguggagcugggcaccgaggugaacgaguucgcgugcgucguggccgacgccgugaucaagacgcugcagccggucagcgagcuccugaccccccuggggaucgaccucgacgagugguccauggccaccuacuaccuguucgacgagagcggcgaguucaagcuggccucccacauguacugcagcuucuacccccccgacgaggacgaggaggagggggacugcgaggaggaggaguucgagccguccacccaguacgaguacggcacggaggacgacuaccagggcaagccccucgaguucggggcgaccagcgccgcccugcagcccgaggaggagcaggaggaggacuggcuggacgacgacucccagcagaccgugggccagcaggacgggagcgaggacaaccagaccacgaccauccagaccaucguggagguccagccccagcucgagauggagcugaccccgguggugcagacgaucgaggucaacuccuucagcggcuaccugaagcucaccgacaacguguacaucaagaacgccgacaucguggaggaggcgaagaaggucaagcccaccgugguggucaacgccgccaacguguaccugaagcacgggggcggcguggccggggcccugaacaaggcgaccaacaacgccaugcaggucgaguccgacgacuacaucgccacgaacggcccccucaagguggggggcagcugcguccuguccggccacaaccuggccaagcacugccuccacgugguggggcccaacgucaacaagggcgaggacauccagcugcugaagagcgccuacgagaacuucaaccagcacgaggugcuccuggcgccgcugcucuccgccgggaucuucggcgccgaccccauccacagccugcgggugugcgucgacaccgugcgcaccaacguguaccuggccgucuucgacaagaaccucuacgacaagcugguguccagcuuccuggagaugaagagcgagaagcagguggagcagaagaucgccgagauccccaaggaggaggucaagcccuucaucaccgaguccaagccgagcguggagcagcggaagcaggacgacaagaagaucaaggcgugcguggaggaggucacgaccacccucgaggagaccaaguuccugacggagaaccugcuccuguacaucgacaucaacgggaaccugcaccccgacuccgccacccucgugagcgacaucgacaucaccuuccugaagaaggacgcccccuacaucgugggcgacgucgugcaggagggcgugcugaccgccgucgugauccccacgaagaaggccgggggcaccaccgagaugcucgcgaaggcccugcgcaaggugccgaccgacaacuacaucacgaccuaccccgggcagggccugaacggguacaccgucgaggaggccaagaccgugcucaagaagugcaaguccgccuucuacauccugcccagcaucaucuccaacgagaagcaggagauccugggcaccgugagcuggaaccuccgggagaugcuggcgcacgccgaggagacgcgcaagcugaugcccgucugcguggagaccaaggccaucguguccaccauccagcggaaguacaagggcaucaagauccaggagggggucguggacuacggcgcccgcuucuacuucuacaccagcaagacgaccguggccucccugaucaacacccucaacgaccugaacgagacccuggucacgaugccgcucggguacgugacccacggccugaaccuggaggaggcggcccgguacaugcgcagccucaaggugcccgccaccgucuccgugagcucccccgacgccgugaccgccuacaacggguaccugacgagcuccagcaagacccccgaggagcacuucaucgagaccaucucccuggcgggcagcuacaaggacuggagcuacuccggccagagcacccagcucgggaucgaguuccugaagcggggcgacaaguccgucuacuacacgagcaacccgaccaccuuccaccuggacggggaggugaucaccuucgacaaccucaagacgcugcugucccuccgcgaggugcggaccaucaaggucuucaccaccguggacaacaucaaccugcacacgcagguggucgacaugagcaugaccuacggccagcaguucggccccaccuaccuggacggggccgacgugaccaagaucaagccccacaacucccacgagggcaagacguucuacgugcucccgaacgacgacacccugcgcgucgaggccuucgaguacuaccacaccaccgaccccagcuuccuggggcgguacauguccgcccucaaccacacgaagaaguggaaguacccccaggugaacggccugaccagcaucaagugggccgacaacaacugcuaccuggcgaccgcccuccugacccugcagcagaucgagcucaaguucaaccccccggcccugcaggacgccuacuaccgcgcgcgggccggggaggccgccaacuucugcgcccugauccucgcguacugcaacaagacggugggcgagcugggcgacguccgcgagaccauguccuaccuguuccagcacgccaaccucgacagcugcaagcgggugcugaacgucgugugcaagaccugcgggcagcagcagaccacccugaagggcguggaggccgucauguacauggggacgcucuccuacgagcaguucaagaagggcgugcagauccccugcaccugcgggaagcaggccaccaaguaccuggugcagcaggagagccccuucgucaugauguccgcccccccggcgcaguacgagcugaagcacggcaccuucacgugcgccagcgaguacaccggcaacuaccagugcgggcacuacaagcacaucaccuccaaggagacccucuacugcaucgacggcgcccugcugacgaagagcagcgaguacaaggggcccaucaccgacguguucuacaaggagaacuccuacaccaccacgaucaagcccgugaccuacaagcucgacggcgucgugugcaccgagaucgaccccaagcuggacaacuacuacaagaaggacaacagcuacuucaccgagcagccgaucgaccuggugcccaaccagcccuaccccaacgccuccuucgacaacuucaaguucgucugcgacaacaucaaguucgccgacgaccucaaccagcugacgggguacaagaagccggcgagccgcgagcugaaggugaccuucuuccccgaccucaacggcgacguggucgccaucgacuacaagcacuacacccccuccuucaagaagggcgccaagcugcugcacaagcccaucguguggcacgugaacaacgccaccaacaaggcgacguacaagccgaacaccuggugcauccggugccucuggagcaccaagcccgucgagaccuccaacagcuucgacgugcugaaguccgaggacgcccaggggauggacaaccuggccugcgaggaccucaagcccgugagcgaggaggucguggagaaccccacgauccagaaggacgugcuggagugcaacgucaagaccaccgagguggugggcgacaucauccugaagccggccaacaacucccucaagaucaccgaggaggucgggcacacggaccugauggccgcguacguggacaacagcucccugaccaucaagaagcccaacgagcucagccgcgugcugggccugaagacccucgccacccacgggcuggccgccgucaacuccgugcccugggacacgaucgccaacuacgcgaagccguuccugaacaagguggucagcaccaccaccaacaucgugacgcgcugccucaaccgggugugcaccaacuacaugcccuacuucuucacccugcugcuccagcugugcaccuucacccgcuccacgaacagccggaucaaggccuccaugcccaccaccaucgccaagaacaccgucaagagcgugggcaaguucugccuggaggccagcuucaacuaccucaagucccccaacuucagcaagcugaucaacaucaucaucugguuccugcuccuguccgugugccugggcagccucaucuacuccacggccgcgcuggggguccugaugagcaaccucggcaugccguccuacugcaccggguaccgcgagggcuaccugaacagcaccaacgugaccaucgccacguacugcaccggcuccauccccugcagcgugugccuguccgggcucgacagccuggacaccuaccccucccuggagaccauccagaucacgaucagcuccuucaagugggaccucaccgccuucggccuggucgccgagugguuccuggccuacauccucuucacccgguucuucuacgugcuggggcuggcggccaucaugcagcucuucuucagcuacuucgccgugcacuucaucuccaacagcuggcugauguggcugaucaucaaccugguccagauggcccccaucuccgcgauggugcgcauguacaucuucuucgccagcuucuacuacguguggaagagcuacguccacgugguggacggcugcaacuccagcaccugcaugaugugcuacaagcggaaccgcgccacgcgggucgagugcaccaccaucgugaacgggguccgccgguccuucuacguguacgccaacggcggcaagggguucugcaagcuccacaacuggaacugcgugaacugcgacaccuucugcgccggcagcacguucaucuccgacgaggucgcgcgcgaccugagccugcaguucaagcggccgaucaaccccaccgaccaguccagcuacaucguggacuccgugaccgucaagaacgggagcauccaccucuacuucgacaaggccggccagaagaccuacgagcgccacucccugagccacuucgugaaccuggacaaccuccgggccaacaacacgaaggggucccugcccaucagcgugaucgucuucgacggcaaguccaagugcgaggagagcuccgccaagagcgccuccguguacuacagccagcugaugugccagcccauccuccugcuggaccaggcgcucgugagcgacgucggcgacuccgccgagguggccgugaagauguucgacgccuacgucaacaccuucagcuccaccuucaacgugccgauggagaagcugaagacccugguggccacggcggaggccgagcucgccaagaacgucagccuggacaacgugcuguccaccuucaucagcgccgcgcgccagggguucguggacuccgacgucgagaccaaggacgugguggagugccucaagcugagccaccaguccgacaucgaggucaccggcgacagcugcaacaacuacaugcugacguacaacaagguggagaacaugaccccccgggaccucggggccugcaucgacugcuccgcccgccacaucaacgcccagguggccaagagccacaacaucgcgcugaucuggaacgucaaggacuucaugucccugagcgagcagcuccggaagcagauccgcuccgccgccaagaagaacaaccugcccuucaagcugaccugcgccaccacgcgccagguggugaacgucgugaccaccaagaucgcccucaagggcggguga

SEQ ID NO: 17783 - RNA, 5841 nt, Artificial Sequence
  SARS-CoV-2__MT831444.1__non-structural protein 3 (NSP3) CDS gc
auggcccccaccaaggugaccuucggcgacgacacggucaucgaggugcagggguacaagagcgugaacaucaccuucgagcuggacgagcgcaucgacaagguccucaacgagaagugcuccgccuacaccguggagcugggcaccgaggugaacgaguucgcgugcgucguggccgacgccgugaucaagacgcugcagccggucagcgagcuccugaccccccuggggaucgaccucgacgagugguccauggccaccuacuaccuguucgacgagagcggcgaguucaagcuggccucccacauguacugcagcuucuacccccccgacgaggacgaggaggagggggacugcgaggaggaggaguucgagccguccacccaguacgaguacggcacggaggacgacuaccagggcaagccccucgaguucggggcgaccagcgccgcccugcagcccgaggaggagcaggaggaggacuggcuggacgacgacucccagcagaccgugggccagcaggacgggagcgaggacaaccagaccacgaccauccagaccaucguggagguccagccccagcucgagauggagcugaccccgguggugcagacgaucgaggucaacuccuucagcggcuaccugaagcucaccaacaacguguacaucaagaacgccgacaucguggaggaggcgaagaaggucaagcccaccgugguggucaacgccgccaacguguaccugaagcacgggggcggcguggccggggcccugaacaaggcgaccaacaacgccaugcaggucgaguccgacgacuacaucgccacgaacggcccccucaagguggggggcagcugcguccuguccggccacaaccuggccaagcacugccuccacgugguggggcccaacgucaacaagggcgaggacauccagcugcugaagagcgccuacgagaacuucaaccagcacgaggugcuccuggcgccgcugcucuccgccgggaucuucggcgccgaccccauccacagccugcgggugugcgucgacaccgugcgcaccaacguguaccuggccgucuucgacaagaaccucuacgacaagcugguguccagcuuccuggagaugaagagcgagaagcagguggagcagaagaucgccgagauccccaaggaggaggucaagcccuucaucaccgaguccaagccgagcguggagcagcggaagcaggacgacaagaagaucaaggcgugcguggaggaggucacgaccacccucgaggagaccaaguuccugacggagaaccugcuccuguacaucgacaucaacgggaaccugcaccccgacuccgccacccucgugagcgacaucgacaucaccuuccugaagaaggacgcccccuacaucgugggcgacgucgugcaggagggcgugcugaccgccgucgugauccccacgaagaaggccgggggcaccaccgagaugcucgcgaaggcccugcgcaaggugccgaccgacaacuacaucacgaccuaccccgggcagggccugaacggguacaccgucgaggaggccaagaccgugcucaagaagugcaaguccgccuucuacauccugcccagcaucaucuccaacgagaagcaggagauccugggcaccgugagcuggaaccuccgggagaugcuggcgcacgccgaggagacgcgcaagcugaugcccgucugcguggagaccaaggccaucguguccaccauccagcggaaguacaagggcaucaagauccaggagggggucguggacuacggcgcccgcuucuacuucuacaccagcaagacgaccguggccucccugaucaacacccucaacgaccugaacgagacccuggucacgaugccgcucggguacgugacccacggccugaaccuggaggaggcggcccgguacaugcgcagccucaaggugcccgccaccgucuccgugagcucccccgacgccgugaccgccuacaacggguaccugacgagcuccagcaagacccccgaggagcacuucaucgagaccaucucccuggcgggcagcuacaaggacuggagcuacuccggccagagcacccagcucgggaucgaguuccugaagcggggcgacaaguccgucuacuacacgagcaacccgaccaccuuccaccuggacggggaggugaucaccuucgacaaccucaagacgcugcugucccuccgcgaggugcggaccaucaaggucuucaccaccguggacaacaucaaccugcacacgcagguggucgacaugagcaugaccuacggccagcaguucggccccaccuaccuggacggggccgacgugaccaagaucaagccccacaacucccacgagggcaagacguucuacgugcucccgaacgacgacacccugcgcgucgaggccuucgaguacuaccacaccaccgaccccagcuuccuggggcgguacauguccgcccucaaccacacgaagaaguggaaguacccccaggugaacggccugaccagcaucaagugggccgacaacaacugcuaccuggcgaccgcccuccugacccugcagcagaucgagcucaaguucaaccccccggcccugcaggacgccuacuaccgcgcgcgggccggggaggccgccaacuucugcgcccugauccucgcguacugcaacaagacggugggcgagcugggcgacguccgcgagaccauguccuaccuguuccagcacgccaaccucgacagcugcaagcgggugcugaacgucgugugcaagaccugcgggcagcagcagaccacccugaagggcguggaggccgucauguacauggggacgcucuccuacgagcaguucaagaagggcgugcagauccccugcaccugcgggaagcaggccaccaaguaccuggugcagcaggagagccccuucgucaugauguccgcccccccggcgcaguacgagcugaagcacggcaccuucacgugcgccagcgaguacaccggcaacuaccagugcgggcacuacaagcacaucaccuccaaggagacccucuacugcaucgacggcgcccugcugacgaagagcagcgaguacaaggggcccaucaccgacguguucuacaaggagaacuccuacaccaccacgaucaagcccgugaccuacaagcucgacggcgucgugugcaccgagaucgaccccaagcuggacaacuacuacaagaaggacaacagcuacuucaccgagcagccgaucgaccuggugcccaaccagcccuaccccaacgccuccuucgacaacuucaaguucgucugcgacaacaucaaguucgccgacgaccucaaccagcugacgggguacaagaagccggcgagccgcgagcugaaggugaccuucuuccccgaccucaacggcgacguggucgccaucgacuacaagcacuacacccccuccuucaagaagggcgccaagcugcugcacaagcccaucguguggcacgugaacaacgccaccaacaaggcgacguacaagccgaacaccuggugcauccggugccucuggagcaccaagcccgucgagaccuccaacagcuucgacgugcugaaguccgaggacgcccaggggauggacaaccuggccugcgaggaccucaagcccgugagcgaggaggucguggagaaccccacgauccagaaggacgugcuggagugcaacgucaagaccaccgagguggugggcgacaucauccugaagccggccaacaacucccucaagaucaccgaggaggucgggcacacggaccugauggccgcguacguggacaacagcucccugaccaucaagaagcccaacgagcucagccgcgugcugggccugaagacccucgccacccacgggcuggccgccgucaacuccgugcccugggacacgaucgccaacuacgcgaagccguuccugaacaagguggucagcaccaccaccaacaucgugacgcgcugccucaaccgggugugcaccaacuacaugcccuacuucuucacccugcugcuccagcugugcaccuucacccgcuccacgaacagccggaucaaggccuccaugcccaccaccaucgccaagaacaccgucaagagcgugggcaaguucugccuggaggccagcuucaacuaccucaagucccccaacuucagcaagcugaucaacaucaucaucugguuccugcuccuguccgugugccugggcagccucaucuacuccacggccgcgcuggggguccugaugagcaaccucggcaugccguccuacugcaccggguaccgcgagggcuaccugaacagcaccaacgugaccaucgccacguacugcaccggcuccauccccugcagcgugugccuguccgggcucgacagccuggacaccuaccccucccuggagaccauccagaucacgaucagcuccuucaagugggaccucaccgccuucggccuggucgccgagugguuccuggccuacauccucuucacccgguucuucuacgugcuggggcuggcggccaucaugcagcucuucuucagcuacuucgccgugcacuucaucuccaacagcuggcugauguggcugaucaucaaccugguccagauggcccccaucuccgcgauggugcgcauguacaucuucuucgccagcuucuacuacguguggaagagcuacguccacgugguggacggcugcaacuccagcaccugcaugaugugcuacaagcggaaccgcgccacgcgggucgagugcaccaccaucgugaacgggguccgccgguccuucuacguguacgccaacggcggcaagggguucugcaagcuccacaacuggaacugcgugaacugcgacaccuucugcgccggcagcacguucaucuccgacgaggucgcgcgcgaccugagccugcaguucaagcggccgaucaaccccaccgaccaguccagcuacaucguggacuccgugaccgucaagaacgggagcauccaccucuacuucgacaaggccggccagaagaccuacgagcgccacucccugagccacuucgugaaccuggacaaccuccgggccaacaacacgaaggggucccugcccaucaacgugaucgucuucgacggcaagagcaagugcgaggaguccagcgccaaguccgccagcguguacuacucccagcugaugugccagcccauccuccugcuggaccaggcgcucgugagcgacgucggcgacagcgccgagguggccgugaagauguucgacgccuacgucaacaccuucuccagcaccuucaacgugccgauggagaagcugaagacccugguggccacggcggaggccgagcucgccaagaacgucucccuggacaacgugcugagcaccuucaucuccgccgcgcgccagggguucguggacagcgacgucgagaccaaggacgugguggagugccucaagcugucccaccagagcgacaucgaggucaccggcgacuccugcaacaacuacaugcugacguacaacaagguggagaacaugaccccccgggaccucggggccugcaucgacugcagcgcccgccacaucaacgcccagguggccaagucccacaacaucgcgcugaucuggaacgucaaggacuucaugagccuguccgagcagcuccggaagcagauccgcagcgccgccaagaagaacaaccugcccuucaagcugaccugcgccaccacgcgccagguggugaacgucgugaccaccaagaucgcccucaagggcggguga

SEQ ID NO: 17784 - RNA, 5841 nt, Artificial Sequence
  SARS-CoV-2__MT831463.1__non-structural protein 3 (NSP3) CDS gc
auggcccccaccaaggugaccuucggcgacgacacggucaucgaggugcagggguacaagagcgugaacaucaccuucgagcuggacgagcgcaucgacaagguccucaacgagaagugcuccgccuacaccguggagcugggcaccgaggugaacgaguucgcgugcgucguggccgacgccgugaucaagacgcugcagccggucagcgagcuccugaccccccuggggaucgaccucgacgagugguccauggccaccuacuaccuguucgacgagagcggcgaguucaagcuggccucccacauguacugcagcuucuacccccccgacgaggacgaggaggagggggacugcgaggaggaggaguucgagccguccacccaguacgaguacggcacggaggacgacuaccagggcaagccccucgaguucggggcgaccagcgccgcccugcagcccgaggaggagcaggaggaggacuggcuggacgacgacucccagcagaccgugggccagcaggacgggagcgaggacaaccagaccacgaccauccagaccaucguggagguccagccccagcucgagauggagcugaccccgguggugcagacgaucgaggucaacuccuucagcggcuaccugaagcucaccgacaacguguacaucaagaacgccgacaucguggaggaggcgaagaaggucaagcccaccgugguggucaacgccgccaacguguaccugaagcacgggggcggcguggccggggcccugaacaaggcgaccaacaacgccaugcaggucgaguccgacgacuacaucgccacgaacggcccccucaagguggggggcagcugcguccuguccggccacaaccuggccaagcacugccuccacgugguggggcccaacgucaacaagggcgaggacauccagcugcugaagagcgccuacgagaacuucaaccagcacgaggugcuccuggcgccgcugcucuccgccgggaucuucggcgccgaccccauccacagccugcgggugugcgucgacaccgugcgcaccaacguguaccuggccgucuucgacaagaaccucuacgacaagcugguguccagcuuccuggagaugaagagcgagaagcagguggagcagaagaucgccgagauccccaaggaggaggucaagcccuucaucaccgaguccaagccgagcguggagcagcggaagcaggacgacaagaagaucaaggcgugcguggaggaggucacgaccacccucgaggagaccaaguuccugacggagaaccugcuccuguacaucgacaucaacgggaaccugcaccccgacuccgccacccucgugagcgacaucgacaucaccuuccugaagaaggacgcccccuacaucgugggcgacgucgugcaggagggcgugcugaccgccgucgugauccccacgaagaaggccgggggcaccaccgagaugcucgcgaaggcccugcgcaaggugccgaccgacaacuacaucacgaccuaccccgggcagggccugaacggguacaccgucgaggaggccaagaccgugcucaagaagugcaaguccgccuucuacauccugcccagcaucaucuccaacgagaagcaggagauccugggcaccgugagcuggaaccuccgggagaugcuggcgcacgccgaggagacgcgcaagcugaugcccgucugcguggagaccaaggccaucguguccaccauccagcggaaguacaagggcaucaagauccaggagggggucguggacuacggcgcccgcuucuacuucuacaccagcaagacgaccguggccucccugaucaacacccucaacgaccugaacgagacccuggucacgaugccgcucggguacgugacccacggccugaaccuggaggaggcggcccgguacaugcgcagccucaaggugcccgccaccgucuccgugagcucccccgacgccgugaccgccuacaacggguaccugacgagcuccagcaagacccccgaggagcacuucaucgagaccaucucccuggcgggcagcuacaaggacuggagcuacuccggccagagcacccagcucgggaucgaguuccugaagcggggcgacaaguccgucuacuacacgagcaacccgaccaccuuccaccuggacggggaggugaucaccuucgacaaccucaagacgcugcugucccuccgcgaggugcggaccaucaaggucuucaccaccguggacaacaucaaccugcacacgcagguggucgacaugagcaugaccuacggccagcaguucggccccaccuaccuggacggggccgacgugaccaagaucaagccccacaacucccacgagggcaagacguucuacgugcucccgaacgacgacacccugcgcgucgaggccuucgaguacuaccacaccaccgaccccagcuuccuggggcgguacauguccgcccucaaccacacgaagaaguggaaguacccccaggugaacggccugaccagcaucaagugggccgacaacaacugcuaccuggcgaccgcccuccugacccugcagcagaucgagcucaaguucaaccccccggcccugcaggacgccuacuaccgcgcgcgggccggggaggccgccaacuucugcgcccugauccucgcguacugcaacaagacggugggcgagcugggcgacguccgcgagaccauguccuaccuguuccagcacgccaaccucgacagcugcaagcgggugcugaacgucgugugcaagaccugcgggcagcagcagaccacccugaagggcguggaggccgucauguacauggggacgcucuccuacgagcaguucaagaagggcgugcagauccccugcaccugcgggaagcaggccaccaaguaccuggugcagcaggagagccccuucgucaugauguccgcccccccggcgcaguacgagcugaagcacggcaccuucacgugcgccagcgaguacaccggcaacuaccagugcgggcacuacaagcacaucaccuccaaggagacccucuacugcaucgacggcgcccugcugacgaagagcagcgaguacaaggggcccaucaccgacguguucuacaaggagaacuccuacaccaccacgaucaagcccgugaccuacaagcucgacggcgucgugugcaccgagaucgaccccaagcuggacaacuacuacaagaaggacaacagcuacuucaccgagcagccgaucgaccuggugcccaaccagcccuaccccaacgccuccuucgacaacuucaaguucgucugcgacaacaucaaguucgccgacgaccucaaccagcugacgggguacaagaagccggcgagccgcgagcugaaggugaccuucuuccccgaccucaacggcgacguggucgccaucgacuacaagcacuacacccccuccuucaagaagggcgccaagcugcugcacaagcccaucguguggcacgugaacaacgccaccaacaaggcgacguacaagccgaacaucuggugcauccggugccucuggagcaccaagcccgucgagaccuccaacagcuucgacgugcugaaguccgaggacgcccaggggauggacaaccuggccugcgaggaccucaagcccgugagcgaggaggucguggagaaccccaccauccagaaggacgugcuggagugcaacgucaagacgaccgagguggugggcgacaucauccugaagccggccaacaacucccucaagaucaccgaggaggucgggcacaccgaccugauggccgcguacguggacaacagcucccugacgaucaagaagcccaacgagcucagccgcgugcugggccugaagacccucgccacccacgggcuggccgccgucaacuccgugcccugggacaccaucgccaacuacgcgaagccguuccugaacaagguggucagcacgaccaccaacaucgugacccgcugccucaaccgggugugcacgaacuacaugcccuacuucuucacccugcugcuccagcugugcaccuucacccgcuccaccaacagccggaucaaggccuccaugcccacgaccaucgccaagaacaccgucaagagcgugggcaaguucugccuggaggccagcuucaacuaccucaagucccccaacuucagcaagcugaucaacaucaucaucugguuccugcuccuguccgugugccugggcagccucaucuacuccaccgccgcgcuggggguccugaugagcaaccucggcaugccguccuacugcacgggguaccgcgagggcuaccugaacagcaccaacgugaccaucgccaccuacugcacgggcuccauccccugcagcgugugccuguccgggcucgacagccuggacaccuaccccucccuggagaccauccagaucaccaucagcuccuucaagugggaccucacggccuucggccuggucgccgagugguuccuggccuacauccucuucacccgguucuucuacgugcuggggcuggcggccaucaugcagcucuucuucagcuacuucgccgugcacuucaucuccaacagcuggcugauguggcugaucaucaaccugguccagauggcccccaucuccgcgauggugcgcauguacaucuucuucgccagcuucuacuacguguggaagagcuacguccacgugguggacggcugcaacuccagcaccugcaugaugugcuacaagcggaaccgcgccacccgggucgagugcacgaccaucgugaacgggguccgccgguccuucuacguguacgccaacggcggcaagggguucugcaagcuccacaacuggaacugcgugaacugcgacaccuucugcgccggcagcaccuucaucuccgacgaggucgcgcgcgaccugagccugcaguucaagcggccgaucaaccccacggaccaguccagcuacaucguggacuccgugaccgucaagaacgggagcauccaccucuacuucgacaaggccggccagaagaccuacgagcgccacucccugagccacuucgugaaccuggacaaccuccgggccaacaacaccaaggggucccugcccaucaacgugaucgucuucgacggcaagagcaagugcgaggaguccagcgccaaguccgccagcguguacuacucccagcugaugugccagcccauccuccugcuggaccaggcgcucgugagcgacgucggcgacagcgccgagguggccgugaagauguucgacgccuacgucaacacguucuccagcaccuucaacgugccgauggagaagcugaagacccugguggccaccgcggaggccgagcucgccaagaacgucucccuggacaacgugcugagcacguucaucuccgccgcgcgccagggguucguggacagcgacgucgagaccaaggacgugguggagugccucaagcugucccaccagagcgacaucgaggucaccggcgacuccugcaacaacuacaugcugaccuacaacaagguggagaacaugacgccccgggaccucggggccugcaucgacugcagcgcccgccacaucaacgcccagguggccaagucccacaacaucgcgcugaucuggaacgucaaggacuucaugagccuguccgagcagcuccggaagcagauccgcagcgccgccaagaagaacaaccugcccuucaagcugaccugcgccaccacccgccagguggugaacgucgugacgaccaagaucgcccucaagggcggguga

SEQ ID NO: 17785 - RNA, 5841 nt, Artificial Sequence
  SARS-CoV-2__MT831464.1__non-structural protein 3 (NSP3) CDS gc
auggcccccaccaaggugaccuucggcgacgacacggucaucgaggugcagggguacaagagcgugaacaucaccuucgagcuggacgagcgcaucgacaagguccucaacgagaagugcuccgccuacaccguggagcugggcaccgaggugaacgaguucgcgugcgucguggccgacgccgugaucaagacgcugcagccggucagcgagcuccugaccccccuggggaucgaccucgacgagugguccauggccaccuacuaccuguucgacgagagcggcgaguucaagcuggccucccacauguacugcagcuucuacccccccgacgaggacgaggaggagggggacugcgaggaggaggaguucgagccguccacccaguacgaguacggcacggaggacgacuaccagggcaagccccucgaguucggggcgaccagcgccgcccugcagcccgaggaggagcaggaggaggacuggcuggacgacgacucccagcagaccgugggccagcaggacgggagcgaggacaaccagaccacgaccauccagaccaucguggagguccagccccagcucgagauggagcugaccccgguggugcagacgaucgaggucaacuccuucagcggcuaccugaagcucaccgacaacguguacaucaagaacgccgacaucguggaggaggcgaagaaggucaagcccaccgugguggucaacgccgccaacguguaccugaagcacgggggcggcguggccggggcccugaacaaggcgaccaacaacgccaugcaggucgaguccgacgacuacaucgccacgaacggcccccucaagguggggggcagcugcguccuguccggccacaaccuggccaagcacugccuccacgugguggggcccaacgucaacaagggcgaggacauccagcugcugaagagcgccuacgagaacuucaaccagcacgaggugcuccuggcgccgcugcucuccgccgggaucuucggcgccgaccccauccacagccugcgggugugcgucgacaccgugcgcaccaacguguaccuggccgucuucgacaagaaccucuacgacaagcugguguccagcuuccuggagaugaagagcgagaagcagguggagcagaagaucgccgagauccccaaggaggaggucaagcccuucaucaccgaguccaagccgagcguggagcagcggaagcaggacgacaagaagaucaaggcgugcguggaggaggucacgaccacccucgaggagaccaaguuccugacggagaaccugcuccuguacaucgacaucaacgggaaccugcaccccgacuccgccacccucgugagcgacaucgacaucaccuuccugaagaaggacgcccccuacaucgugggcgacgucgugcaggagggcgugcugaccgccgucgugauccccacgaagaaggccgggggcaccaccgagaugcucgcgaaggcccugcgcaaggugccgaccgacaacuacaucacgaccuaccccgggcagggccugaacggguacaccgucgaggaggccaagaccgugcucaagaagugcaaguccgccuucuacauccugcccagcaucaucuccaacgagaagcaggagauccugggcaccgugagcuggaaccuccgggagaugcuggcgcacgccgaggagacgcgcaagcugaugcccgucugcguggagaccaaggccaucguguccaccauccagcggaaguacaagggcaucaagauccaggagggggucguggacuacggcgcccgcuucuacuucuacaccagcaagacgaccguggccucccugaucaacacccucaacgaccugaacgagacccuggucacgaugccgcucggguacgugacccacggccugaaccuggaggaggcggcccgguacaugcgcagccucaaggugcccgccaccgucuccgugagcucccccgacgccgugaccgccuacaacggguaccugacgagcuccagcaagacccccgaggagcacuucaucgagaccaucucccuggcgggcagcuacaaggacuggagcuacuccggccagagcacccagcucgggaucgaguuccugaagcggggcgacaaguccgucuacuacacgagcaacccgaccaccuuccaccuggacggggaggugaucaccuucgacaaccucaagacgcugcugucccuccgcgaggugcggaccaucaaggucuucaccaccguggacaacaucaaccugcacacgcagguggucgacaugagcaugaccuacggccagcaguucggccccaccuaccuggacggggccgacgugaccaagaucaagccccacaacucccacgagggcaagacguucuacgugcucccgaacgacgacacccugcgcgucgaggccuucgaguacuaccacaccaccgaccccagcuuccuggggcgguacauguccgcccucaaccacacgaagaaguggaaguacccccaggugaacggccugaccagcaucaagugggccgacaacaacugcuaccuggcgaccgcccuccugacccugcagcagaucgagcucaaguucaaccccccggcccugcaggacgccuacuaccgcgcgcgggccggggaggccgccaacuucugcgcccugauccucgcguacugcaacaagacggugggcgagcugggcgacguccgcgagaccauguccuaccuguuccagcacgccaaccucgacagcugcaagcgggugcugaacgucgugugcaagaccugcgggcagcagcagaccacccugaagggcguggaggccgucauguacauggggacgcucuccuacgagcaguucaagaagggcgugcagauccccugcaccugcgggaagcaggccaccaaguaccuggugcagcaggagagccccuucgucaugauguccgcccccccggcgcaguacgagcugaagcacggcaccuucacgugcgccagcgaguacaccggcaacuaccagugcgggcacuacaagcacaucaccuccaaggagacccucuacugcaucgacggcgcccugcugacgaagagcagcgaguacaaggggcccaucaccgacguguucuacaaggagaacuccuacaccaccacgaucaagcccgugaccuacaagcucgacggcgucgugugcaccgagaucgaccccaagcuggacaacuacuacaagaaggacaacagcuacuucaccgagcagccgaucgaccuggugcccaaccagcccuaccccaacgccuccuucgacaacuucaaguucgucugcgacaacaucaaguucgccgacgaccucaaccagcugacgggguacaagaagccggcgagccgcgagcugaaggugaccuucuuccccgaccucaacggcgacguggucgccaucgacuacaagcacuacacccccuccuucaagaagggcgccaagcugcugcacaagcccaucguguggcacgugaacaacgccaccaacaaggcgacguacaagccgaacaccuggugcauccggugccucuggagcaccaagcccgucgagaccuccaacagcuucgacgugcugaaguccgaggacgcccaggggauggacaaccuggccugcgaggaccucaagcccgugagcgaggaggucguggagaaccccacgauccagaaggacgugcuggagugcaacgucaagaccaccgagguggugggcgacaucauccugaagccggccaacaacucccucaagaucaccgaggaggucgggcacacggaccugauggccgcguacguggacaacagcucccugaccaucaagaagcccaacgagcucagccgcgugcugggccugaagacccucgccacccacgggcuggccgccgucaacuccgugcccugggacacgaucgccaacuacgcgaagccguuccugaacaagguggucagcaccaccaccaacaucgugacgcgcugccucaaccgggugugcaccaacuacaugcccuacuucuucacccugcugcuccagcugugcaccuucacccgcuccacgaacagccggaucaaggccuccaugcccaccaccaucgccaagaacaccgucaagagcgugggcaaguucugccuggaggccagcuucaacuaccucaagucccccaacuucagcaagcugaucaacaucaucaucugguuccugcuccuguccgugugccugggcagccucaucuacuccacggccgcgcuggggguccugaugagcaaccucggcaugccguccuacugcaccggguaccgcgagggcuaccugaacagcaccaacgugaccaucgccacguacugcaccggcuccauccccugcagcgugugccuguccgggcucgacagccuggacaccuaccccucccuggagaccauccagaucacgaucagcuccuucaagcgggaccucaccgccuucggccuggucgccgagugguuccuggccuacauccucuucacccgcuucuucuacgugcuggggcuggcggccaucaugcagcucuucuucagcuacuucgccgugcacuucaucuccaacagcuggcugauguggcugaucaucaaccugguccagauggcccccaucuccgcgauggugcggauguacaucuucuucgccagcuucuacuacguguggaagagcuacguccacgugguggacggcugcaacuccagcaccugcaugaugugcuacaagcgcaaccgggccacgcgcgucgagugcaccaccaucgugaacgggguccggcgcuccuucuacguguacgccaacggcggcaagggguucugcaagcuccacaacuggaacugcgugaacugcgacaccuucugcgccggcagcacguucaucuccgacgaggucgcgcgggaccugagccugcaguucaagcgcccgaucaaccccaccgaccaguccagcuacaucguggacuccgugaccgucaagaacgggagcauccaccucuacuucgacaaggccggccagaagaccuacgagcggcacucccugagccacuucgugaaccuggacaaccuccgcgccaacaacacgaaggggucccugcccaucaacgugaucgucuucgacggcaagagcaagugcgaggaguccagcgccaaguccgccagcguguacuacucccagcugaugugccagcccauccuccugcuggaccaggcgcucgugagcgacgucggcgacagcgccgagguggccgugaagauguucgacgccuacgucaacaccuucuccagcaccuucaacgugccgauggagaagcugaagacccugguggccacggcggaggccgagcucgccaagaacgucucccuggacaacgugcugagcaccuucaucuccgccgcgcggcagggguucguggacagcgacgucgagaccaaggacgugguggagugccucaagcugucccaccagagcgacaucgaggucaccggcgacuccugcaacaacuacaugcugacguacaacaagguggagaacaugaccccccgcgaccucggggccugcaucgacugcagcgcccggcacaucaacgcccagguggccaagucccacaacaucgcgcugaucuggaacgucaaggacuucaugagccuguccgagcagcuccgcaagcagauccgcagcgccgccaagaagaacaaccugcccuucaagcugaccugcgccaccacgcggcagguggugaacgucgugaccaccaagaucgcccucaagggcggguga

SEQ ID NO: 17786 - RNA, 5841 nt, Artificial Sequence
  SARS-CoV-2__MT831471.1__non-structural protein 3 (NSP3) CDS gc
auggcccccaccaaggugaccuucggcgacgacacggucaucgaggugcagggguacaagagcgugaacaucaccuucgagcuggacgagcgcaucgacaagguccucaacgagaagugcuccgccuacaccguggagcugggcaccgaggugaacgaguucgcgugcgucguggccgacgccgugaucaagacgcugcagccggucagcgagcuccugaccccccuggggaucgaccucgacgagugguccauggccaccuacuaccuguucgacgagagcggcgaguucaagcuggccucccacauguacugcagcuucuacccccccgacgaggacgaggaggagggggacugcgaggaggaggaguucgagccguccacccaguacgaguacggcacggaggacgacuaccagggcaagccccucgaguucggggcgaccagcgccgcccugcagcccgaggaggagcaggaggaggacuggcuggacgacgacucccagcagaccgugggccagcaggacgggagcgaggacaaccagaccacgaccauccagaccaucguggagguccagccccagcucgagauggagaucaccccgguggugcagacgaucgaggucaacuccuucagcggcuaccugaagcugaccgacaacguguacaucaagaacgccgacaucguggaggaggcgaagaaggucaagcccaccgugguggucaacgccgccaacguguaccucaagcacgggggcggcguggccggggcccugaacaaggcgaccaacaacgccaugcaggucgaguccgacgacuacaucgccacgaacggcccccugaagguggggggcagcugcguccucuccggccacaaccuggccaagcacugccugcacgugguggggcccaacgucaacaagggcgaggacauccagcuccugaagagcgccuacgagaacuucaaccagcacgaggugcugcucgcgccgcugcuguccgccgggaucuucggcgccgaccccauccacagccuccgggugugcgucgacaccgugcgcaccaacguguaccuggccgucuucgacaagaaccuguacgacaagcucguguccagcuuccuggagaugaagagcgagaagcagguggagcagaagaucgccgagauccccaaggaggaggucaagcccuucaucaccgaguccaagccgagcguggagcagcggaagcaggacgacaagaagaucaaggcgugcguggaggaggucacgaccacccuggaggagaccaaguuccucacggagaaccugcugcucuacaucgacaucaacgggaaccugcaccccgacuccgccacccuggugagcgacaucgacaucaccuuccucaagaaggacgcccccuacaucgugggcgacgucgugcaggagggcgugcugaccgccgucgugauccccacgaagaaggccgggggcaccaccgagaugcuggcgaaggcccuccgcaaggugccgaccgacaacuacaucacgaccuaccccgggcagggccugaacggguacaccgucgaggaggccaagaccgugcugaagaagugcaaguccgccuucuacauccuccccagcaucaucuccaacgagaagcaggagauccugggcaccgugagcuggaaccugcgggagaugcucgcgcacgccgaggagacgcgcaagcugaugcccgucugcguggagaccaaggccaucguguccaccauccagcggaaguacaagggcaucaagauccaggagggggucguggacuacggcgcccgcuucuacuucuacaccagcaagacgaccguggccucccugaucaacacccugaacgaccucaacgagacccuggucacgaugccgcugggguacgugacccacggccucaaccuggaggaggcggcccgguacaugcgcagccugaaggugcccgccaccgucuccgugagcucccccgacgccgugaccgccuacaacggguaccucacgagcuccagcaagacccccgaggagcacuucaucgagaccaucucccuggcgggcagcuacaaggacuggagcuacuccggccagagcacccagcuggggaucgaguuccucaagcggggcgacaaguccgucuacuacacgagcaacccgaccaccuuccaccuggacggggaggugaucaccuucgacaaccugaagacgcuccugucccugcgcgaggugcggaccaucaaggucuucaccaccguggacaacaucaaccuccacacgcagguggucgacaugagcaugaccuacggccagcaguucggccccaccuaccuggacggggccgacgugaccaagaucaagccccacaacucccacgagggcaagacguucuacgugcugccgaacgacgacacccuccgcgucgaggccuucgaguacuaccacaccaccgaccccagcuuccuggggcgguacauguccgcccugaaccacacgaagaaguggaaguacccccaggugaacggccucaccagcaucaagugggccgacaacaacugcuaccuggcgaccgcccugcucacccugcagcagaucgagcugaaguucaaccccccggcccuccaggacgccuacuaccgcgcgcgggccggggaggccgccaacuucugcgcccugauccuggcguacugcaacaagacggugggcgagcucggcgacguccgcgagaccauguccuaccuguuccagcacgccaaccuggacagcugcaagcgggugcucaacgucgugugcaagaccugcgggcagcagcagaccacccugaagggcguggaggccgucauguacauggggacgcuguccuacgagcaguucaagaagggcgugcagauccccugcaccugcgggaagcaggccaccaaguaccucgugcagcaggagagccccuucgucaugauguccgcccccccggcgcaguacgagcugaagcacggcaccuucacgugcgccagcgaguacaccggcaacuaccagugcgggcacuacaagcacaucaccuccaaggagacccuguacugcaucgacggcgcccuccugacgaagagcagcgaguacaaggggcccaucaccgacguguucuacaaggagaacuccuacaccaccacgaucaagcccgugaccuacaagcuggacggcgucgugugcaccgagaucgaccccaagcucgacaacuacuacaagaaggacaacagcuacuucaccgagcagccgaucgaccuggugcccaaccagcccuaccccaacgccuccuucgacaacuucaaguucgucugcgacaacaucaaguucgccgacgaccugaaccagcucacgggguacaagaagccggcgagccgcgagcugaaggugaccuucuuccccgaccugaacggcgacguggucgccaucgacuacaagcacuacacccccuccuucaagaagggcgccaagcuccugcacaagcccaucguguggcacgugaacaacgccaccaacaaggcgacguacaagccgaacaccuggugcauccggugccuguggagcaccaagcccgucgagaccuccaacagcuucgacgugcucaaguccgaggacgcccaggggauggacaaccuggccugcgaggaccugaagcccgugagcgaggaggucguggagaaccccacgauccagaaggacgugcucgagugcaacgucaagaccaccgagguggugggcgacaucauccugaagccggccaacaacucccugaagaucaccgaggaggucgggcacacggaccucauggccgcguacguggacaacagcucccugaccaucaagaagcccaacgagcugagccgcgugcucggccugaagacccuggccacccacgggcucgccgccgucaacuccgugcccugggacacgaucgccaacuacgcgaagccguuccugaacaagguggucagcaccaccaccaacaucgugacgcgcugccugaaccgggugugcaccaacuacaugcccuacuucuucacccuccugcugcagcucugcaccuucacccgcuccacgaacagccggaucaaggccuccaugcccaccaccaucgccaagaacaccgucaagagcgugggcaaguucugccuggaggccagcuucaacuaccugaagucccccaacuucagcaagcucaucaacaucaucaucugguuccugcugcucuccgugugccugggcagccugaucuacuccacggccgcgcucgggguccugaugagcaaccugggcaugccguccuacugcaccggguaccgcgagggcuaccucaacagcaccaacgugaccaucgccacguacugcaccggcuccauccccugcagcgugugccuguccgggcuggacagccucgacaccuaccccucccuggagaccauccagaucacgaucagcuccuucaagugggaccugaccgccuucggccucgucgccgagugguuccuggccuacauccuguucacccgguucuucuacgugcucgggcuggcggccaucaugcagcuguucuucagcuacuucgccgugcacuucaucuccaacagcuggcucauguggcugaucaucaaccugguccagauggcccccaucuccgcgauggugcgcauguacaucuucuucgccagcuucuacuacguguggaagagcuacguccacgugguggacggcugcaacuccagcaccugcaugaugugcuacaagcggaaccgcgccacgcgggucgagugcaccaccaucgugaacgggguccgccgguccuucuacguguacgccaacggcggcaagggguucugcaagcugcacaacuggaacugcgugaacugcgacaccuucugcgccggcagcacguucaucuccgacgaggucgcgcgcgaccucagccugcaguucaagcggccgaucaaccccaccgaccaguccagcuacaucguggacuccgugaccgucaagaacgggagcauccaccuguacuucgacaaggccggccagaagaccuacgagcgccacucccucagccacuucgugaaccuggacaaccugcgggccaacaacacgaaggggucccuccccaucaacgugaucgucuucgacggcaagagcaagugcgaggaguccagcgccaaguccgccagcguguacuacucccagcugaugugccagcccauccugcuccuggaccaggcgcuggugagcgacgucggcgacagcgccgagguggccgugaagauguucgacgccuacgucaacaccuucuccagcaccuucaacgugccgauggagaagcucaagacccugguggccacggcggaggccgagcuggccaagaacgucucccucgacaacgugcugagcaccuucaucuccgccgcgcgccagggguucguggacagcgacgucgagaccaaggacgugguggagugccugaagcucucccaccagagcgacaucgaggucaccggcgacuccugcaacaacuacaugcugacguacaacaagguggagaacaugaccccccgggaccugggggccugcaucgacugcagcgcccgccacaucaacgcccagguggccaagucccacaacaucgcgcucaucuggaacgucaaggacuucaugagccuguccgagcagcugcggaagcagauccgcagcgccgccaagaagaacaaccuccccuucaagcugaccugcgccaccacgcgccagguggugaacgucgugaccaccaagaucgcccugaagggcggguga

SEQ ID NO: 17787 - RNA, 5841 nt, Artificial Sequence
  SARS-CoV-2__MT831542.1__non-structural protein 3 (NSP3) CDS gc
auggcccccaccaaggugaccuucggcgacgacacggucaucgaggugcagggguacaagagcgugaacaucaccuucgagcuggacgagcgcaucgacaagguccucaacgagaagugcuccgccuacaccguggagcugggcaccgaggugaacgaguucgcgugcgucguggccgacgccgugaucaagacgcugcagccggucagcgagcuccugaccccccuggggaucgaccucgacgagugguccauggccaccuacuaccuguucgacgagagcggcgaguucaagcuggccucccacauguacugcagcuucuacccccccgacgaggacgaggaggagggggacugcgaggaggaggaguucgagccguccacccaguacgaguacggcacggaggacgacuaccagggcaagccccucgaguucggggcgaccagcgccgcccugcagcccgaggaggagcaggaggaggacuggcuggacgacgacucccagcagaccgugggccagcaggacgggagcgaggacaaccagaccacgaccauccagaccaucguggagguccagccccagcucgagauggagcugaccccgguggugcagacgaucgaggucaacuccuucagcggcuaccugaagcucaccgacaacguguacaucaagaacgccgacaucguggaggaggcgaagaaggucaagcccaccgugguggucaacgccgccaacguguaccugaagcacgggggcggcguggccggggcccugaacaaggcgaccaacaacgccaugcaggucgaguccgacgacuacaucgccacgaacggcccccucaagguggggggcagcugcguccuguccggccacaaccuggccaagcacugccuccacgugguggggcccaacgucaacaagggcgaggacauccagcugcugaagagcgccuacgagaacuucaaccagcacgaggugcuccuggcgccgcugcucuccgccgggaucuucggcgccgaccccauccacagccugcgggugugcgucgacaccgugcgcaccaacguguaccuggccgucuucgacaagaaccucuacgacaagcugguguccagcuuccuggagaugaagagcgagaagcagguggagcagaagaucgccgagauccccaaggaggaggucaagcccuucaucaccgaguccaagccgagcguggagcagcggaagcaggacgacaagaagaucaaggcgugcguggaggaggucacgaccacccucgaggagaccaaguuccugacggagaaccugcuccuguacaucgacaucaacgggaaccugcaccccgacuccgccacccucgugagcgacaucgacaucaccuuccugaagaaggacgcccccuacaucgugggcgacgucgugcaggagggcgugcugaccgccgucgugauccccacgaagaaggccgggggcaccaccgagaugcucgcgaaggcccugcgcaaggugccgaccgacaacuacaucacgaccuaccccgggcagggccugaacggguacaccgucgaggaggccaagaccgugcucaagaagugcaaguccgccuucuacauccugcccagcaucaucuccaacgagaagcaggagauccugggcaccgugagcuggaaccuccgggagaugcuggcgcacgccgaggagacgcgcaagcugaugcccgucugcguggagaccaaggccaucguguccaccauccagcggaaguacaagggcaucaagauccaggagggggucguggacuacggcgcccgcuucuacuucuacaccagcaagacgaccguggccucccugaucaacacccucaacgaccugaacgagacccuggucacgaugccgcucggguacgugacccacggccugaaccuggaggaggcggcccgguacaugcgcagccucaaggugcccgccaccgucuccgugagcucccccgacgccgugaccgccuacaacggguaccugacgagcuccagcaagacccccgaggagcacuucaucgagaccaucucccuggcgggcagcuacaaggacuggagcuacuccggccagagcacccagcucgggaucgaguuccugaagcggggcgacaaguccgucuacuacacgagcaacccgaccaccuuccaccuggacggggaggugaucaccuucgacaaccucaagacgcugcugucccuccgcgaggugcggaccaucaaggucuucaccaccguggacaacaucaaccugcacacgcagguggucgacaugagcaugaccuacggccagcaguucggccccaccuaccuggacggggccgacgugaccaagaucaagccccacaacucccacgagggcaagacguucuacgugcucccgaacgacgacacccugcgcgucgaggccuucgaguacuaccacaccaccgaccccagcuuccuggggcgguacauguccgcccucaaccacacgaagaaguggaaguacccccaggugaacggccugaccagcaucaagugggccgacaacaacugcuaccuggcgaccgcccuccugacccugcagcagaucgagcucaaguucaaccccccggcccugcaggacgccuacuaccgcgcgcgggccggggaggccgccaacuucugcgcccugauccucgcguacugcaacaagacggugggcgagcugggcgacguccgcgagaccauguccuaccuguuccagcacgccaaccucgacagcugcaagcgggugcugaacgucgugugcaagaccugcgggcagcagcagaccacccugaagggcguggaggccgucauguacauggggacgcucuccuacgagcaguucaagaagggcgugcagauccccugcaccugcgggaagcaggccaccaaguaccuggugcagcaggagagccccuucgucaugauguccgcccccccggcgcaguacgagcugaagcacggcaccuucacgugcgccagcgaguacaccggcaacuaccagugcgggcacuacaagcacaucaccuccaaggagacccucuacugcaucgacggcgcccugcugacgaagagcagcgaguacaaggggcccaucaccgacguguucuacaaggagaacuccuacaccaccacgaucaagcccgugaccuacaagcucgacggcgucgugugcaccgagaucgaccccaagcuggacaacuacuacaagaaggacaacagcuacuucaccgagcagccgaucgaccuggugcccaaccagcccuaccccaacgccuccuucgacaacuucaaguucgucugcgacaacaucaaguucgccgacgaccucaaccagcugacgggguacaagaagccggcgagccgcgagcugaaggugaccuucuuccccgaccucaacggcgacguggucgccaucgacuacaagcacuacacccccuccuucaagaagggcgccaagcugcugcacaagcccaucguguggcacgugaacaacgccaccaacaaggcgacguacaagccgaacaccuggugcguccggugccucuggagcaccaagcccguggagaccuccaacagcuucgacgugcugaaguccgaggacgcccaggggauggacaaccuggccugcgaggaccucaagcccgucagcgaggaggugguggagaaccccacgauccagaaggacguccuggagugcaacgugaagaccaccgagguggucggcgacaucauccugaagccggccaacaacucccucaagaucaccgaggagguggggcacacggaccugauggccgcguacguggacaacagcucccugaccaucaagaagcccaacgagcucagccgcguccugggccugaagacccucgccacccacgggcuggccgccgugaacuccgugcccugggacacgaucgccaacuacgcgaagccguuccugaacaaggucgugagcaccaccaccaacaucgugacgcgcugccucaaccgggucugcaccaacuacaugcccuacuucuucacccugcugcuccagcugugcaccuucacccgcuccacgaacagccggaucaaggccuccaugcccaccaccaucgccaagaacaccgugaagagcgugggcaaguucugccuggaggccagcuucaacuaccucaagucccccaacuucagcaagcugaucaacaucaucaucugguuccugcuccuguccgucugccugggcagccucaucuacuccacggccgcgcugggggugcugaugagcaaccucggcaugccguccuacugcaccggguaccgcgagggcuaccugaacagcaccaacgugaccaucgccacguacugcaccggcuccauccccugcagcgucugccuguccgggcucgacagccuggacaccuaccccucccuggagaccauccagaucacgaucagcuccuucaagugggaccucaccgccuucggccugguggccgagugguuccuggccuacauccucuucacccgguucuucuacgugcuggggcuggcggccaucaugcagcucuucuucagcuacuucgccguccacuucaucuccaacagcuggcugauguggcugaucaucaaccuggugcagauggcccccaucuccgcgauggugcgcauguacaucuucuucgccagcuucuacuacgucuggaagagcuacgugcacguggucgacggcugcaacuccagcaccugcaugaugugcuacaagcggaaccgcgccacgcggguggagugcaccaccaucgucaacggggugcgccgguccuucuacguguacgccaacggcggcaagggguucugcaagcuccacaacuggaacugcgucaacugcgacaccuucugcgccggcagcacguucaucuccgacgagguggcgcgcgaccugagccugcaguucaagcggccgaucaaccccaccgaccaguccagcuacaucguggacuccgucaccgugaagaacgggagcauccaccucuacuucgacaaggccggccagaagaccuacgagcgccacucccugagccacuucgugaaccuggacaaccuccgggccaacaacacgaaggggucccugcccaucaacgucaucguguucgacggcaagagcaagugcgaggaguccagcgccaaguccgccagcguguacuacucccagcugaugugccagcccauccuccugcuggaccaggcgcucgucagcgacgugggcgacagcgccgagguggccgucaagauguucgacgccuacgugaacaccuucuccagcaccuucaacgugccgauggagaagcugaagacccuggucgccacggcggaggccgagcucgccaagaacgugucccuggacaacgugcugagcaccuucaucuccgccgcgcgccagggguucgucgacagcgacguggagaccaaggacguggucgagugccucaagcugucccaccagagcgacaucgaggugaccggcgacuccugcaacaacuacaugcugacguacaacaagguggagaacaugaccccccgggaccucggggccugcaucgacugcagcgcccgccacaucaacgcccaggucgccaagucccacaacaucgcgcugaucuggaacgugaaggacuucaugagccuguccgagcagcuccggaagcagauccgcagcgccgccaagaagaacaaccugcccuucaagcugaccugcgccaccacgcgccagguggucaacguggugaccaccaagaucgcccucaagggcggguga

SEQ ID NO: 17788 - RNA, 5841 nt, Artificial Sequence
  SARS-CoV-2__MT831569.1__non-structural protein 3 (NSP3) CDS gc
auggcccccaccaaggugaccuucggcgacgacacggucaucgaggugcagggguacaagagcgugaacaucaccuucgagcuggacgagcgcaucgacaagguccucaacgagaagugcuccgccuacaccguggagcugggcaccgaggugaacgaguucgcgugcgucguggccgacgccgugaucaagacgcugcagccggucagcgagcuccugaccccccuggggaucgaccucgacgagugguccauggccaccuacuaccuguucgacgagagcggcgaguucaagcuggccucccacauguacugcagcuucuacccccccgacgaggacgaggaggagggggacugcgaggaggaggaguucgagccguccacccaguacgaguacggcacggaggacgacuaccagggcaagccccucgaguucggggcgaccagcgccgcccugcagcccgaggaggagcaggaggaggacuggcuggacgacgacucccagcagaccgugggccagcaggacgggagcgaggacaaccagaccacgaccauccagaccaucguggagguccagccccagcucgagauggagcugaccccgguggugcagacgaucgaggucaacuccuucagcggcuaccugaagcucaccgacaacguguacaucaagaacgccgacaucguggaggaggcgaagaaggucaagcccaccgugguggucaacgccgccaacaucuaccugaagcacgggggcggcguggccggggcccugaacaaggcgaccaacaacgccaugcagguggaguccgacgacuacaucgccacgaacggcccccucaaggucgggggcagcugcgugcuguccggccacaaccuggccaagcacugccuccacgucguggggcccaacgugaacaagggcgaggacauccagcugcugaagagcgccuacgagaacuucaaccagcacgagguccuccuggcgccgcugcucuccgccgggaucuucggcgccgaccccauccacagccugcgggugugcguggacaccguccgcaccaacguguaccuggccguguucgacaagaaccucuacgacaagcuggucuccagcuuccuggagaugaagagcgagaagcagguggagcagaagaucgccgagauccccaaggaggaggugaagcccuucaucaccgaguccaagccgagcgucgagcagcggaagcaggacgacaagaagaucaaggcgugcguggaggaggugacgaccacccucgaggagaccaaguuccugacggagaaccugcuccuguacaucgacaucaacgggaaccugcaccccgacuccgccacccucgucagcgacaucgacaucaccuuccugaagaaggacgcccccuacaucgugggcgacgugguccaggagggcgugcugaccgccguggucauccccacgaagaaggccgggggcaccaccgagaugcucgcgaaggcccugcgcaaggugccgaccgacaacuacaucacgaccuaccccgggcagggccugaacggguacaccguggaggaggccaagaccguccucaagaagugcaaguccgccuucuacauccugcccagcaucaucuccaacgagaagcaggagauccugggcaccgugagcuggaaccuccgggagaugcuggcgcacgccgaggagacgcgcaagcugaugcccgugugcgucgagaccaaggccaucguguccaccauccagcggaaguacaagggcaucaagauccaggaggggguggucgacuacggcgcccgcuucuacuucuacaccagcaagacgaccguggccucccugaucaacacccucaacgaccugaacgagacccuggugacgaugccgcucggguacgucacccacggccugaaccuggaggaggcggcccgguacaugcgcagccucaaggugcccgccaccguguccgucagcucccccgacgccgugaccgccuacaacggguaccugacgagcuccagcaagacccccgaggagcacuucaucgagaccaucucccuggcgggcagcuacaaggacuggagcuacuccggccagagcacccagcucgggaucgaguuccugaagcggggcgacaaguccguguacuacacgagcaacccgaccaccuuccaccuggacggggaggucaucaccuucgacaaccucaagacgcugcugucccuccgcgaggugcggaccaucaagguguucaccaccgucgacaacaucaaccugcacacgcaggugguggacaugagcaugaccuacggccagcaguucggccccaccuaccuggacggggccgacgucaccaagaucaagccccacaacucccacgagggcaagacguucuacgugcucccgaacgacgacacccugcgcguggaggccuucgaguacuaccacaccaccgaccccagcuuccuggggcgguacauguccgcccucaaccacacgaagaaguggaaguacccccaggucaacggccugaccagcaucaagugggccgacaacaacugcuaccuggcgaccgcccuccugacccugcagcagaucgagcucaaguucaaccccccggcccugcaggacgccuacuaccgcgcgcgggccggggaggccgccaacuucugcgcccugauccucgcguacugcaacaagacggugggcgagcugggcgacgugcgcgagaccauguccuaccuguuccagcacgccaaccucgacagcugcaagcggguccugaacguggucugcaagaccugcgggcagcagcagaccacccugaagggcguggaggccgugauguacauggggacgcucuccuacgagcaguucaagaagggcguccagauccccugcaccugcgggaagcaggccaccaaguaccuggugcagcaggagagccccuucgugaugauguccgcccccccggcgcaguacgagcugaagcacggcaccuucacgugcgccagcgaguacaccggcaacuaccagugcgggcacuacaagcacaucaccuccaaggagacccucuacugcaucgacggcgcccugcugacgaagagcagcgaguacaaggggcccaucaccgacgucuucuacaaggagaacuccuacaccaccacgaucaagcccgugaccuacaagcucgacggcguggucugcaccgagaucgaccccaagcuggacaacuacuacaagaaggacaacagcuacuucaccgagcagccgaucgaccuggugcccaaccagcccuaccccaacgccuccuucgacaacuucaaguucgugugcgacaacaucaaguucgccgacgaccucaaccagcugacgggguacaagaagccggcgagccgcgagcugaaggucaccuucuuccccgaccucaacggcgacgugguggccaucgacuacaagcacuacacccccuccuucaagaagggcgccaagcugcugcacaagcccaucgucuggcacgugaacaacgccaccaacaaggcgacguacaagccgaacaccuggugcauccggugccucuggagcaccaagcccguggagaccuccaacagcuucgacguccugaaguccgaggacgcccaggggauggacaaccuggccugcgaggaccucaagcccgugagcgaggagguggucgagaaccccacgauccagaaggacgugcuggagugcaacgugaagaccaccgaggucgugggcgacaucauccugaagccggccaacaacucccucaagaucaccgaggagguggggcacacggaccugauggccgcguacgucgacaacagcucccugaccaucaagaagcccaacgagcucagccgcgugcugggccugaagacccucgccacccacgggcuggccgccgugaacuccguccccugggacacgaucgccaacuacgcgaagccguuccugaacaagguggugagcaccaccaccaacaucgucacgcgcugccucaaccgggugugcaccaacuacaugcccuacuucuucacccugcugcuccagcugugcaccuucacccgcuccacgaacagccggaucaaggccuccaugcccaccaccaucgccaagaacaccgugaagagcgucggcaaguucugccuggaggccagcuucaacuaccucaagucccccaacuucagcaagcugaucaacaucaucaucugguuccugcuccuguccgugugccugggcagccucaucuacuccacggccgcgcugggggugcugaugagcaaccucggcaugccguccuacugcaccggguaccgcgagggcuaccugaacagcaccaacgucaccaucgccacguacugcaccggcuccauccccugcagcgugugccuguccgggcucgacagccuggacaccuaccccucccuggagaccauccagaucacgaucagcuccuucaagugggaccucaccgccuucggccugguggccgagugguuccuggccuacauccucuucacccgguucuucuacguccuggggcuggcggccaucaugcagcucuucuucagcuacuucgccgugcacuucaucuccaacagcuggcugauguggcugaucaucaaccuggugcagauggcccccaucuccgcgaugguccgcauguacaucuucuucgccagcuucuacuacguguggaagagcuacgugcacgucguggacggcugcaacuccagcaccugcaugaugugcuacaagcggaaccgcgccacgcggguggagugcaccaccaucgucaacggggugcgccgguccuucuacgucuacgccaacggcggcaagggguucugcaagcuccacaacuggaacugcgugaacugcgacaccuucugcgccggcagcacguucaucuccgacgagguggcgcgcgaccugagccugcaguucaagcggccgaucaaccccaccgaccaguccagcuacaucgucgacuccgugaccgugaagaacgggagcauccaccucuacuucgacaaggccggccagaagaccuacgagcgccacucccugagccacuucgucaaccuggacaaccuccgggccaacaacacgaaggggucccugcccaucaacgugaucguguucgacggcaagagcaagugcgaggaguccagcgccaaguccgccagcgucuacuacucccagcugaugugccagcccauccuccugcuggaccaggcgcucgugagcgacgugggcgacagcgccgaggucgccgugaagauguucgacgccuacgugaacaccuucuccagcaccuucaacgucccgauggagaagcugaagacccugguggccacggcggaggccgagcucgccaagaacgugucccuggacaacguccugagcaccuucaucuccgccgcgcgccagggguucguggacagcgacguggagaccaaggacgucguggagugccucaagcugucccaccagagcgacaucgaggugaccggcgacuccugcaacaacuacaugcugacguacaacaaggucgagaacaugaccccccgggaccucggggccugcaucgacugcagcgcccgccacaucaacgcccagguggccaagucccacaacaucgcgcugaucuggaacgugaaggacuucaugagccuguccgagcagcuccggaagcagauccgcagcgccgccaagaagaacaaccugcccuucaagcugaccugcgccaccacgcgccaggucgugaacguggucaccaccaagaucgcccucaagggcggguga

SEQ ID NO: 17789 - RNA, 5841 nt, Artificial Sequence
  SARS-CoV-2__MT831579.1__non-structural protein 3 (NSP3) CDS gc
auggcccccaccaaggugaccuucggcgacgacacggucaucgaggugcagggguacaagagcgugaacaucaccuucgagcuggacgagcgcaucgacaagguccucaacgagaagugcuccgccuacaccguggagcugggcaccgaggugaacgaguucgcgugcgucguggccgacgccgugaucaagacgcugcagccggucagcgagcuccugaccccccuggggaucgaccucgacgagugguccauggccaccuacuaccuguucgacgagagcggcgaguucaagcuggccucccacauguacugcagcuucuacccccccgacgaggacgaggaggagggggacugcgaggaggaggaguucgagccguccacccaguacgaguacggcacggaggacgacuaccagggcaagccccucgaguucggggcgaccagcgccgcccugcagcccgaggaggagcaggaggaggacuggcuggacgacgacucccagcagaccgugggccagcaggacgggagcgaggacaaccagaccacgaccauccagaccaucguggagguccagccccagcucgagauggagcugaccccgguggugcagacgaucgaggucaacuccuucagcggcuaccugaagcucaccgacaacguguacaucaagaacgccgacaucguggaggaggcgaagaaggucaagcccaccgugguggucaacgccgccaacguguaccugaagcacgggggcggcguggccggggcccugaacaaggcgaccaacaacgccaugcaggucgaguccgacgacuacaucgccacgaacggcccccucaagguggggggcagcugcguccuguccggccacaaccuggccaagcacugccuccacgugguggggcccaacgucaacaagggcgaggacauccagcugcugaagagcgccuacgagaacuucaaccagcacgaggugcuccuggcgccgcugcucuccgccgggaucuucggcgccgaccccauccacagccugcgggugugcgucgacaccgugcgcaccaacguguaccuggccgucuucgacaagaaccucuacgacaagcugguguccagcuuccuggagaugaagagcgagaagcagguggagcagaagaucgccgagauccccaaggaggaggucaagcccuucaucaccgaguccaagccgagcguggagcagcggaagcaggacgacaagaagaucaaggcgugcguggaggaggucacgaccacccucgaggagaccaaguuccugacggagaaccugcuccuguacaucgacaucaacgggaaccugcaccccgacuccgccacccucgugagcgacaucgacaucaccuuccugaagaaggacgcccccuacaucgugggcgacgucgugcaggagggcgugcugaccgccgucgugauccccacgaagaaggccgggggcaccaccgagaugcucgcgaaggcccugcgcaaggugccgaccgacaacuacaucacgaccuaccccgggcagggccugaacggguacaccgucgaggaggccaagaccgugcucaagaagugcaaguccgccuucuacauccugcccagcaucaucuccaacgagaagcaggagauccugggcaccgugagcuggaaccuccgggagaugcuggcgcacgccgaggagacgcgcaagcugaugcccgucugcguggagaccaaggccaucguguccaccauccagcggaaguacaagggcaucaagauccaggagggggucguggacuacggcgcccgcuucuacuucuacaccagcaagacgaccguggccucccugaucaacacccucaacaaccugaacgagacccuggucacgaugccgcucggguacgugacccacggccugaaccuggaggaggcggcccgguacaugcgcagccucaaggugcccgccaccgucuccgugagcucccccgacgccgugaccgccuacaacggguaccugacgagcuccagcaagacccccgaggagcacuucaucgagaccaucucccuggcgggcagcuacaaggacuggagcuacuccggccagagcacccagcucgggaucgaguuccugaagcggggcgacaaguccgucuacuacacgagcaacccgaccaccuuccaccuggacggggaggugaucaccuucgacaaccucaagacgcugcugucccuccgcgaggugcggaccaucaaggucuucaccaccguggacaacaucaaccugcacacgcagguggucgacaugagcaugaccuacggccagcaguucggccccaccuaccuggacggggccgacgugaccaagaucaagccccacaacucccacgagggcaagacguucuacgugcucccgaacgacgacacccugcgcgucgaggccuucgaguacuaccacaccaccgaccccagcuuccuggggcgguacauguccgcccucaaccacacgaagaaguggaaguacccccaggugaacggccugaccagcaucaagugggccgacaacaacugcuaccuggcgaccgcccuccugacccugcagcagaucgagcucaaguucaaccccccggcccugcaggacgccuacuaccgcgcgcgggccggggaggccgccaacuucugcgcccugauccucgcguacugcaacaagacggugggcgagcugggcgacguccgcgagaccauguccuaccuguuccagcacgccaaccucgacagcugcaagcgggugcugaacgucgugugcaagaccugcgggcagcagcagaccacccugaagggcguggaggccgucauguacauggggacgcucuccuacgagcaguucaagaagggcgugcagauccccugcaccugcgggaagcaggccaccaaguaccuggugcagcaggagagccccuucgucaugauguccgcccccccggcgcaguacgagcugaagcacggcaccuucacgugcgccagcgaguacaccggcaacuaccagugcgggcacuacaagcacaucaccuccaaggagacccucuacugcaucgacggcgcccugcugacgaagagcagcgaguacaaggggcccaucaccgacguguucuacaaggagaacuccuacaccaccacgaucaagcccgugaccuacaagcucgacggcgucgugugcaccgagaucgaccccaagcuggacaacuacuacaagaaggacaacagcuacuucaccgagcagccgaucgaccuggugcccaaccagcccuaccccaacgccuccuucgacaacuucaaguucgucugcgacaacaucaaguucgccgacgaccucaaccagcugacgggguacaagaagccggcgagccgcgagcugaaggugaccuucuuccccgaccucaacggcgacguggucgccaucgacuacaagcacuacacccccuccuucaagaagggcgccaagcugcugcacaagcccaucguguggcacgugaacaacgccaccaacaaggcgacguacaagccgaacaccuggugcauccggugccucuggagcaccaagcccgucgagaccuccaacagcuucgacgugcugaaguccgaggacgcccaggggauggacaaccuggccugcgaggaccucaagcccgugagcgaggaggucguggagaaccccacgauccagaaggacgugcuggagugcaacgucaagaccaccgagguggugggcgacaucauccugaagccggccaacaacucccucaagaucaccgaggaggucgggcacacggaccugauggccgcguacguggacaacagcucccugaccaucaagaagcccaacgagcucagccgcgugcugggccugaagacccucgccacccacgggcuggccgccgucaacuccgugcccugggacacgaucgccaacuacgcgaagccguuccugaacaagguggucagcaccaccaccaacaucgugacgcgcugccucaaccgggugugcaccaacuacaugcccuacuucuucacccugcugcuccagcugugcaccuucacccgcuccacgaacagccggaucaaggccuccaugcccaccaccaucgccaagaacaccgucaagagcgugggcaaguucugccuggaggccagcuucaacuaccucaagucccccaacuucagcaagcugaucaacaucaucaucugguuccugcuccuguccgugugccugggcagccucaucuacuccacggccgcgcuggggguccugaugagcaaccucggcaugccguccuacugcaccggguaccgcgagggcuaccugaacagcaccaacgugaccaucgccacguacugcaccggcuccauccccugcagcgugugccuguccgggcucgacagccuggacaccuaccccucccuggagaccauccagaucacgaucagcuccuucaagugggaccucaccgccuucggccuggucgccgagugguuccuggccuacauccucuucacccgguucuucuacgugcuggggcuggcggccaucaugcagcucuucuucagcuacuucgccgugcacuucaucuccaacagcuggcugauguggcugaucaucaaccugguccagauggcccccaucuccgcgauggugcgcauguacaucuucuucgccagcuucuacuacguguggaagagcuacguccacgugguggacggcugcaacuccagcaccugcaugaugugcuacaagcggaaccgcgccacgcgggucgagugcaccaccaucgugaacgggguccgccgguccuucuacguguacgccaacggcggcaagggguucugcaagcuccacaacuggaacugcgugaacugcgacaccuucugcgccggcagcacguucaucuccgacgaggucgcgcgcgaccugagccugcaguucaagcggccgaucaaccccaccgaccaguccagcuacaucguggacuccgugaccgucaagaacgggagcauccaccucuacuucgacaaggccggccagaagaccuacgagcgccacucccugagccacuucgugaaccuggacaaccuccgggccaacaacaucaaggggucccugcccaucaacgugaucgucuucgacggcaagagcaagugcgaggaguccagcgccaaguccgccagcguguacuacucccagcugaugugccagcccauccuccugcuggaccaggcgcucgugagcgacgucggcgacagcgccgagguggccgugaagauguucgacgccuacgucaacacguucuccagcaccuucaacgugccgauggagaagcugaagacccugguggccaccgcggaggccgagcucgccaagaacgucucccuggacaacgugcugagcacguucaucuccgccgcgcgccagggguucguggacagcgacgucgagaccaaggacgugguggagugccucaagcugucccaccagagcgacaucgaggucaccggcgacuccugcaacaacuacaugcugaccuacaacaagguggagaacaugacgccccgggaccucggggccugcaucgacugcagcgcccgccacaucaacgcccagguggccaagucccacaacaucgcgcugaucuggaacgucaaggacuucaugagccuguccgagcagcuccggaagcagauccgcagcgccgccaagaagaacaaccugcccuucaagcugaccugcgccaccacccgccagguggugaacgucgugacgaccaagaucgcccucaagggcggguga

SEQ ID NO: 17790 - RNA, 5841 nt, Artificial Sequence
  SARS-CoV-2__MT831587.1__non-structural protein 3 (NSP3) CDS gc
auggcccccaccaaggugaccuucggcgacgacacggucaucgaggugcagggguacaagagcgugaacaucaccuucgagcuggacgagcgcaucgacaagguccucaacgagaagugcuccgccuacaccguggagcugggcaccgaggugaacgaguucgcgugcgucguggccgacgccgugaucaagacgcugcagccggucagcgagcuccugaccccccuggggaucgaccucgacgagugguccauggccaccuacuaccuguucgacgagagcggcgaguucaagcuggccucccacauguacugcagcuucuacccccccgacgaggacgaggaggagggggacugcgaggaggaggaguucgagccguccacccaguacgaguacggcacggaggacgacuaccagggcaagccccucgaguucggggcgaccagcgccgcccugcagcccgaggaggagcaggaggaggacuggcuggacgacgacucccagcagaccgugggccagcaggacgggagcgaggacaaccagaccacgaccauccagaccaucguggagguccagccccagcucgagauggagcugaccccgguggugcagacgaucgaggucaacuccuucagcggcuaccugaagcucaccgacaacguguacaucaagaacgccgacaucguggaggaggcgaagaaggucaagcccaccgugguggucaacgccgccaacguguaccugaagcacgggggcggcguggccggggcccugaacaaggcgaccaacaacgccaugcaggucgaguccgacgacuacaucgccacgaacggcccccucaagguggggggcagcugcguccuguccggccacaaccuggccaagcacugccuccacgugguggggcccaacgucaacaagggcgaggacauccagcugcugaagagcgccuacgagaacuucaaccagcacgaggugcuccuggcgccgcugcucuccgccgggaucuucggcgccgaccccauccacagccugcgggugugcgucgacaccgugcgcaccaacguguaccuggccgucuucgacaagaaccucuacgacaagcugguguccagcuuccuggagaugaagagcgagaagcagguggagcagaagaucgccgagauccccaaggaggaggucaagcccuucaucaccgaguccaagccgagcguggagcagcggaagcaggacgacaagaagaucaaggcgugcguggaggaggucacgaccacccucgaggagaccaaguuccugacggagaaccugcuccuguacaucgacaucaacgggaaccugcaccccgacuccgccacccucgugagcgacaucgacaucaccuuccugaagaaggacgcccccuacaucgugggcgacgucgugcaggagggcgugcugaccgccgucgugauccccacgaagaaggccgggggcaccaccgagaugcucgcgaaggcccugcgcaaggugccgaccgacaacuacaucacgaccuaccccgggcagggccugaacggguacaccgucgaggaggccaagaccgugcucaagaagugcaaguccgccuucuacauccugcccagcaucaucuccaacgagaagcaggagauccugggcaccgugagcuggaaccuccgggagaugcuggcgcacgccgaggagacgcgcaagcugaugcccgucugcguggagaccaaggccaucguguccaccauccagcggaaguacaagggcaucaagauccaggagggggucguggacuacggcgcccgcuucuacuucuacaccagcaagacgaccguggccucccugaucaacacccucaacgaccugaacgagacccuggucacgaugccgcucggguacgugacccacggccugaaccuggaggaggcggcccgguacaugcgcagccucaaggugcccgccaccgucuccgugagcucccccgacgccgugaccgccuacaacggguaccugacgagcuccagcaagacccccgaggagcacuucaucgagaccaucucccuggcgggcagcuacaaggacuggagcuacuccggccagagcacccagcucgggaucgaguuccugaagcggggcgacaaguccgucuacuacacgagcaacccgaccaccuuccaccuggacggggaggugaucaccuucgacaaccucaagacgcugcugucccuccgcgaggugcggaccaucaaggucuucaccaccguggacaacaucaaccugcacacgcagguggucgacaugagcaugaccuacggccagcaguucggccugaccuaccucgacggggccgacgugaccaagaucaagccccacaacucccacgagggcaagacguucuacgugcugcccaacgacgacacccugcgcgucgaggccuucgaguacuaccacaccaccgacccgagcuuccucgggcgguacauguccgcccugaaccacacgaagaaguggaaguacccccaggugaacggccugaccagcaucaagugggccgacaacaacugcuaccucgcgaccgcccugcugacccuccagcagaucgagcugaaguucaacccccccgcccugcaggacgccuacuaccgcgcgcgggccggggaggccgccaacuucugcgcccucauccuggcguacugcaacaagacggugggcgagcugggcgacguccgcgagaccauguccuaccucuuccagcacgccaaccuggacagcugcaagcgggugcugaacgucgugugcaagaccugcgggcagcagcagaccacccucaagggcguggaggccgucauguacauggggacgcuguccuacgagcaguucaagaagggcgugcagaucccgugcaccugcgggaagcaggccaccaaguaccuggugcagcaggagagccccuucgucaugauguccgccccccccgcgcaguacgagcucaagcacggcaccuucacgugcgccagcgaguacaccggcaacuaccagugcgggcacuacaagcacaucaccuccaaggagacccuguacugcaucgacggcgcccugcucacgaagagcagcgaguacaaggggccgaucaccgacguguucuacaaggagaacuccuacaccaccacgaucaagcccgugaccuacaagcuggacggcgucgugugcaccgagaucgaccccaagcuggacaacuacuacaagaaggacaacagcuacuucaccgagcagcccaucgaccucgugccgaaccagcccuaccccaacgccuccuucgacaacuucaaguucgucugcgacaacaucaaguucgccgacgaccugaaccagcugacgggguacaagaagcccgcgagccgcgagcucaaggugaccuucuucccggaccugaacggcgacguggucgccaucgacuacaagcacuacacccccuccuucaagaagggcgccaagcugcuccacaagcccaucguguggcacgugaacaacgccaccaacaaggcgacguacaagcccaacaccuggugcauccggugccuguggagcaccaagccggucgagaccuccaacagcuucgacgugcugaaguccgaggacgcccaggggauggacaaccucgccugcgaggaccugaagcccgugagcgaggaggucguggagaaccccacgauccagaaggacgugcuggagugcaacgucaagaccaccgagguggugggcgacaucauccucaagcccgccaacaacucccugaagaucaccgaggaggucgggcacacggaccugauggccgcguacguggacaacagcucccucaccaucaagaagccgaacgagcugagccgcgugcugggccucaagacccuggccacccacgggcuggccgccgucaacuccgugcccugggacacgaucgccaacuacgcgaagcccuuccucaacaagguggucagcaccaccaccaacaucgugacgcgcugccugaaccgggugugcaccaacuacaugccguacuucuucacccugcuccugcagcugugcaccuucacccgcuccacgaacagccggaucaaggccuccaugcccaccaccaucgccaagaacaccgucaagagcgugggcaaguucugccucgaggccagcuucaacuaccugaagucccccaacuucagcaagcugaucaacaucaucaucugguuccuccugcuguccgugugccucggcagccugaucuacuccacggccgcgcuggggguccucaugagcaaccugggcaugcccuccuacugcaccggguaccgcgagggcuaccugaacagcaccaacgugaccaucgccacguacugcaccggcuccaucccgugcagcgugugccucuccgggcuggacagccuggacaccuaccccucccucgagaccauccagaucacgaucagcuccuucaagugggaccugaccgccuucggccuggucgccgagugguuccucgccuacauccuguucacccgguucuucuacgugcuggggcucgcggccaucaugcagcuguucuucagcuacuucgccgugcacuucaucuccaacagcuggcugauguggcugaucaucaaccucguccagauggcccccaucuccgcgauggugcgcauguacaucuucuucgccagcuucuacuacguguggaagagcuacguccacgugguggacggcugcaacuccagcaccugcaugaugugcuacaagcggaaccgcgccacgcgggucgagugcaccaccaucgugaacgggguccgccgguccuucuacguguacgccaacggcggcaagggguucugcaagcugcacaacuggaacugcgugaacugcgacaccuucugcgccggcagcacguucaucuccgacgaggucgcgcgcgaccugagccuccaguucaagcggcccaucaacccgaccgaccaguccagcuacaucguggacuccgugaccgucaagaacgggagcauccaccuguacuucgacaaggccggccagaagaccuacgagcgccacucccugagccacuucgugaaccucgacaaccugcgggccaacaacacgaaggggucccugcccaucaacgugaucgucuucgacggcaagagcaagugcgaggaguccagcgccaaguccgccagcguguacuacucccagcucaugugccagcccauccugcugcucgaccaggcgcuggugagcgacgucggcgacagcgccgagguggccgugaagauguucgacgccuacgucaacaccuucuccagcaccuucaacgugcccauggagaagcugaagacccucguggccacggcggaggccgagcuggccaagaacgucucccuggacaacgugcucagcaccuucaucuccgccgcgcgccagggguucguggacagcgacgucgagaccaaggacgugguggagugccugaagcugucccaccagagcgacaucgaggucaccggcgacuccugcaacaacuacaugcucacguacaacaagguggagaacaugaccccgcgggaccugggggccugcaucgacugcagcgcccgccacaucaacgcccagguggccaagucccacaacaucgcgcugaucuggaacgucaaggacuucaugagccucuccgagcagcugcggaagcagauccgcagcgccgccaagaagaacaaccugcccuucaagcucaccugcgccaccacgcgccagguggugaacgucgugaccaccaagaucgcccugaagggcggguga

SEQ ID NO: 17791 - RNA, 5841 nt, Artificial Sequence
  SARS-CoV-2__MT831625.1__non-structural protein 3 (NSP3) CDS gc
auggcccccaccaaggugaccuucggcgacgacacggucaucgaggugcagggguacaagagcgugaacaucaccuucgagcuggacgagcgcaucgacaagguccucaacgagaagugcuccgccuacaccguggagcugggcaccgaggugaacgaguucgcgugcgucguggccgacgccgugaucaagacgcugcagccggucagcgagcuccugaccccccuggggaucgaccucgacgagugguccauggccaccuacuaccuguucgacgagagcggcgaguucaagcuggccucccacauguacugcagcuucuacccccccgacgaggacgaggaggagggggacugcgaggaggaggaguucgagccguccacccaguacgaguacggcacggaggacgacuaccagggcaagccccucgaguucggggcgaccagcgccgcccugcagcccgaggaggagcaggaggaggacuggcuggacgacgacucccagcagaccgugggccagcaggacgggagcgaggacaaccagaccacgaccauccagaccaucguggagguccagccccagcucgagauggagcugaccccgguggugcagacgaucgaggucaacuccuucagcggcuaccugaagcucaccgacaacguguacaucaagaacgccgacaucguggaggaggcgaagaaggucaagcccaccgugguggucaacgccgccaacguguaccugaagcacgggggcggcguggccggggcccugaacaaggcgaccaacaacgccaugcaggucgaguccgacgacuacaucgccacgaacggcccccucaagguggggggcagcugcguccuguccggccacaaccuggccaagcacugccuccacgugguggggcccaacgucaacaagggcgaggacauccagcugcugaagagcgccuacgagaacuucaaccagcacgaggugcuccuggcgccgcugcucuccgccgggaucuucggcgccgaccccauccacagccugcgggugugcgucgacaccgugcgcaccaacguguaccuggccgucuucgacaagaaccucuacgacaagcugguguccagcuuccuggagaugaagagcgagaagcagguggagcagaagaucgccgagauccccaaggaggaggucaagcccuucaucaccgaguccaagccgagcguggagcagcggaagcaggacgacaagaagaucaaggcgugcguggaggaggucacgaccacccucgaggagaccaaguuccugacggagaaccugcuccuguacaucgacaucaacgggaaccugcaccccgacuccgccacccucgugagcgacaucgacaucaccuuccugaagaaggacgcccccuacaucgugggcgacgucgugcaggagggcgugcugaccgccgucgugauccccacgaagaaggccgggggcaccaccgagaugcucgcgaaggcccugcgcaaggugccgaccgacaacuacaucacgaccuaccccgggcagggccugaacggguacaccgucgaggaggccaagaccgugcucaagaagugcaaguccgccuucuacauccugcccagcaucaucuccaacgagaagcaggagauccugggcaccgugagcuggaaccuccgggagaugcuggcgcacgccgaggagacgcgcaagcugaugcccgucugcguggagaccaaggccaucguguccaccauccagcggaaguacaagggcaucaagauccaggagggggucguggacuacggcgcccgcuucuacuucuacaccagcaagacgaccguggccucccugaucaacacccucaacgaccugaacgagacccuggucacgaugccgcucggguacgugacccacggccugaaccuggaggaggcggcccgguacaugcgcagccucaaggugcccgccaccgucuccgugagcucccccgacgccgugaccgccuacaacggguaccugacgagcuccagcaagacccccgaggagcacuucaucgagaccaucucccuggcgggcagcuacaaggacuggagcuacuccggccagagcacccagcucgggaucgaguuccugaagcggggcgacaaguccgucuacuacacgagcaacccgaccaccuuccaccuggacggggaggugaucaccuucgacaaccucaagacgcugcugucccuccgcgaggugcggaccaucaaggucuucaccaccguggacaacaucaaccugcacacgcagguggucgacaugagcaugaccuacggccagcaguucggccccaccuaccuggacggggccgacgugaccaagaucaagccccacaacucccacgagggcaagacguucuacgugcucccgaacgacgacacccugcgcgucgaggccuucgaguacuaccacaccaccgaccccagcuuccuggggcgguacauguccgcccucaaccacacgaagaaguggaaguacccccaggugaacggccugaccagcaucaagugggccgacaacaacugcuaccuggcgaccgcccuccugacccugcagcagaucgagcucaaguucaaccccccggcccugcaggacgccuacuaccgcgcgcgggccggggaggccgccaacuucugcgcccugauccucgcguacugcaacaagacggugggcgagcugggcgacguccgcgagaccauguccuaccuguuccagcacgccaaccucgacagcugcaagcgggugcugaacgucgugugcaagaccugcgggcagcagcagaccacccugaagggcguggaggccgucauguacauggggacgcucuccuacgagcaguucaagaagggcgugcagauccccugcaccugcgggaagcaggugaccaaguaccugguccagcaggagagccccuucgugaugauguccgcccccccggcccaguacgagcugaagcacggcaccuucaucugcgcgagcgaguacacgggcaacuaccagugcgggcacuacaagcacaucaccuccaaggagacccucuacugcaucgacggcgcccugcugaccaagagcagcgaguacaaggggcccaucacggacguguucuacaaggagaacuccuacaccaccaccaucaagcccgucacguacaagcucgacggcguggugugcaccgagaucgaccccaagcuggacaacuacuacaagaaggacaacagcuacuucaccgagcagccgaucgaccugguccccaaccagcccuaccccaacgccuccuucgacaacuucaaguucgugugcgacaacaucaaguucgccgacgaccucaaccagcugaccggguacaagaagccggccagccgcgagcugaaggugacguucuuccccgaccucaacggcgacgucguggcgaucgacuacaagcacuacacccccuccuucaagaagggcgccaagcugcugcacaagcccaucguguggcacgucaacaacgccaccaacaaggccaccuacaagccgaacacguggugcauccggugccucuggagcaccaagcccguggagaccuccaacagcuucgacgugcugaaguccgaggacgcgcaggggauggacaaccuggccugcgaggaccucaagcccgucagcgaggaggugguggagaaccccaccauccagaaggacguccuggagugcaacgugaagacgaccgagguggucggcgacaucauccugaagccggccaacaacucccucaagaucaccgaggagguggggcacaccgaccugauggccgccuacguggacaacagcucccugacgaucaagaagcccaacgagcucagccgcguccugggccugaagacccucgcgacccacgggcuggccgccgugaacuccgugcccugggacaccaucgccaacuacgccaagccguuccugaacaaggucgugagcacgaccaccaacaucgugacccgcugccucaaccgggucugcacgaacuacaugcccuacuucuucacccugcugcuccagcugugcaccuucacccgcuccaccaacagccggaucaaggcguccaugcccacgaccaucgccaagaacaccgugaagagcgugggcaaguucugccuggaggccagcuucaacuaccucaagucccccaacuucagcaagcugaucaacaucaucaucugguuccugcuccuguccgucugccugggcagccucaucuacuccaccgccgcccugggggugcugaugagcaaccucggcaugccguccuacugcacgggguaccgcgagggcuaccugaacagcaccaacgugaccaucgcgaccuacugcacgggcuccauccccugcagcgucugccuguccgggcucgacagccuggacaccuaccccucccuggagaccauccagaucaccaucagcuccuucaagugggaccucacggccuucggccugguggccgagugguuccuggccuacauccucuucacccgguucuucuacgugcuggggcuggccgcgaucaugcagcucuucuucagcuacuucgccguccacuucaucuccaacagcuggcugauguggcugaucaucaaccuggugcagauggcccccaucuccgccauggugcgcauguacaucuucuucgcgagcuucuacuacgucuggaagagcuacgugcacguggucgacggcugcaacuccagcaccugcaugaugugcuacaagcggaaccgcgccacccggguggagugcacgaccaucgucaacggggugcgccgguccuucuacguguacgccaacggcggcaagggguucugcaagcuccacaacuggaacugcgucaacugcgacaccuucugcgccggcagcaccuucaucuccgacgagguggcccgcgaccugagccugcaguucaagcggccgaucaaccccacggaccaguccagcuacaucguggacuccgucaccgugaagaacgggagcauccaccucuacuucgacaaggcgggccagaagaccuacgagcgccacucccugagccacuucgugaaccuggacaaccuccgggccaacaacaccaaggggucccugcccaucaacgucaucguguucgacggcaagagcaagugcgaggaguccagcgccaaguccgccagcguguacuacucccagcugaugugccagcccauccuccugcuggaccaggcccucgucagcgacgugggcgacagcgcggagguggccgucaagauguucgacgccuacgugaacacguucuccagcaccuucaacgugccgauggagaagcugaagacccuggucgccaccgccgaggcggagcucgccaagaacgugucccuggacaacgugcugagcacguucaucuccgccgcccgccagggguucgucgacagcgacguggagaccaaggacguggucgagugccucaagcugucccaccagagcgacaucgaggugaccggcgacuccugcaacaacuacaugcugaccuacaacaagguggagaacaugacgccccgggaccucggggcgugcaucgacugcagcgcccgccacaucaacgcccaggucgccaagucccacaacaucgcccugaucuggaacgugaaggacuucaugagccuguccgagcagcuccggaagcagauccgcagcgcggccaagaagaacaaccugcccuucaagcugaccugcgccaccacccgccagguggucaacguggugacgaccaagaucgcccucaagggcggguga

SEQ ID NO: 17792 - RNA, 5841 nt, Artificial Sequence
  SARS-CoV-2__MT831632.1__non-structural protein 3 (NSP3) CDS gc
auggcccccaccaaggugaccuucggcgacgacacggucaucgaggugcagggguacaagagcgugaacaucaccuucgagcuggacgagcgcaucgacaagguccucaacgagaagugcuccgccuacaccguggagcugggcaccgaggugaacgaguucgcgugcgucguggccgacgccgugaucaagacgcugcagccggucagcgagcuccugaccccccuggggaucgaccucgacgagugguccauggccaccuacuaccuguucgacgagagcggcgaguucaagcuggccucccacauguacugcagcuucuacccccccgacgaggacgaggaggagggggacugcgaggaggaggaguucgagccguccacccaguacgaguacggcacggaggacgacuaccagggcaagccccucgaguucggggcgaccagcgccgcccugcagcccgaggaggagcaggaggaggacuggcuggacgacgacucccagcagaccgugggccagcaggacgggagcgaggacaaccagaccacgaccauccagaccaucguggagguccagccccagcucgagauggagcugaccccgguggugcagacgaucgaggucaacuccuucagcggcuaccugaagcucaccgacaacguguacaucaagaacgccgacaucguggaggaggcgaagaaggucaagcccaccgugguggucaacgccgccaacguguaccugaagcacgggggcggcguggccggggcccugaacaaggcgaccaacaacgccaugcaggucgaguccgacgacuacaucgccacgaacggcccccucaagguggggggcagcugcguccuguccggccacaaccuggccaagcacugccuccacgugguggggcccaacgucaacaagggcgaggacauccagcugcugaagagcgccuacgagaacuucaaccagcacgaggugcuccuggcgccgcugcucuccgccgggaucuucggcgccgaccccauccacagccugcgggugugcgucgacaccgugcgcaccaacguguaccuggccgucuucgacaagaaccucuacgacaagcugguguccagcuuccuggagaugaagagcgagaagcagguggagcagaagaucgccgagauccccaaggaggaggucaagcccuucaucaccgaguccaagccgagcguggagcagcggaagcaggacgacaagaagaucaaggcgugcguggaggaggucacgaccacccucgaggagaccaaguuccugacggagaaccugcuccuguacaucgacaucaacgggaaccugcaccccgacuccgccacccucgugagcgacaucgacaucaccuuccugaagaaggacgcccccuacaucgugggcgacgucgugcaggagggcgugcugaccgccgucgugauccccacgaagaaggccgggggcaccaccgagaugcucgcgaaggcccugcgcaaggugccgaccgacaacuacaucacgaccuaccccgggcagggccugaacggguacaccgucgaggaggccaagaccgugcucaagaagugcaaguccgccuucuacauccugcccagcaucaucuccaacgagaagcaggagauccugggcaccgugagcuggaaccuccgggagaugcuggcgcacgccgaggagacgcgcaagcugaugcccgucugcguggagaccaaggccaucguguccaccauccagcggaaguacaagggcaucaagauccaggagggggucguggacuacggcgcccgcuucuacuucuacaccagcaagacgaccguggccucccugaucaacacccucaacgaccugaacgagacccuggucacgaugccgcucggguacgugacccacggccugaaccuggaggaggcggcccgguacaugcgcagccucaaggugcccgccaccgucuccgugagcucccccgacgccgugaccgccuacaacggguaccugacgagcuccagcaagacccccgaggagcacuucaucgagaccaucucccuggcgggcagcuacaaggacuggagcuacuccggccagagcacccagcucgggaucgaguuccugaagcggggcgacaaguccgucuacuacacgagcaacccgaccaccuuccaccuggacggggaggugaucaccuucgacaaccucaagacgcugcugucccuccgcgaggugcggaccaucaaggucuucaccaccguggacaacaucaaccugcacacgcagguggucgacaugagcaugaccuacggccagcaguucggccccaccuaccuggacggggccgacgugaccaagaucaagccccacaacucccacgagggcaagacguucuacgugcucccgaacgacgacacccugcgcgucgaggccuucgaguacuaccacaccaccgaccccagcuuccuggggcgguacauguccgcccucaaccacacgaagaaguggaaguacccccaggugaacggccugaccagcaucaagugggccgacaacaacugcuaccuggcgaccgcccuccugacccugcagcagaucgagcucaaguucaaccccccggcccugcaggacgccuacuaccgcgcgcgggccggggaggccgccaacuucugcgcccugauccucgcguacugcaacaagacggugggcgagcugggcgacguccgcgagaccauguccuaccuguuccagcacgccaaccucgacagcugcaagcgggugcugaacgucgugugcaagaccugcgggcagcagcagaccacccugaagggcguggaggccgucauguacauggggacgcucuccuacgagcaguucaagaagggcgugcagauccccugcaccugcgggaagcaggccaccaaguaccuggugcagcaggagagccccuucgucaugauguccgcccccccggcgcaguacgagcugaagcacggcaccuucacgugcgccagcgaguacaccggcaacuaccagugcgggcacuacaagcacaucaccuccaaggagacccucuacugcaucgacggcgcccugcugacgaagagcagcgaguacaaggggcccaucaccgacguguucuacaaggagaacuccuacaccaccacgaucaagcccgugaccuacaagcucgacggcgucgugugcaccgagaucgaccccaagcuggacaacuacuacaagaaggacaacagcuacuucaccgagcagccgaucgaccuggugcccaaccagcccuaccccaacgccuccuucgacaacuucaaguucgucugcgacaacaucaaguucgccgacgaccucaaccagcugacgggguacaagaagccggcgagccgcgagcugaaggugaccuucuuccccgaccucaacggcgacguggucgccaucgacuacaagcacuacacccccuccuucaagaagggcgccaagcugcugcacaagcccaucguguggcacgugaacaacgccaccaacaaggcgacguacaagccgaacaccuggugcauccggugccucuggagcaccaagcccgucgagaccuccaacagcuucgacgugcugaaguccgaggacgcccaggggauggacaaccuggccugcgaggaccucaagcccgugagcgaggaggucguggagaaccccacgauccagaaggacgugcuggagugcaacgucaagaccaccgagguggugggcgacaucauccugaagccggccaacaacucccucaagaucaccgaggaggucgggcacacggaccugauggccgcguacguggacaacagcucccugaccaucaagaagcccaacgagcucagccgcgugcugggccugaagacccucgccauccacgggcuggccgccgucaacuccgugcccugggacaccaucgccaacuacgcgaagccguuccugaacaagguggucagcacgaccaccaacaucgugacccgcugccucaaccgggugugcacgaacuacaugcccuacuucuucacccugcugcuccagcugugcaccuucacccgcuccaccaacagccggaucaaggccuccaugcccacgaccaucgccaagaacaccgucaagagcgugggcaaguucugccuggaggccagcuucaacuaccucaagucccccaacuucagcaagcugaucaacaucaucaucugguuccugcuccuguccgugugccugggcagccucaucuacuccaccgccgcgcuggggguccugaugagcaaccucggcaugccguccuacugcacgggguaccgcgagggcuaccugaacagcaccaacgugaccaucgccaccuacugcacgggcuccauccccugcagcgugugccuguccgggcucgacagccuggacaccuaccccucccuggagaccauccagaucaccaucagcuccuucaagugggaccucacggccuucggccuggucgccgagugguuccuggccuacauccucuucacccgguucuucuacgugcuggggcuggcggccaucaugcagcucuucuucagcuacuucgccgugcacuucaucuccaacagcuggcugauguggcugaucaucaaccugguccagauggcccccaucuccgcgauggugcgcauguacaucuucuucgccagcuucuacuacguguggaagagcuacguccacgugguggacggcugcaacuccagcaccugcaugaugugcuacaagcggaaccgcgccacccgggucgagugcacgaccaucgugaacgggguccgccgguccuucuacguguacgccaacggcggcaagggguucugcaagcuccacaacuggaacugcgugaacugcgacaccuucugcgccggcagcaccuucaucuccgacgaggucgcgcgcgaccugagccugcaguucaagcggccgaucaaccccacggaccaguccagcuacaucguggacuccgugaccgucaagaacgggagcauccaccucuacuucgacaaggccggccagaagaccuacgagcgccacucccugagccacuucgugaaccuggacaaccuccgggccaacaacaccaaggggucccugcccaucaacgugaucgucuucgacggcaagagcaagugcgaggaguccagcgccaaguccgccagcguguacuacucccagcugaugugccagcccauccuccugcuggaccaggcgcucgugagcgacgucggcgacagcgccgagguggccgugaagauguucgacgccuacgucaacacguucuccagcaccuucaacaucccgauggagaagcugaagacccugguggccaccgcggaggccgagcucgccaagaacgugucccuggacaacguccugagcacguucaucuccgccgcgcgccagggguucguggacagcgacguggagaccaaggacgucguggagugccucaagcugucccaccagagcgacaucgaggugaccggcgacuccugcaacaacuacaugcugaccuacaacaaggucgagaacaugacgccccgggaccucggggccugcaucgacugcagcgcccgccacaucaacgcccagguggccaagucccacaacaucgcgcugaucuggaacgugaaggacuucaugagccuguccgagcagcuccggaagcagauccgcagcgccgccaagaagaacaaccugcccuucaagcugaccugcgccaccacccgccaggucgugaacguggucacgaccaagaucgcccucaagggcggguga

SEQ ID NO: 17793 - RNA, 5841 nt, Artificial Sequence
  SARS-CoV-2__MT831729.1__non-structural protein 3 (NSP3) CDS gc
auggcccccaccaaggugaccuucggcgacgacacggucaucgaggugcagggguacaagagcgugaacaucaccuucgagcuggacgagcgcaucgacaagguccucaacgagaagugcuccgccuacaccguggagcugggcaccgaggugaacgaguucgcgugcgucguggccgacgccgugaucaagacgcugcagccggucagcgagcuccugaccccccuggggaucgaccucgacgagugguccauggccaccuacuaccuguucgacgagagcggcgaguucaagcuggccucccacauguacugcagcuucuacccccccgacgaggacgaggaggagggggacugcgaggaggaggaguucgagccguccacccaguacgaguacggcacggaggacgacuaccagggcaagccccucgaguucggggcgaccagcgccgcccugcagcccgaggaggagcaggaggaggacuggcuggacgacgacucccagcagaccgugggccagcaggacgggagcgaggacaaccagaccacgaccauccagaccaucguggagguccagccccagcucgagauggagcugaccccgguggugcagacgaucgaggucaacuccuucagcggcuaccugaagcucaccgacaacguguacaucaagaacgccgacaucguggaggaggcgaagaaggucaagcccaccgugguggucaacgccgccaacguguaccugaagcacgggggcggcguggccggggcccugaacaaggcgaccaacaacgccaugcaggucgaguccgacgacuacaucgccacgaacggcccccucaagguggggggcagcugcguccuguccggccacaaccuggccaagcacugccuccacgugguggggcccaacgucaacaagggcgaggacauccagcugcugaagagcgccuacgagaacuucaaccagcacgaggugcuccuggcgccgcugcucuccgccgggaucuucggcgccgaccccauccacagccugcgggugugcgucgacaccgugcgcaccaacguguaccuggccgucuucgacaagaaccucuacgacaagcugguguccagcuuccuggagaugaagagcgagaagcagguggagcagaagaucgccgagauccccaaggaggaggucaagcccuucaucaccgaguccaagccgagcguggagcagcggaagcaggacgacaagaagaucaaggcgugcguggaggaggucacgaccacccucgaggagaccaaguuccugacggagaaccugcuccuguacaucgacaucaacgggaaccugcaccccgacuccgccacccucgugagcgacaucgacaucaccuuccugaagaaggacgcccccuacaucgugggcgacgucgugcaggagggcgugcugaccgccgucgugauccccacgaagaaggccgggggcaccaccgagaugcucgcgaaggcccugcgcaaggugccgaccgacaacuacaucacgaccuaccccgggcagggccugaacggguacaccgucgaggaggccaagaccgugcucaagaagugcaaguccgccuucuacauccugcccagcaucaucuccaacgagaagcaggagauccugggcaccgugagcuggaaccuccgggagaugcuggcgcacgccgaggagacgcgcaagcugaugcccgucugcguggagaccaaggccaucguguccaccauccagcggaaguacaagggcaucaagauccaggagggggucguggacuacggcgcccgcuucuacuucuacaccagcaagacgaccguggccucccugaucaacacccucaacgaccugaacgagacccuggucacgaugccgcucggguacgugacccacggccugaaccuggaggaggcggcccgguacaugcgcagccucaaggugcccgccaccgucuccgugagcucccccgacgccgugaccgccuacaacggguaccugacgagcuccagcaagacccccgaggagcacuucaucgagaccaucucccuggcgggcagcuacaaggacuggagcuacuccggccagagcacccagcucgggaucgaguuccugaagcggggcgacaaguccgucuacuacacgagcaacccgaccaccuuccaccuggacggggaggugaucaccuucgacaaccucaagacgcugcugucccuccgcgaggugcggaccaucaaggucuucaccaccguggacaacaucaaccugcacacgcagguggucgacaugagcaugaccuacggccagcaguucggccccaccuaccuggacggggccgacgugaccaagaucaagccccacaacucccacgagggcaagacguucuacgugcucccgaacgacgacacccugcgcgucgaggccuucgaguacuaccacaccaccgaccccagcuuccuggggcgguacauguccgcccucaaccacacgaagaaguggaaguacccccaggugaacggccugaccagcaucaagugggccgacaacaacugcuaccuggcgaccgcccuccugacccugcagcagaucgagcucaaguucaaccccccggcccugcaggacgccuacuaccgcgcgcgggccggggaggccgccaacuucugcgcccugauccucgcguacugcaacaagacggugggcgagcugggcgacguccgcgagaccauguccuaccuguuccagcacgccaaccucgacagcugcaagcgggugcugaacgucgugugcaagaccugcgggcagcagcagaccacccugaagggcguggaggccgucauguacauggggacgcucuccuacgagcaguucaagaagggcgugcagauccccugcaccugcgggaagcaggccaccaaguaccuggugcagcaggagagccccuucgucaugauguccgcccccccggcgcaguacgagcugaagcacggcaccuucacgugcgccagcgaguacaccggcaacuaccagugcgggcacuacaagcacaucaccuccaaggagacccucuacugcaucgacggcgcccugcugacgaagagcagcgaguacaaggggcccaucaccgacguguucuacaaggagaacuccuacaccaccacgaucaagcccgugaccuacaagcucgacggcgucgugugcaccgagaucgaccccaagcuggacaacuacuacaagaaggacaacagcuacuucaccgagcagccgaucgaccuggugcccaaccagcccuaccccaacgccuccuucgacaacuucaaguucgucugcgacaacaucaaguucgccgacgaccucaaccagcugacgggguacaagaagccggcgagccgcgagcugaaggugaccuucuuccccgaccucaacggcgacguggucgccaucgacuacaagcacuacacccccuccuucaagaagggcgccaagcugcugcacaagcccaucguguggcacgugaacaacgccaccaacaaggcgacguacaagccgaacaccuggugcauccggugccucuggagcaccaagcccgucgagaccuccaacagcuucgacgugcugaaguccgaggacgcccaggggauggacaaccuggccugcgaggaccucaagcccgugagcgaggaggucguggagaaccccacgauccagaaggacgugcuggagugcaacgucaagaccaccgagguggugggcgacaucauccugaagccggccaacaacucccucaagaucaccgaggaggucgggcacacggaccugauggccgcguacguggacaacagcucccugaccaucaagaagcccaacgagcucagccgcgugcugggccugaagacccucgccacccacgggcuggccgccgucaacuccgugcccugggacacgaucgccaacuacgcgaagccguuccugaacaagguggucagcaccaccaccaacaucgugacgcgcugccucaaccgggugugcaccaacuacaugcccuacuucuucacccugcugcuccagcugugcaccuucacccgcuccacgaacagccggaucaaggccuccaugcccaccaccaucgccaagaacaccgucaagagcgugggcaaguucugccuggaggccagcuucaacuaccucaagucccccaacuucagcaagcugaucaacaucaucaucugguuccugcuccuguccgugugccugggcagccucaucuacuccacggccgcgcuggggguccugaugagcaaccucggcaugccguccuacugcaccggguaccgcgagggcuaccugaacagcaccaacgugaccaucgccacguacugcaccggcuccauccccugcagcgugugccuguccgggcucgacagccuggacaccuaccccucccuggagaccauccagaucacgaucagcuccuucaagugggaccucaccgccuucggccuggucgccgagugguuccuggccuacauccucuucacccgguucuucuacgugcuggggcuggcggccaucaugcagcucuucuucagcuacuucgccgugcacuucaucuccaacagcuggcugaucuggcugaucaucaaccugguccagauggcccccaucuccgcgauggugcgcauguacaucuucuucgccagcuucuacuacguguggaagagcuacguccacgugguggacggcugcaacuccagcaccugcaugaugugcuacaagcggaaccgcgccacgcgggucgagugcaccaccaucgugaacgggguccgccgguccuucuacguguacgccaacggcggcaagggguucugcaagcuccacaacuggaacugcgugaacugcgacaccuucugcgccggcagcacguucaucuccgacgaggucgcgcgcgaccugagccugcaguucaagcggccgaucaaccccaccgaccaguccagcuacaucguggacuccgugaccgucaagaacgggagcauccaccucuacuucgacaaggccggccagaagaccuacgagcgccacucccugagccacuucgugaaccuggacaaccuccgggccaacaacacgaaggggucccugcccaucaacgugaucgucuucgacggcaagagcaagugcgaggaguccagcgccaaguccgccagcguguacuacucccagcugaugugccagcccauccuccugcuggaccaggcgcucgugagcgacgucggcgacagcgccgagguggccgugaagauguucgacgccuacgucaacaccuucuccagcaccuucaacgugccgauggagaagcugaagacccugguggccacggcggaggccgagcucgccaagaacgucucccuggacaacgugcugagcaccuucaucuccgccgcgcgccagggguucguggacagcgacgucgagaccaaggacgugguggagugccucaagcugucccaccagagcgacaucgaggucaccggcgacuccugcaacaacuacaugcugacguacaacaagguggagaacaugaccccccgggaccucggggccugcaucgacugcagcgcccgccacaucaacgcccagguggccaagucccacaacaucgcgcugaucuggaacgucaaggacuucaugagccuguccgagcagcuccggaagcagauccgcagcgccgccaagaagaacaaccugcccuucaagcugaccugcgccaccacgcgccagguggugaacgucgugaccaccaagaucgcccucaagggcggguga

SEQ ID NO: 17794 - RNA, 5841 nt, Artificial Sequence
  SARS-CoV-2__MT831867.1__non-structural protein 3 (NSP3) CDS gc
auggcccccaccaaggugaccuucggcgacgacacggucaucgaggugcagggguacaagagcgugaacaucaccuucgagcuggacgagcgcaucgacaagguccucaacgagaagugcuccgccuacaccguggagcugggcaccgaggugaacgaguucgcgugcgucguggccgacgccgugaucaagacgcugcagccggucagcgagcuccugaccccccuggggaucgaccucgacgagugguccauggccaccuacuaccuguucgacgagagcggcgaguucaagcuggccucccacauguacugcagcuucuacccccccgacgaggacgaggaggagggggacugcgaggaggaggaguucgagccguccacccaguacgaguacggcacggaggacgacuaccagggcaagccccucgaguucggggcgaccagcgccgcccugcagcccgaggaggagcaggaggaggacuggcuggacgacgacucccagcagaccgugggccagcaggacgggagcgaggacaaccagaccacgaccauccagaccaucguggagguccagccccagcucgagauggagcugaccccgguggugcagacgaucgaggucaacuccuucagcggcuaccugaagcucaccgacaacguguacaucaagaacgccgacaucguggaggaggcgaagaaggucaagcccaccgugguggucaacgccgccaacguguaccugaagcacgggggcggcguggccggggcccugaacaaggcgaccaacaacgccaugcaggucgaguccgacgacuacaucgccacgaacggcccccucaagguggggggcagcugcguccuguccggccacaaccuggccaagcacugccuccacgugguggggcccaacgucaacaagggcgaggacauccagcugcugaagagcgccuacgagaacuucaaccagcacgaggugcuccuggcgccgcugcucuccgccgggaucuucggcgccgaccccauccacagccugcgggugugcgucgacaccgugcgcaccaacguguaccuggccgucuucgacaagaaccucuacgacaagcugguguccagcuuccuggagaugaagagcgagaagcagguggagcagaagaucgccgagauccccaaggaggaggucaagcccuucaucaccgaguccaagccgagcguggagcagcggaagcaggacgacaagaagaucaaggcgugcguggaggaggucacgaccacccucgaggagaccaaguuccugacggagaaccugcuccuguacaucgacaucaacgggaaccugcaccccgacuccgccacccucgugagcgacaucgacaucaccuuccugaagaaggacgcccccuacaucgugggcgacgucgugcaggagggcgugcugaccgccgucgugauccccacgaagaaggccgggggcaccaccgagaugcucgcgaaggcccugcgcaaggugccgaccgacaacuacaucacgaccuaccccgggcagggccugaacggguacaccgucgaggaggccaagaccgugcucaagaagugcaaguccgccuucuacauccugcccagcaucaucuccaacgagaagcaggagauccugggcaccgugagcuggaaccuccgggagaugcuggcgcacgccgaggagacgcgcaagcugaugcccgucugcguggagaccaaggccaucguguccaccauccagcggaaguacaagggcaucaagauccaggagggggucguggacuacggcgcccgcuucuacuucuacaccagcaagacgaccguggccucccugaucaacacccucaacgaccugaacgagacccuggucacgaugccgcucggguacgugacccacggccugaaccuggaggaggcggcccgguacaugcgcagccucaaggugcccgccaccgucuccgugagcucccccgacgccgugaccgccuacaacggguaccugacgagcuccagcaagacccccgaggagcacuucaucgagaccaucucccuggcgggcagcuacaaggacuggagcuacuccggccagagcacccagcucgggaucgaguuccugaagcggggcgacaaguccgucuacuacacgagcaacccgaccaccuuccaccuggacggggaggugaucaccuucgacaaccucaagacgcugcugucccuccgcgaggugcggaccaucaaggucuucaccaccguggacaacaucaaccugcacacgcagguggucgacaugagcaugaccuacggccagcaguucggccccaccuaccuggacggggccgacgugaccaagaucaagccccacaacucccacgagggcaagacguucuacgugcucccgaacgacgacacccugcgcgucgaggccuucgaguacuaccacaccaccgaccccagcuuccuggggcgguacauguccgcccucaaccacacgaagaaguggaaguacccccaggugaacggccugaccagcaucaagugggccgacaacaacugcuaccuggcgaccgcccuccugacccugcagcagaucgagcucaaguucaaccccccggcccugcaggacgccuacuaccgcgcgcgggccggggaggccgccaacuucugcgcccugauccucgcguacugcaacaagacggugggcgagcugggcgacguccgcgagaccauguccuaccuguuccagcacgccaaccucgacagcugcaagcgggugcugaacgucgugugcaagaccugcgggcagcagcagaccacccugaagggcguggaggccgucauguacauggggacgcucuccuacgagcaguucaagaagggcgugcagauccccugcaccugcgggaagcaggccaccaaguaccuggugcagcaggagagccccuucgucaugauguccgcccccccggcgcaguacgagcugaagcacggcaccuucacgugcgccagcgaguacaccggcaacuaccagugcgggcacuacaagcacaucaccuccaaggagacccucuacugcaucgacggcgcccugcugacgaagagcagcgaguacaaggggcccaucaccgacguguucuacaaggagaacuccuacaccaccacgaucaagcccgugaccuacaagcucgacggcgucgugugcaccgagaucgaccccaagcuggacaacuacuacaagaaggacaacagcuacuucaccgagcagccgaucgaccuggugcccaaccagcccuaccccaacgccuccuucgacaacuucaaguucgucugcgacaacaucaaguucgccgacgaccucaaccagcugacgggguacaagaagccggcgagccgcgagcugaaggugaccuucuuccccgaccucaacggcgacguggucgccaucgacuacaagcacuacacccccuccuucaagaagggcgccaagcugcugcacaagcccaucguguggcacgugaacaacgccaccaacaaggcgacguacaagccgaacaccuggugcauccggugccucuggagcaccaagcccgucgagaccuccaacagcuucgacgugcugaaguccgaggacgcccaggggauggacaaccuggccugcgaggaccucaagcccgugagcgaggaggucguggagaaccccacgauccagaaggacgugcuggagugcaacgucaagaccaccgagguggugggcgacaucauccugaagccggccaacaacucccucaagaucaccgaggaggucgggcacacggaccugauggccgcguacguggacaacagcucccugaccaucaagaagcccaacgagcucagccgcgugcugggccugaagacccucgccacccacgggcuggccgccgucaacuccgugcccugggacacgaucgccaacuacgcgaagccguuccugaacaagguggucagcaccaccaccaacaucgugacgcgcugccucaaccgggugugcaccaacuacaugcccuacuucuucacccugcugcuccagcugugcaccuucacccgcuccacgaacagccggaucaaggccuccaugcccaccaccaucgccaagaacaccgucaagagcgugggcaaguucugccuggaggccagcuucaacuaccucaagucccccaacuucagcaagcugaucaacaucaucaucugguuccugcuccuguccgugugccugggcagccucaucuacuccacggccgcgcuggggguccugaugagcaaccucggcaugccguccuacugcaccggguaccgcgagggcuaccugaacagcaccaacgugaccaucgccacguacugcaccggcuccauccccugcagcgugugccuguccgggcucgacagccuggacaccuaccccucccuggagaccauccagaucacgaucagcuccuucaagugggaccucaccgccuucggccuggucgccgagugguuccuggccuacauccucuucacccgguucuucuacgugcuggggcuggcggccaucaugcagcucuucuucagcuacuucgccgugcacuucaucuccaacagcuggcugauguggcugaucaucaaccugguccagauggcccccaucuccgcgauggugcgcauguacaucuucuucgccagcuucuacuacguguggaagagcuacguccacgugguggacggcugcaacuccagcaccugcaugaugugcuacaagcggaaccgcgccacgcgggucgagugcaccaccaucgugaacgggguccgccgguccuucuacguguacgccaacggcggcaagggguucugcaagcuccacaacuggaacugcgugaacugcgacaccuucugcgccggcagcacguucaucuccgacgaggucgcgcgcgaccugagccugcaguucaagcggccgaucaaccccaccgaccaguccagcuacaucguggacuccgugaccgucaagaacgggagcauccaccucuacuucgacaaggccggccagaagaccuacgagcgccacucccugagccacuucgugaaccuggacaaccuccgggccaacaacacgaaggggucccugcccaucaacgugaucgucuucgacggcaagagcaagugcgaggaguccagcgccaaguccgccagcguguacuacucccagcugaugugccagcccauccuccugcuggaccaggcgcucgugagcgacgucggcgacagcgccgagguggccgugaagauguucgacgccuacgucaacaccuucucccugaccuucaacgugccgauggagaagcugaagacccucguggccacggcggaggccgagcuggccaagaacgucagccuggacaacgugcucuccaccuucaucagcgccgcgcgccagggguucguggacuccgacgucgagaccaaggacgugguggagugccugaagcugagccaccaguccgacaucgaggucaccggcgacagcugcaacaacuacaugcucacguacaacaagguggagaacaugaccccccgggaccugggggccugcaucgacugcuccgcccgccacaucaacgcccagguggccaagagccacaacaucgcgcugaucuggaacgucaaggacuucaugucccucagcgagcagcugcggaagcagauccgcuccgccgccaagaagaacaaccugcccuucaagcucaccugcgccaccacgcgccagguggugaacgucgugaccaccaagaucgcccugaagggcggguga

SEQ ID NO: 17795 - RNA, 5841 nt, Artificial Sequence
  SARS-CoV-2__MT833962.1__non-structural protein 3 (NSP3) CDS gc
auggcccccaccaaggugaccuucggcgacgacacggucaucgaggugcagggguacaagagcgugaacaucaccuucgagcuggacgagcgcaucgacaagguccucaacgagaagugcuccgccuacaccguggagcugggcaccgaggugaacgaguucgcgugcgucguggccgacgccgugaucaagacgcugcagccggucagcgagcuccugaccccccuggggaucgaccucgacgagugguccauggccaccuacuaccuguucgacgagagcggcgaguucaagcuggccucccacauguacugcagcuucuacccccccgacgaggacgaggaggagggggacugcgaggaggaggaguucgagccguccacccaguacgaguacggcacggaggacgacuaccagggcaagccccucgaguucggggcgaccagcgccgcccugcagcccgaggaggagcaggaggaggacuggcuggacgacgacucccagcagaccgugggccagcaggacgggagcgaggacaaccagaccacgaccauccagaccaucguggagguccagccccagcucgagauggagcugaccccgguggugcagacgaucgaggucaacuccuucagcggcuaccugaagcucaccgacaacguguacaucaagaacgccgacaucguggaggaggcgaagaaggucaagcccaccgugguggucaacgccgccaacguguaccugaagcacgggggcggcguggccggggcccugaacaaggcgaccaacaacgccaugcaggucgaguccgacgacuacaucgccacgaacggcccccucaagguggggggcagcugcguccuguccggccacaaccuggccaagcacugccuccacgugguggggcccaacgucaacaagggcgaggacauccagcugcugaagagcgccuacgagaacuucaaccagcacgaggugcuccuggcgccgcugcucuccgccgggaucuucggcgccgaccccauccacagccugcgggugugcgucgacaccgugcgcaccaacguguaccuggccgucuucgacaagaaccucuacgacaagcugguguccagcuuccuggagaugaagagcgagaagcagguggagcagaagaucgccgagauccccaaggaggaggucaagcccuucaucaucgaguccaagccgagcguggagcagcggaagcaggacgacaagaagaucaaggcgugcguggaggaggucaccacgacccucgaggagaccaaguuccugaccgagaaccugcuccuguacaucgacaucaacgggaaccugcaccccgacuccgccacgcucgugagcgacaucgacaucaccuuccugaagaaggacgcccccuacaucgugggcgacgucgugcaggagggcgugcugaccgccgucgugauccccaccaagaaggccgggggcacgaccgagaugcucgcgaaggcccugcgcaaggugccgaccgacaacuacaucaccacguaccccgggcagggccugaacggguacaccgucgaggaggccaagaccgugcucaagaagugcaaguccgccuucuacauccugcccagcaucaucuccaacgagaagcaggagauccugggcaccgugagcuggaaccuccgggagaugcuggcgcacgccgaggagacccgcaagcugaugcccgucugcguggagacgaaggccaucguguccaccauccagcggaaguacaagggcaucaagauccaggagggggucguggacuacggcgcccgcuucuacuucuacaccagcaagaccacgguggccucccugaucaacacccucaacgaccugaacgagacccuggucaccaugccgcucggguacgugacgcacggccugaaccuggaggaggcggcccgguacaugcgcagccucaaggugcccgccaccgucuccgugagcucccccgacgccgugaccgccuacaacggguaccugaccagcuccagcaagacgcccgaggagcacuucaucgagaccaucucccuggcgggcagcuacaaggacuggagcuacuccggccagagcacccagcucgggaucgaguuccugaagcggggcgacaaguccgucuacuacaccagcaacccgacgaccuuccaccuggacggggaggugaucaccuucgacaaccucaagacccugcugucccuccgcgaggugcggacgaucaaggucuucaccaccguggacaacaucaaccugcacacccagguggucgacaugagcaugacguacggccagcaguucggccccaccuaccuggacggggccgacgugaccaagaucaagccccacaacucccacgagggcaagaccuucuacgugcucccgaacgacgacacgcugcgcgucgaggccuucgaguacuaccacaccaccgaccccagcuuccuggggcgguacauguccgcccucaaccacaccaagaaguggaaguacccccaggugaacggccugacgagcaucaagugggccgacaacaacugcuaccuggcgaccgcccuccugacccugcagcagaucgagcucaaguucaaccccccggcccugcaggacgccuacuaccgcgcgcgggccggggaggccgccaacuucugcgcccugauccucgcguacugcaacaagaccgugggcgagcugggcgacguccgcgagacgauguccuaccuguuccagcacgccaaccucgacagcugcaagcgggugcugaacgucgugugcaagaccugcgggcagcagcagaccacccugaagggcguggaggccgucauguacauggggacccucuccuacgagcaguucaagaagggcgugcagauccccugcacgugcgggaagcaggccaccaaguaccuggugcagcaggagagccccuucgucaugauguccgcccccccggcgcaguacgagcugaagcacggcaccuucaccugcgccagcgaguacacgggcaacuaccagugcgggcacuacaagcacaucaccuccaaggagacccucuacugcaucgacggcgcccugcugaccaagagcagcgaguacaaggggcccaucacggacguguucuacaaggagaacuccuacaccaccaccaucaagcccgugacguacaagcucgacggcgucgugugcaccgagaucgaccccaagcuggacaacuacuacaagaaggacaacagcuacuucaccgagcagccgaucgaccuggugcccaaccagcccuaccccaacgccuccuucgacaacuucaaguucgucugcgacaacaucaaguucgccgacgaccucaaccagcugaccggguacaagaagccggcgagccgcgagcugaaggugacguucuuccccgaccucaacggcgacguggucgccaucgacuacaagcacuacacccccuccuucaagaagggcgccaagcugcugcacaagcccaucguguggcacgugaacaacgccaccaacaaggcgaccuacaagccgaacacguggugcauccggugccucuggagcaccaagcccgucgagaccuccaacagcuucgacgugcugaaguccgaggacgcccaggggauggacaaccuggccugcgaggaccucaagcuggugagcgaggaggucguggagaaccccaccauccagaaggacgugcuggagugcaacgucaagacgaccgagguggugggcgacaucauccucaagcccgccaacaacucccugaagaucaucgaggaggucgggcacaccgaccugauggccgcguacguggacaacagcucccucaccaucaagaagccgaacgagcugagccgcgugcugggccucaagacgcuggccacccacgggcuggccgccgucaacuccgugcccugggacaccaucgccaacuacgcgaagcccuuccucaacaagguggucagcaccacgaccaacaucgugacccgcugccugaaccgggugugcaccaacuacaugccguacuucuucacgcugcuccugcagcugugcaccuucacccgcuccaccaacagccggaucaaggccuccaugcccaccacgaucgccaagaacaccgucaagagcgugggcaaguucugccucgaggccagcuucaacuaccugaagucccccaacuucagcaagcugaucaacaucaucaucugguuccuccugcuguccgugugccucggcagccugaucuacuccaccgccgcgcuggggguccucaugagcaaccugggcaugcccuccuacugcaccggguaccgcgagggcuaccugaacagcacgaacgugaccaucgccaccuacugcaccggcuccaucccgugcagcgugugccucuccgggcuggacagccuggacacguaccccucccucgagaccauccagaucaccaucagcuccuucaagugggaccugaccgccuucggccuggucgccgagugguuccucgccuacauccuguucacgcgguucuucuacgugcuggggcucgcggccaucaugcagcuguucuucagcuacuucgccgugcacuucaucuccaacagcuggcugauguggcugaucaucaaccucguccagauggcccccaucuccgcgauggugcgcauguacaucuucuucgccagcuucuacuacguguggaagagcuacguccacgugguggacggcugcaacuccagcaccugcaugaugugcuacaagcggaaccgcgccacccgggucgagugcaccacgaucgugaacgggguccgccgguccuucuacguguacgccaacggcggcaagggguucugcaagcugcacaacuggaacugcgugaacugcgacaccuucugcgccggcagcaccuucaucuccgacgaggucgcgcgcgaccugagccuccaguucaagcggcccaucaacccgaccgaccaguccagcuacaucguggacuccgugacggucaagaacgggagcauccaccuguacuucgacaaggccggccagaagaccuacgagcgccacucccugagccacuucgugaaccucgacaaccugcgggccaacaacaccaaggggucccugcccaucaacgugaucgucuucgacggcaagagcaagugcgaggaguccagcgccaaguccgccagcguguacuacucccagcucaugugccagcccauccugcugcucgaccaggcgcuggugagcgacgucggcgacagcgccgagguggccgugaagauguucgacgccuacgucaacaccuucuccagcacguucaacgugcccauggagaagcugaagacccucguggccaccgcggaggccgagcuggccaagaacgucucccuggacaacgugcucagcaccuucaucuccgccgcgcgccagggguucguggacagcgacgucgagacgaaggacgugguggagugccugaagcugucccaccagagcgacaucgaggucaccggcgacuccugcaacaacuacaugcucaccuacaacaagguggagaacaugaccccgcgggaccugggggccugcaucgacugcagcgcccgccacaucaacgcccagguggccaagucccacaacaucgcgcugaucuggaacgucaaggacuucaugagccucuccgagcagcugcggaagcagauccgcagcgccgccaagaagaacaaccugcccuucaagcucacgugcgccaccacccgccagguggugaacgucgugaccacgaagaucgcccugaagggcggguga

SEQ ID NO: 17796 - RNA, 5841 nt, Artificial Sequence
  SARS-CoV-2__MT833985.1__non-structural protein 3 (NSP3) CDS gc
auggcccccaccaaggugaccuucggcgacgacacggucaucgaggugcagggguacaagagcgugaacaucaccuucgagcuggacgagcgcaucgacaagguccucaacgagaagugcuccgccuacaccguggagcugggcaccgaggugaacgaguucgcgugcgucguggccgacgccgugaucaagacgcugcagccggucagcgagcuccugaccccccuggggaucgaccucgacgagugguccauggccaccuacuaccuguucgacgagagcggcgaguucaagcuggccucccacauguacugcagcuucuacccccccgacgaggacgaggaggagggggacugcgaggaggaggaguucgagccguccacccaguacgaguacggcacggaggacgacuaccagggcaagccccucgaguucggggcgaccagcgccgcccugcagcccgaggaggagcaggaggaggacuggcuggacgacgacucccagcagaccgugggccagcaggacgggagcgaggacaaccagaccacgaccauccagaccaucguggagguccagccccagcucgagauggagcugaccccgguggugcagacgaucgaggucaacuccuucagcggcuaccugaagcucaccgacaacguguacaucaagaacgccgacaucguggaggaggcgaagaaggucaagcccaccgugguggucaacgccgccaacguguaccugaagcacgggggcggcguggccggggcccugaacaaggcgaccaacaacgccaugcaggucgaguccgacgacuacaucgccacgaacggcccccucaagguggggggcagcugcguccuguccggccacaaccuggccaagcacugccuccacgugguggggcccaacgucaacaagggcgaggacauccagcugcugaagagcgccuacgagaacuucaaccagcacgaggugcuccuggcgccgcugcucuccgccgggaucuucggcgccgaccccauccacagccugcgggugugcgucgacaccgugcgcaccaacguguaccuggccgucuucgacaagaaccucuacgacaagcugguguccagcuuccuggagaugaagagcgagaagcagguggagcagaagaucgccgagauccccaaggaggaggucaagcccuucaucaccgaguccaagccgagcguggagcagcggaagcaggacgacaagaagaucaaggcgugcguggaggaggucacgaccacccucgaggagaccaaguuccugacggagaaccugcuccuguacaucgacaucaacgggaaccugcaccccgacuccgccacccucgugagcgacaucgacaucaccuuccugaagaaggacgcccccuacaucgugggcgacgucgugcaggagggcgugcugaccgccgucgugauccccacgaagaaggccgggggcaccaccgagaugcucgcgaaggcccugcgcaaggugccgaccgacaacuacaucacgaccuaccccgggcagggccugaacggguacaccgucgaggaggccaagaccgugcucaagaagugcaaguccgccuucuacauccugcccagcaucaucuccaacgagaagcaggagauccugggcaccgugagcuggaaccuccgggagaugcuggcgcacgccgaggagacgcgcaagcugaugcccgucugcguggagaccaaggccaucguguccaccauccagcggaaguacaagggcaucaagauccaggagggggucguggacuacggcgcccgcuucuacuucuacaccagcaagacgaccguggccucccugaucaacacccucaacgaccugaacgagacccuggucacgaugccgcucggguacgugacccacggccugaaccuggaggaggcggcccgguacaugcgcagccucaaggugcccgccaccgucuccgugagcucccccgacgccgugaccgccuacaacggguaccugacgagcuccagcaagacccccgaggagcacuucaucgagaccaucucccuggcgggcagcuacaaggacuggagcuacuccggccagagcacccagcucgggaucgaguuccugaagcggggcgacaaguccgucuacuacacgagcaacccgaccaccuuccaccuggacggggaggugaucaccuucgacaaccucaagacgcugcugucccuccgcgaggugcggaccaucaaggucuucaccaccguggacaacaucaaccugcacacgcagguggucgacaugagcaugaccuacggccagcaguucggccccaccuaccuggacggggccgacgugaccaagaucaagccccacaacucccacgagggcaagacguucuacgugcucccgaacgacgacacccugcgcgucgaggccuucgaguacuaccacaccaccgaccccagcuuccuggggcgguacauguccgcccucaaccacacgaagaaguggaaguacccccaggugaacggccugaccagcaucaagugggccgacaacaacugcuaccuggcgaccgcccuccugacccugcagcagaucgagcucaaguucaaccccccggcccugcaggacgccuacuaccgcgcgcgggccggggaggccgccaacuucugcgcccugauccucgcguacugcaacaagacggugggcgagcugggcgacguccgcgagaccauguccuaccuguuccagcacgccaaccucgacagcugcaagcgggugcugaacgucgugugcaagaccugcgggcagcagcagaccacccugaagggcguggaggccgucauguacauggggacgcucuccuacgagcaguucaagaagggcgugcagauccccugcaccugcgggaagcaggccaccaaguaccuggugcagcaggagagccccuucgucaugauguccgcccccccggcgcaguacgagcugaagcacggcaccuucacgugcgccagcgaguacaccggcaacuaccagugcgggcacuacaagcacaucaccuccaaggagacccucuacugcaucgacggcgcccugcugacgaagagcagcgaguacaaggggcccaucaccgacguguucuacaaggagaacuccuacaccaccacgaucaagcccgugaccuacaagcucgacggcgucgugugcaccgagaucgaccccaagcuggacaacuacuacaagaaggacaacagcuacuucaccgagcagccgaucgaccuggugcccaaccagcccuaccccaacgccuccuucgacaacuucaaguucgucugcgacaacaucaaguucgccgacgaccucaaccagcugacgggguacaagaagccggcgagccgcgagcugaaggugaccuucuuccccgaccucaacggcgacguggucgccaucgacuacaagcacuacacccccuccuucaagaagggcgccaagcugcugcacaagcccaucguguggcacgugaacaacgccaccaacaaggcgacguacaagccgaacaccuggugcauccggugccucuggagcaccaagcccgucgagaccuccaacagcuucgacgugcugaaguccgaggacgcccaggggauggacaaccuggccugcgaggaccucaagcccgugagcgaggaggucguggagaaccccacgauccagaaggacgugcuggagugcaacgucaagaccaccgagguggugggcgacaucauccugaagccggccaacaacucccucaagaucaucgaggaggucgggcacaccgaccugauggccgcguacguggacaacagcucccugacgaucaagaagcccaacgagcucagccgcgugcugggccugaagacccucgccacccacgggcuggccgccgucaacuccgugcccugggacaccaucgccaacuacgcgaagccguuccugaacaagguggucagcacgaccaccaacaucgugacccgcugccucaaccgggugugcacgaacuacaugcccuacuucuucacccugcugcuccagcugugcaccuucacccgcuccaccaacagccggaucaaggccuccaugcccacgaccaucgccaagaacaccgucaagagcgugggcaaguucugccuggaggccagcuucaacuaccucaagucccccaacuucagcaagcugaucaacaucaucaucugguuccugcuccuguccgugugccugggcagccucaucuacuccaccgccgcgcuggggguccugaugagcaaccucggcaugccguccuacugcacgggguaccgcgagggcuaccugaacagcaccaacgugaccaucgccaccuacugcacgggcuccauccccugcagcgugugccuguccgggcucgacagccuggacaccuaccccucccuggagaccauccagaucaccaucagcuccuucaagugggaccucacggccuucggccuggucgccgagugguuccuggccuacauccucuucacccgguucuucuacgugcuggggcuggcggccaucaugcagcucuucuucagcuacuucgccgugcacuucaucuccaacagcuggcugauguggcugaucaucaaccugguccagauggcccccaucuccgcgauggugcgcauguacaucuucuucgccagcuucuacuacguguggaagagcuacguccacgugguggacggcugcaacuccagcaccugcaugaugugcuacaagcggaaccgcgccacccgggucgagugcacgaccaucgugaacgggguccgccgguccuucuacguguacgccaacggcggcaagggguucugcaagcuccacaacuggaacugcgugaacugcgacaccuucugcgccggcagcaccuucaucuccgacgaggucgcgcgcgaccugagccugcaguucaagcggccgaucaaccccacggaccaguccagcuacaucguggacuccgugaccgucaagaacgggagcauccaccucuacuucgacaaggccggccagaagaccuacgagcgccacucccugagccacuucgugaaccuggacaaccuccgggccaacaacaccaaggggucccugcccaucaacgugaucgucuucgacggcaagagcaagugcgaggaguccagcgccaaguccgccagcguguacuacucccagcugaugugccagcccauccuccugcuggaccaggcgcucgugagcgacgucggcgacagcgccgagguggccgugaagauguucgacgccuacgucaacacguucuccagcaccuucaacgugccgauggagaagcugaagacccugguggccaccgcggaggccgagcucgccaagaacgucucccuggacaacgugcugagcacguucaucuccgccgcgcgccagggguucguggacagcgacgucgagaccaaggacgugguggagugccucaagcugucccaccagagcgacaucgaggucaccggcgacuccugcaacaacuacaugcugaccuacaacaagguggagaacaugacgccccgggaccucggggccugcaucgacugcagcgcccgccacaucaacgcccagguggccaagucccacaacaucgcgcugaucuggaacgucaaggacuucaugagccuguccgagcagcuccggaagcagauccgcagcgccgccaagaagaacaaccugcccuucaagcugaccugcgccaccacccgccagguggugaacgucgugacgaccaagaucgcccucaagggcggguga

SEQ ID NO: 17797 - RNA, 5841 nt, Artificial Sequence
  SARS-CoV-2__MT834038.1__non-structural protein 3 (NSP3) CDS gc
auggcccccaccaaggugaccuucggcgacgacacggucaucgaggugcagggguacaagagcgugaacaucaccuucgagcuggacgagcgcaucgacaagguccucaacgagaagugcuccgccuacaccguggagcugggcaccgaggugaacgaguucgcgugcgucguggccgacgccgugaucaagacgcugcagccggucagcgagcuccugaccccccuggggaucgaccucgacgagugguccauggccaccuacuaccuguucgacgagagcggcgaguucaagcuggccucccacauguacugcagcuucuacccccccgacgaggacgaggaggagggggacugcgaggaggaggaguucgagccguccacccaguacgaguacggcacggaggacgacuaccagggcaagccccucgaguucggggcgaccagcgccgcccugcagcccgaggaggagcaggaggaggacuggcuggacgacgacucccagcagaccgugggccagcaggacgggagcgaggacaaccagaccacgaccauccagaccaucguggagguccagccccagcucgagauggagcugaccccgguggugcagacgaucgaggucaacuccuucagcggcuaccugaagcucaccgacaacguguacaucaagaacgccgacaucguggaggaggcgaagaaggucaagcccaccgugguggucaacgccgccaacguguaccugaagcacgggggcggcguggccggggcccugaacaaggcgaccaacaacgccaugcaggucgaguccgacgacuacaucgccacgaacggcccccucaagguggggggcagcugcguccuguccggccacaaccuggccaagcacugccuccacgugguggggcccaacgucaacaagggcgaggacauccagcugcugaagagcgccuacgagaacuucaaccagcacgaggugcuccuggcgccgcugcucuccgccgggaucuucggcgccgaccccauccacagccugcgggugugcgucgacaccgugcgcaccaacguguaccuggccgucuucgacaagaaccucuacgacaagcugguguccagcuuccuggagaugaagagcgagaagcagguggagcagaagaucgccgagauccccaaggaggaggucaagcccuucaucaccgaguccaagccgagcguggagcagcggaagcaggacgacaagaagaucaaggcgugcguggaggaggucacgaccacccucgaggagaccaaguuccugacggagaaccugcuccuguacaucgacaucaacgggaaccugcaccccgacuccgccacccucgugagcgacaucgacaucaccuuccugaagaaggacgcccccuacaucgugggcgacgucgugcaggagggcgugcugaccgccgucgugauccccacgaagaaggccgggggcaccaccgagaugcucgcgaaggcccugcgcaaggugccgaccgacaacuacaucacgaccuaccccgggcagggccugaacggguacaccgucgaggaggccaagaccgugcucaagaagugcaaguccgccuucuacauccugcccagcaucaucuccaacgagaagcaggagauccugggcaccgugagcuggaaccuccgggagaugcuggcgcacgccgaggagacgcgcaagcugaugcccgucugcguggagaccaaggccaucguguccaccauccagcggaaguacaagggcaucaagauccaggagggggucguggacuacggcgcccgcuucuacuucuacaccagcaagacgaccguggccucccugaucaacacccucaacgaccugaacgagacccuggucacgaugccgcucggguacgugacccacggccugaaccuggaggaggcggcccgguacaugcgcagccucaaggugcccgccaccgucuccgugagcucccccgacgccgugaccgccuacaacggguaccugacgagcuccagcaagacccccgaggagcacuucaucgagaccaucucccuggcgggcagcuacaaggacuggagcuacuccggccagagcacccagcucgggaucgaguuccugaagcggggcgacaaguccgucuacuacacgagcaacccgaccaccuuccaccuggacggggaggugaucaccuucgacaaccucaagacgcugcugucccuccgcgaggugcggaccaucaaggucuucaccaccguggacaacaucaaccugcacacgcagguggucgacaugagcaugaccuacggccagcaguucggccccaccuaccuggacggggccgacgugaccaagaucaagccccacaacucccacgagggcaagacguucuacgugcucccgaacgacgacacccugcgcgucgaggccuucgaguacuaccacaccaccgaccccagcuuccuggggcgguacauguccgcccucaaccacacgaagaaguggaaguacccccaggugaacggccugaccagcaucaagugggccgacaacaacugcuaccuggcgaccgcccuccugacccugcagcagaucgagcucaaguucaaccccccggcccugcaggacgccuacuaccgcgcgcgggccggggaggccgccaacuucugcgcccugauccucgcguacugcaacaagacggugggcgagcugggcgacguccgcgagaccauguccuaccuguuccagcacgccaaccucgacagcugcaagcgggugcugaacgucgugugcaagaccugcgggcagcagcagaccacccugaagggcguggaggccgucauguacauggggacgcucuccuacgagcaguucaagaagggcgugcagauccccugcaccugcgggaagcaggccaccaaguaccuggugcagcaggagagccccuucgucaugauguccgcccccccggcgcaguacgagcugaagcacggcaccuucacgugcgccagcgaguacaccggcaacuaccagugcgggcacuacaagcacaucaccuccaaggagacccucuacugcaucgacggcgcccugcugacgaagagcagcgaguacaaggggcccaucaccgacguguucuacaaggagaacuccuacaccaccacgaucaagcccgugaccuacaagcucgacggcgucgugugcaccgagaucgaccccaagcuggacaacuacuacaagaaggacaacagcuacuucaccgagcagccgaucgaccuggugcccaaccagcccuaccccaacgccuccuucgacaacuucaaguucgucugcgacaacaucaaguucgccgacgaccucaaccagcugacgggguacaagaagccggcgagccgcgagcugaaggugaccuucuuccccgaccucaacggcgacguggucgccaucgacuacaagcacuacacccccuccuucaagaagggcgccaagcugcugcacaagcccaucguguggcacgugaacaacgccaccaacaaggcgacguacaagccgaacaccuggugcauccggugccucuggagcaccaagcccgucgagaccuccaacagcuucgacgugcugaaguccgaggacgcccaggggauggacaaccuggccugcgaggaccucaagcccgugagcgaggaggucguggagaaccccacgauccagaaggacgugcuggagugcaacgucaagaccaccgagguggugggcgacaucauccugaagccggccaacaacucccucaagaucaccgaggaggucgggcacacggaccugauggccgcguacguggacaacagcucccugaccaucaagaagcccaacgagcucagccgcgugcugggccugaagacccucgccacccacgggcuggccgccgucaacuccgugcccugggacacgaucgccaacuacgcgaagccguuccugaacaagguggucagcaccaccaccaacaucgugacgcgcugccucaaccgggugugcaccaacuacaugcccuacuucuucacccugcugcuccagcugugcaccuucacccgcuccacgaacagccggaucaaggccuccaugcccaccaccaucgccaagaacaccgucaagagcgugggcaaguucugccuggaggccagcuucaacuaccucaagucccccaacuucagcaagcugaucaacaucaucaucugguuccugcuccuguccgugugccugggcagccucaucuacuccacggccgcgcuggggguccugaugagcaaccucggcaugccguccuacugcaccggguaccgcgagggcuaccugaacagcaccaacgugaccaucgccacguacugcaccggcuccauccccugcagcgugugccuguccgggcucgacagccuggacaucuaccccucccuggagaccauccagaucaccaucagcuccuucaagugggaccucacggccuucggccuggucgccgagugguuccuggccuacauccucuucacccgguucuucuacgugcuggggcuggcggccaucaugcagcucuucuucagcuacuucgccgugcacuucaucuccaacagcuggcugauguggcugaucaucaaccugguccagauggcccccaucuccgcgauggugcgcauguacaucuucuucgccagcuucuacuacguguggaagagcuacguccacgugguggacggcugcaacuccagcaccugcaugaugugcuacaagcggaaccgcgccacccgggucgagugcacgaccaucgugaacgggguccgccgguccuucuacguguacgccaacggcggcaagggguucugcaagcuccacaacuggaacugcgugaacugcgacaccuucugcgccggcagcaccuucaucuccgacgaggucgcgcgcgaccugagccugcaguucaagcggccgaucaaccccacggaccaguccagcuacaucguggacuccgugaccgucaagaacgggagcauccaccucuacuucgacaaggccggccagaagaccuacgagcgccacucccugagccacuucgugaaccuggacaaccuccgggccaacaacaccaaggggucccugcccaucaacgugaucgucuucgacggcaagagcaagugcgaggaguccagcgccaaguccgccagcguguacuacucccagcugaugugccagcccauccuccugcuggaccaggcgcucgugagcgacgucggcgacagcgccgagguggccgugaagauguucgacgccuacgucaacacguucuccagcaccuucaacgugccgauggagaagcugaagacccugguggccaccgcggaggccgagcucgccaagaacgucucccuggacaacgugcugagcacguucaucuccgccgcgcgccagggguucguggacagcgacgucgagaccaaggacgugguggagugccucaagcugucccaccagagcgacaucgaggucaccggcgacuccugcaacaacuacaugcugaccuacaacaagguggagaacaugacgccccgggaccucggggccugcaucgacugcagcgcccgccacaucaacgcccagguggccaagucccacaacaucgcgcugaucuggaacgucaaggacuucaugagccuguccgagcagcuccggaagcagauccgcagcgccgccaagaagaacaaccugcccuucaagcugaccugcgccaccacccgccagguggugaacgucgugacgaccaagaucgcccucaagggcggguga

SEQ ID NO: 17798 - RNA, 5841 nt, Artificial Sequence
  SARS-CoV-2__MT834080.1__non-structural protein 3 (NSP3) CDS gc
auggcccccaccaaggugaccuucggcgacgacacggucaucgaggugcagggguacaagagcgugaacaucaccuucgagcuggacgagcgcaucgacaagguccucaacgagaagugcuccgccuacaccguggagcugggcaccgaggugaacgaguucgcgugcgucguggccgacgccgugaucaagacgcugcagccggucagcgagcuccugaccccccuggggaucgaccucgacgagugguccauggccaccuacuaccuguucgacgagagcggcgaguucaagcuggccucccacauguacugcagcuucuacccccccgacgaggacgaggaggagggggacugcgaggaggaggaguucgagccguccacccaguacgaguacggcacggaggacgacuaccagggcaagccccucgaguucggggcgaccagcgccgcccugcagcccgaggaggagcaggaggaggacuggcuggacgacgacucccagcagaccgugggccagcaggacgggagcgaggacaaccagaccacgaccauccagaccaucguggagguccagccccagcucgagauggagcugaccccgguggugcagacgaucgaggucaacuccuucagcggcuaccugaagcucaccgacaacguguacaucaagaacgccgacaucguggaggaggcgaagaaggucaagcccaccgugguggucaacgccgccaacguguaccugaagcacgggggcggcguggccggggcccugaacaaggcgaccaacaacgccaugcaggucgaguccgacgacuacaucgccacgaacggcccccucaagguggggggcagcugcguccuguccggccacaaccuggccaagcacugccuccacgugguggggcccaacgucaacaagggcgaggacauccagcugcugaagagcgccuacgagaacuucaaccagcacgaggugcuccuggcgccgcugcucuccgccgggaucuucggcgccgaccccauccacagccugcgggugugcgucgacaccgugcgcaccaacguguaccuggccgucuucgacaagaaccucuacgacaagcugguguccagcuuccuggagaugaagagcgagaagcagguggagcagaagaucgccgagauccccaaggaggaggucaagcccuucaucaccgaguccaagccgagcguggagcagcggaagcaggacgacaagaagaucaaggcgugcguggaggaggucacgaccacccucgaggagaccaaguuccugacggagaaccugcuccuguacaucgacaucaacgggaaccugcaccccgacuccgccacccucgugagcgacaucgacaucaccuuccugaagaaggacgcccccuacaucgugggcgacgucgugcaggagggcgugcugaccgccgucgugauccccacgaagaaggccgggggcaccaccgagaugcucgcgaaggcccugcgcaaggugccgaccgacaacuacaucacgaccuaccccgggcagggccugaacggguacaccgucgaggaggccaagaccgugcucaagaagugcaaguccgccuucuacauccugcccagcaucaucuccaacgagaagcaggagauccugggcaccgugagcuggaaccuccgggagaugcuggcgcacgccgaggagacgcgcaagcugaugcccgucugcguggagaccaaggccaucguguccaccauccagcggaaguacaagggcaucaagauccaggagggggucguggacuacggcgcccgcuucuacuucuacaccagcaagacgaccguggccucccugaucaacacccucaacgaccugaacgagacccuggucacgaugccgcucggguacgugacccacggccugaaccuggaggaggcggcccgguacaugcgcagccucaaggugcccgccaccgucuccgugagcucccccgacgccgugaccgccuacaacggguaccugacgagcuccagcaagacccccgaggagcacuucaucgagaccaucucccuggcgggcagcuacaaggacuggagcuacuccggccagagcacccagcucgggaucgaguuccugaagcggggcgacaaguccgucuacuacacgagcaacccgaccaccuuccaccuggacggggaggugaucaccuucgacaaccucaagacgcugcugucccuccgcgaggugcggaccaucaaggucuucaccaccguggacaacaucaaccugcacacgcagguggucgacaugagcaugaccuacggccagcaguucggccccaccuaccuggacggggccgacgugaccaaggugaagccccacaacucccacgagggcaagacguucuacguccucccgaacgacgacacccugcgcguggaggccuucgaguacuaccacaccaccgaccccagcuuccuggggcgguacauguccgcccucaaccacacgaagaaguggaaguacccccaggugaacggccugaccagcaucaagugggccgacaacaacugcuaccuggcgaccgcccuccugacccugcagcagaucgagcucaaguucaaccccccggcccugcaggacgccuacuaccgcgcgcgggccggggaggccgccaacuucugcgcccugauccucgcguacugcaacaagacggucggcgagcugggcgacgugcgcgagaccauguccuaccuguuccagcacgccaaccucgacagcugcaagcggguccugaacguggugugcaagaccugcgggcagcagcagaccacccugaagggcgucgaggccgugauguacauggggacgcucuccuacgagcaguucaagaagggcgugcagauccccugcaccugcgggaagcaggccaccaaguaccugguccagcaggagagccccuucgugaugauguccgcccccccggcgcaguacgagcugaagcacggcaccuucacgugcgccagcgaguacaccggcaacuaccagugcgggcacuacaagcacaucaccuccaaggagacccucuacugcaucgacggcgcccugcugacgaagagcagcgaguacaaggggcccaucaccgacguguucuacaaggagaacuccuacaccaccacgaucaagcccgucaccuacaagcucgacggcguggugugcaccgagaucgaccccaagcuggacaacuacuacaagaaggacaacagcuacuucaccgagcagccgaucgaccugguccccaaccagcccuaccccaacgccuccuucgacaacuucaaguucgugugcgacaacaucaaguucgccgacgaccucaaccagcugacgggguacaagaagccggcgagccgcgagcugaaggugaccuucuuccccgaccucaacggcgacgucguggccaucgacuacaagcacuacacccccuccuucaagaagggcgccaagcugcugcacaagcccaucguguggcacgucaacaacgccaccaacaaggcgacguacaagccgaacaccuggugcauccggugccucuggagcaccaagcccguggagaccuccaacagcuucgacgugcugaaguccgaggacgcccaggggauggacaaccuggccugcgaggaccucaagcccgucagcgaggaggugguggagaaccccacgauccagaaggacguccuggagugcaacgugaagaccaccgagguggucggcgacaucauccugaagccggccaacaacucccucaagaucaccgaggagguggggcacacggaccugauggccgcguacguggacaacagcucccugaccaucaagaagcccaacgagcucagccgcguccugggccugaagacccucgccacccacgggcuggccgccgugaacuccgugcccugggacacgaucgccaacuacgcgaagccguuccugaacaaggucgugagcaccaccaccaacaucgugacgcgcugccucaaccgggucugcaccaacuacaugcccuacuucuucacccugcugcuccagcugugcaccuucacccgcuccacgaacagccggaucaaggccuccaugcccaccaccaucgccaagaacaccgugaagagcgugggcaaguucugccuggaggccagcuucaacuaccucaagucccccaacuucagcaagcugaucaacaucaucaucugguuccugcuccuguccgucugccugggcagccucaucuacuccacggccgcgcugggggugcugaugagcaaccucggcaugccguccuacugcaccggguaccgcgagggcuaccugaacagcaccaacgugaccaucgccacguacugcaccggcuccauccccugcagcgucugccuguccgggcucgacagccuggacaccuaccccucccuggagaccauccagaucacgaucagcuccuucaagugggaccucaccgccuucggccugguggccgagugguuccuggccuacauccucuucacccgguucuucuacgugcuggggcuggcggccaucaugcagcucuucuucagcuacuucgccguccacuucaucuccaacagcuggcugauguggcugaucaucaaccuggugcagauggcccccaucuccgcgauggugcgcauguacaucuucuucgccagcuucuacuacgucuggaagagcuacgugcacguggucgacggcugcaacuccagcaccugcaugaugugcuacaagcggaaccgcgccacgcggguggagugcaccaccaucgucaacggggugcgccgguccuucuacguguacgccaacggcggcaagggguucugcaagcuccacaacuggaacugcgucaacugcgacaccuucugcgccggcagcacguucaucuccgacgagguggcgcgcgaccugagccugcaguucaagcggccgaucaaccccaccgaccaguccagcuacaucguggacuccgucaccgugaagaacgggagcauccaccucuacuucgacaaggccggccagaagaccuacgagcgccacucccugagccacuucgugaaccuggacaaccuccgggccaacaacacgaaggggucccugcccaucaacgucaucguguucgacggcaagagcaagugcgaggaguccagcgccaaguccgccagcguguacuacucccagcugaugugccagcccauccuccugcuggaccaggcgcucgucagcgacgugggcgacagcgccgagguggccgucaagauguucgacgccuacgugaacaccuucuccagcaccuucaacgugccgauggagaagcugaagacccuggucgccacggcggaggccgagcucgccaagaacgugucccuggacaacgugcugagcaccuucaucuccgccgcgcgccagggguucgucgacagcgacguggagaccaaggacguggucgagugccucaagcugucccaccagagcgacaucgaggugaccggcgacuccugcaacaacuacaugcugacguacaacaagguggagaacaugaccccccgggaccucggggccugcaucgacugcagcgcccgccacaucaacgcccaggucgccaagucccacaacaucgcgcugaucuggaacgugaaggacuucaugagccuguccgagcagcuccggaagcagauccgcagcgccgccaagaagaacaaccugcccuucaagcugaccugcgccaccacgcgccagguggucaacguggugaccaccaagaucgcccucaagggcggguga

SEQ ID NO: 17799 - RNA, 5841 nt, Artificial Sequence
  SARS-CoV-2__MT834097.1__non-structural protein 3 (NSP3) CDS gc
auggcccccaccaaggugaccuucggcgacgacacggucaucgaggugcagggguacaagagcgugaacaucaccuucgagcuggacgagcgcaucgacaagguccucaacgagaagugcuccgccuacaccguggagcugggcaccgaggugaacgaguucgcgugcgucguggccgacgccgugaucaagacgcugcagccggucagcgagcuccugaccccccuggggaucgaccucgacgagugguccauggccaccuacuaccuguucgacgagagcggcgaguucaagcuggccucccacauguacugcagcuucuacccccccgacgaggacgaggaggagggggacugcgaggaggaggaguucgagccguccacccaguacgaguacggcacggaggacgacuaccagggcaagccccucgaguucggggcgaccagcgccgcccugcagcccgaggaggagcaggaggaggacuggcuggacgacgacucccagcagaccgugggccagcaggacgggagcgaggacaaccagaccacgaccauccagaccaucguggagguccagccccagcucgagauggagcugaccccgguggugcagacgaucgaggucaacuccuucagcggcuaccugaagcucaccgacaacguguacaucaagaacgccgacaucguggaggaggcgaagaaggucaagcccaccgugguggucaacgccgccaacguguaccugaagcacgggggcggcguggccggggcccugaacaaggcgaccaacaacgccaugcaggucgaguccgacgacuacaucgccacgaacggcccccucaagguggggggcagcugcguccuguccggccacaaccuggccaagcacugccuccacgugguggggcccaacgucaacaagggcgaggacauccagcugcugaagagcgccuacgagaacuucaaccagcacgaggugcuccuggcgccgcugcucuccgccgggaucuucggcgccgaccccauccacagccugcgggugugcgucgacaccgugcgcaccaacguguaccuggccgucuucgacaagaaccucuacgacaagcugguguccagcuuccuggagaugaagagcgagaagcagguggagcagaagaucgccgagauccccaaggaggaggucaagcccuucaucaccgaguccaagccgagcguggagcagcggaagcaggacgacaagaagaucaaggcgugcguggaggaggucacgaccacccucgaggagaccaaguuccugacggagaaccugcuccuguacaucgacaucaacgggaaccugcaccccgacuccgccacccucgugagcgacaucgacaucaccuuccugaagaaggacgcccccuacaucgugggcgacgucgugcaggagggcgugcugaccgccgucgugauccccacgaagaaggccgggggcaccaccgggaugcucgcgaaggcccugcgcaaggugccgaccgacaacuacaucacgaccuaccccggccaggggcugaacggcuacaccgucgaggaggccaagaccgugcucaagaagugcaaguccgccuucuacauccugcccagcaucaucuccaacgagaagcaggagauccugggcaccgugagcuggaaccuccgggagaugcuggcgcacgccgaggagacgcgcaagcugaugcccgucugcguggagaccaaggccaucguguccaccauccagcggaaguacaaggggaucaagauccaggagggcgucguggacuacggggcccgcuucuacuucuacaccagcaagacgaccguggccucccugaucaacacccucaacgaccugaacgagacccuggucacgaugccgcucggcuacgugacccacgggcugaaccuggaggaggcggcccgguacaugcgcagccucaaggugcccgccaccgucuccgugagcucccccgacgccgugaccgccuacaacggcuaccugacgagcuccagcaagacccccgaggagcacuucaucgagaccaucucccuggcgggcagcuacaaggacuggagcuacuccgggcagagcacccagcucggcaucgaguuccugaagcggggggacaaguccgucuacuacacgagcaacccgaccaccuuccaccuggacggcgaggugaucaccuucgacaaccucaagacgcugcugucccuccgcgaggugcggaccaucaaggucuucaccaccguggacaacaucaaccugcacacgcagguggucgacaugagcaugaccuacggccagcaguucgggcccaccuaccuggacggcgccgacgugaccaagaucaagccccacaacucccacgaggggaagacguucuacgugcucccgaacgacgacacccugcgcgucgaggccuucgaguacuaccacaccaccgaccccagcuuccugggccgguacauguccgcccucaaccacacgaagaaguggaaguacccccaggugaacgggcugaccagcaucaagugggccgacaacaacugcuaccuggcgaccgcccuccugacccugcagcagaucgagcucaaguucaaccccccggcccugcaggacgccuacuaccgcgcgcgggccggcgaggccgccaacuucugcgcccugauccucgcguacugcaacaagacggugggcgagcugggggacguccgcgagaccauguccuaccuguuccagcacgccaaccucgacagcugcaagcgggugcugaacgucgugugcaagaccugcggccagcagcagaccacccugaaggggguggaggccgucauguacaugggcacgcucuccuacgagcaguucaagaagggggugcagauccccugcaccugcggcaagcaggccaccaaguaccuggugcagcaggagagccccuucgucaugauguccgcccccccggcgcaguacgagcugaagcacggcaccuucacgugcgccagcgaguacaccgggaacuaccagugcggccacuacaagcacaucaccuccaaggagacccucuacugcaucgacggggcccugcugacgaagagcagcgaguacaagggccccaucaccgacguguucuacaaggagaacuccuacaccaccacgaucaagcccgugaccuacaagcucgacggggucgugugcaccgagaucgaccccaagcuggacaacuacuacaagaaggacaacagcuacuucaccgagcagccgaucgaccuggugcccaaccagcccuaccccaacgccuccuucgacaacuucaaguucgucugcgacaacaucaaguucgccgacgaccucaaccagcugacgggcuacaagaagccggcgagccgcgagcugaaggugaccuucuuccccgaccucaacggcgacguggucgccaucgacuacaagcacuacacccccuccuucaagaagggggccaagcugcugcacaagcccaucguguggcacgugaacaacgccaccaacaaggcgacguacaagccgaacaucuggugcauccggugccucuggagcaccaagcccgucgagaccuccaacagcuucgacgugcugaaguccgaggacgcccagggcauggacaaccuggccugcgaggaccucaagcccgugagcgaggaggucguggagaaccccaccauccagaaggacgugcuggagugcaacgucaagacgaccgagguggugggggacaucauccugaagccggccaacaacucccucaagaucaccgaggaggucggccacaccgaccugauggccgcguacguggacaacagcucccugacgaucaagaagcccaacgagcucagccgcgugcuggggcugaagacccucgccacccacggccuggccgccgucaacuccgugcccugggacaccaucgccaacuacgcgaagccguuccugaacaagguggucagcacgaccaccaacaucgugacccgcugccucaaccgggugugcacgaacuacaugcccuacuucuucacccugcugcuccagcugugcaccuucacccgcuccaccaacagccggaucaaggccuccaugcccacgaccaucgccaagaacaccgucaagagcgugggcaaguucugccuggaggccagcuucaacuaccucaagucccccaacuucagcaagcugaucaacaucaucaucugguuccugcuccuguccgugugccuggggagccucaucuacuccaccgccgcgcugggcguccugaugagcaaccucgggaugccguccuacugcacgggcuaccgcgagggcuaccugaacagcaccaacgugaccaucgccaccuacugcacgggguccauccccugcagcgugugccuguccggccucgacagccuggacaccuaccccucccuggagaccauccagaucaccaucagcuccuucaagugggaccucacggccuucgggcuggucgccgagugguuccuggccuacauccucuucacccgguucuucuacgugcugggccuggcggccaucaugcagcucuucuucagcuacuucgccgugcacuucaucuccaacagcuggcugauguggcugaucaucaaccugguccagauggcccccaucuccgcgauggugcgcauguacaucuucuucgccagcuucuacuacguguggaagagcuacguccacgugguggacgggugcaacuccagcaccugcaugaugugcuacaagcggaaccgcgccacccgggucgagugcacgaccaucgugaacggcguccgccgguccuucuacguguacgccaacggcgggaagggcuucugcaagcuccacaacuggaacugcgugaacugcgacaccuucugcgccgggagcaccuucaucuccgacgaggucgcgcgcgaccugagccugcaguucaagcggccgaucaaccccacggaccaguccagcuacaucguggacuccgugaccgucaagaacggcagcauccaccucuacuucgacaaggccgggcagaagaccuacgagcgccacucccugagccacuucgugaaccuggacaaccuccgggccaacaacaccaagggcucccugcccaucaacgugaucgucuucgacggcaagagcaagugcgaggaguccagcgccaaguccgccagcguguacuacucccagcugaugugccagcccauccuccugcuggaccaggcgcucgugagcgacgucggggacagcgccgagguggccgugaagauguucgacgccuacgucaacacguucuccagcaccuucaacgugccgauggagaagcugaagacccugguggccaccgcggaggccgagcucgccaagaacgucucccuggacaacgugcugagcacguucaucuccgccgcgcgccagggcuucguggacagcgacgucgagaccaaggacgugguggagugccucaagcugucccaccagagcgacaucgaggucaccggggacuccugcaacaacuacaugcugaccuacaacaagguggagaacaugacgccccgggaccucggcgccugcaucgacugcagcgcccgccacaucaacgcccagguggccaagucccacaacaucgcgcugaucuggaacgucaaggacuucaugagccuguccgagcagcuccggaagcagauccgcagcgccgccaagaagaacaaccugcccuucaagcugaccugcgccaccacccgccagguggugaacgucgugacgaccaagaucgcccucaaggggggcuga

SEQ ID NO: 17800 - RNA, 5841 nt, Artificial Sequence
  SARS-CoV-2__MT834119.1__non-structural protein 3 (NSP3) CDS gc
auggcccccaccaaggugaccuucggcgacgacacggucaucgaggugcagggguacaagagcgugaacaucaccuucgagcuggacgagcgcaucgacaagguccucaacgagaagugcuccgccuacaccguggagcugggcaccgaggugaacgaguucgcgugcgucguggccgacgccgugaucaagacgcugcagccggucagcgagcuccugaccccccuggggaucgaccucgacgagugguccauggccaccuacuaccuguucgacgagagcggcgaguucaagcuggccucccacauguacugcagcuucuacccccccgacgaggacgaggaggagggggacugcgaggaggaggaguucgagccguccacccaguacgaguacggcacggaggacgacuaccagggcaagccccucgaguucggggcgaccagcgccgcccugcagcccgaggaggagcaggaggaggacuggcuggacgacgacucccagcagaccgugggccagcaggacgggagcgaggacaaccagaccacgaccauccagaccaucguggagguccagccccagcucgagauggagcugaccccgguggugcagacgaucgaggucaacuccuucagcggcuaccugaagcucaccgacaacguguacaucaagaacgccgacaucguggaggaggcgaagaaggucaagcccaccgugguggucaacgccgccaacguguaccugaagcacgggggcggcguggccggggcccugaacaaggcgaccaacaacgccaugcaggucgaguccgacgacuacaucgccacgaacggcccccucaagguggggggcagcugcguccuguccggccacaaccuggccaagcacugccuccacgugguggggcccaacgucaacaagggcgaggacauccagcugcugaagagcgccuacgagaacuucaaccagcacgaggugcuccuggcgccgcugcucuccgccgggaucuucggcgccgaccccauccacagccugcgggugugcgucgacaccgugcgcaccaacguguaccuggccgucuucgacaagaaccucuacgacaagcugguguccagcuuccuggagaugaagagcgagaagcagguggagcagaagaucgccgagauccccaaggaggaggucaagcccuucaucaccgaguccaagccgagcguggagcagcggaagcaggacgacaagaagaucaaggcgugcguggaggaggucacgaccacccucgaggagaccaaguuccugacggagaaccugcuccuguacaucgacaucaacgggaaccugcaccccgacuccgccacccucgugagcgacaucgacaucaccuuccugaagaaggacgcccccuacaucgugggcgacgucgugcaggagggcgugcugaccgccgucgugauccccacgaagaaggccgggggcaccaccgagaugcucgcgaaggcccugcgcaaggugccgaccgacaacuacaucacgaccuaccccgggcagggccugaacggguacaccgucgaggaggccaagaccgugcucaagaagugcaaguccgccuucuacauccugcccagcaucaucuccaacgagaagcaggagauccugggcaccgugagcuggaaccuccgggagaugcuggcgcacgccgaggagacgcgcaagcugaugcccgucugcguggagaccaaggccaucguguccaccauccagcggaaguacaagggcaucaagauccaggagggggucguggacuacggcgcccgcuucuacuucuacaccagcaagacgaccguggccucccugaucaacacccucaacgaccugaacgagacccuggucacgaugccgcucggguacgugacccacggccugaaccuggaggaggcggcccgguacaugcgcagccucaaggugcccgccaccgucuccgugagcucccccgacgccgugaccgccuacaacggguaccugacgagcuccagcaagacccccgaggagcacuucaucgagaccaucucccuggcgggcagcuacaaggacuggagcuacuccggccagagcacccagcucgggaucgaguuccugaagcggggcgacaaguccgucuacuacacgagcaacccgaccaccuuccaccuggacggggaggugaucaccuucgacaaccucaagacgcugcugucccuccgcgaggugcggaccaucaaggucuucaccaccguggacaacaucaaccugcacacgcagguggucgacaugagcaugaccuacggccagcaguucggccccaccuaccuggacggggccgacgugaccaagaucaagccccacaacucccacgagggcaagacguucuacgugcucccgaacgacgacacccugcgcgucgaggccuucgaguacuaccacaccaccgaccccagcuuccuggggcgguacauguccgcccucaaccacacgaagaaguggaaguacccccaggugaacggccugaccagcaucaagugggccgacaacaacugcuaccuggcgaccgcccuccugacccugcagcagaucgagcucaaguucaaccccccggcccugcaggacgccuacuaccgcgcgcgggccggggaggccgccaacuucugcgcccugauccucgcguacugcaacaagacggugggcgagcugggcgacguccgcgagaccauguccuaccuguuccagcacgccaaccucgacagcugcaagcgggugcugaacgucgugugcaagaccugcgggcagcagcagaccacccugaagggcguggaggccgucauguacauggggacgcucuccuacgagcaguucaagaagggcgugcagauccccugcaccugcgggaagcaggccaccaaguaccuggugcagcaggagagccccuucgucaugauguccgcccccccggcgcaguacgagcugaagcacggcaccuucacgugcgccagcgaguacaccggcaacuaccagugcgggcacuacaagcacaucaccuccaaggagacccucuacugcaucgacggcgcccugcugacgaagagcagcgaguacaaggggcccaucaccgacguguucuacaaggagaacuccuacaccaccacgaucaagcccgugaccuacaagcucgacggcgucgugugcaccgagaucgaccccaagcuggacaacuacuacaagaaggacaacagcuacuucaccgagcagccgaucgaccuggugcccaaccagcccuaccccaacgccuccuucgacaacuucaaguucgucugcgacaacaucaaguucgccgacgaccucaaccagcugacgggguacaagaagccggcgagccgcgagcugaaggugaccuucuuccccgaccucaacggcgacguggucgccaucgacuacaagcacuacacccccuccuucaagaagggcgccaagcugcugcacaagcccaucguguggcacgugaacaacgccaccaacaaggcgacguacaagccgaacaccuggugcauccggugccucuggagcaccaagcccgucgagaccuccaacagcuucgacgugcugaaguccgaggacgcccaggggauggacaaccuggccugcgaggaccucaagcccgugagcgaggaggucguggagaaccccacgauccagaaggacgugcuggagugcaacgucaagaccaccgagguggugggcgacaucauccugaagccggccaacaacucccucaagaucaccgaggaggucgggcacacggaccugauggccgcguacguggacaacagcucccugaccaucaagaagcccaacgagcucagccgcgugcugggccugaagacccucgccacccacgggcuggccgccgucaacuccgugcccugggacacgaucgccaacuacgcgaagccguuccugaacaagguggucagcaccaccaccaacaucgugacgcgcugccucaaccgggugugcaccaacuacaugcccuacuucuucacccugcugcuccagcugugcaccuucacccgcuccacgaacagccggaucaaggccuccaugcccaccaccaucgccaagaacaccgucaagagcgugagcaaguucugccuggaggccuccuucaacuaccucaagagccccaacuucuccaagcugaucaacaucaucaucugguuccugcuccugagcgugugccugggcucccucaucuacagcacggccgcgcugggcguccugauguccaaccucgggaugccgagcuacugcaccggcuaccgcgagggguaccugaacuccaccaacgugaccaucgccacguacugcaccggcagcauccccugcuccgugugccugagcggccucgacucccuggacaccuaccccagccuggagaccauccagaucacgaucuccagcuucaagugggaccucaccgccuucgggcuggucgccgagugguuccuggccuacauccucuucacccgguucuucuacgugcugggccuggcggccaucaugcagcucuucuucuccuacuucgccgugcacuucaucagcaacuccuggcugauguggcugaucaucaaccugguccagauggcccccaucagcgcgauggugcgcauguacaucuucuucgccagcuucuacuacguguggaaguccuacguccacgugguggacgggugcaacagcuccaccugcaugaugugcuacaagcggaaccgcgccacgcgggucgagugcaccaccaucgugaacggcguccgccggagcuucuacguguacgccaacgggggcaagggcuucugcaagcuccacaacuggaacugcgugaacugcgacaccuucugcgccggguccacguucaucagcgacgaggucgcgcgcgaccugucccugcaguucaagcggccgaucaaccccaccgaccagagcuccuacaucguggacagcgugaccgucaagaacggcuccauccaccucuacuucgacaaggccgggcagaagaccuacgagcgccacagccugucccacuucgugaaccuggacaaccuccgggccaacaacacgaagggcagccugcccaucaacgugaucgucuucgacgggaaguccaagugcgaggagagcuccgccaagagcgccuccguguacuacagccagcugaugugccagcccauccuccugcuggaccaggcgcucgugagcgacgucggcgacuccgccgagguggccgugaagauguucgacgccuacgucaacaccuucagcuccaccuucaacgugccgauggagaagcugaagacccugguggccacggcggaggccgagcucgccaagaacgucagccuggacaacgugcuguccaccuucaucagcgccgcgcgccagggcuucguggacuccgacgucgagaccaaggacgugguggagugccucaagcugagccaccaguccgacaucgaggucaccggggacagcugcaacaacuacaugcugacguacaacaagguggagaacaugaccccccgggaccucggcgccugcaucgacugcuccgcccgccacaucaacgcccagguggccaagagccacaacaucgcgcugaucuggaacgucaaggacuucaugucccugagcgagcagcuccggaagcagauccgcuccgccgccaagaagaacaaccugcccuucaagcugaccugcgccaccacgcgccagguggugaacgucgugaccaccaagaucgcccucaaggggggcuga

SEQ ID NO: 17801 - RNA, 5841 nt, Artificial Sequence
  SARS-CoV-2__MT834129.1__non-structural protein 3 (NSP3) CDS gc
auggcccccaccaaggugaccuucggcgacgacacggucaucgaggugcagggguacaagagcgugaacaucaccuucgagcuggacgagcgcaucgacaagguccucaacgagaagugcuccgccuacaccguggagcugggcaccgaggugaacgaguucgcgugcgucguggccgacgccgugaucaagacgcugcagccggucagcgagcuccugaccccccuggggaucgaccucgacgagugguccauggccaccuacuaccuguucgacgagagcggcgaguucaagcuggccucccacauguacugcagcuucuacccccccgacgaggacgaggaggagggggacugcgaggaggaggaguucgagccguccacccaguacgaguacggcacggaggacgacuaccagggcaagccccucgaguucggggcgaccagcgccgcccugcagcccgaggaggagcaggaggaggacuggcuggacgacgacucccagcagaccgugggccagcaggacgggagcgaggacaaccagaccacgaccauccagaccaucguggagguccagccccagcucgagauggagcugaccccgguggugcagacgaucgaggucaacuccuucagcggcuaccugaagcucaccgacaacguguacaucaagaacgccgacaucguggaggaggcgaagaaggucaagcccaccgugguggucaacgccgccaacguguaccugaagcacgggggcggcguggccggggcccugaacaaggcgaccaacaacgccaugcaggucgaguccgacgacuacaucgccacgaacggcccccucaagguggggggcagcugcguccuguccggccacaaccuggccaagcacugccuccacgugguggggcccaacgucaacaagggcgaggacauccagcugcugaagagcgccuacgagaacuucaaccagcacgaggugcuccuggcgccgcugcucuccgccgggaucuucggcgccgaccccauccacagccugcgggugugcgucgacaccgugcgcaccaacguguaccuggccgucuucgacaagaaccucuacgacaagcugguguccagcuuccuggagaugaagagcgagaagcagguggagcagaagaucgccgagauccccaaggaggaggucaagcccuucaucaccgaguccaagccgagcguggagcagcggaagcaggacgacaagaagaucaaggcgugcguggaggaggucacgaccacccucgaggagaccaaguuccugacggagaaccugcuccuguacaucgacaucaacgggaaccugcaccccgacuccgccagccucguguccgacaucgacaucaccuuccugaagaaggacgcccccuacaucgugggcgacgucgugcaggagggcgugcugaccgccgucgugauccccaccaagaaggccgggggcacgaccgagaugcucgcgaaggcccugcgcaaggugccgaccgacaacuacaucaccacguaccccgggcagggccugaacggguacaccgucgaggaggccaagaccgugcucaagaagugcaagagcgccuucuacauccugcccuccaucaucagcaacgagaagcaggagauccugggcaccguguccuggaaccuccgggagaugcuggcgcacgccgaggagacccgcaagcugaugcccgucugcguggagacgaaggccaucgugagcaccauccagcggaaguacaagggcaucaagauccaggagggggucguggacuacggcgcccgcuucuacuucuacaccuccaagaccacgguggccagccugaucaacacccucaacgaccugaacgagacccuggucaccaugccgcucggguacgugacgcacggccugaaccuggaggaggcggcccgguacaugcgcucccucaaggugcccgccaccgucagcguguccagccccgacgccgugaccgccuacaacggguaccugaccuccagcuccaagacgcccgaggagcacuucaucgagaccaucagccuggcgggcagcuacaaggacugguccuacagcggccaguccacccagcucgggaucgaguuccugaagcggggcgacaagagcgucuacuacaccuccaacccgacgaccuuccaccuggacggggaggugaucaccuucgacaaccucaagacccugcugagccuccgcgaggugcggacgaucaaggucuucaccaccguggacaacaucaaccugcacacccagguggucgacauguccaugacguacggccagcaguucggccccaccuaccuggacggggccgacgugaccaagaucaagccccacaacagccacgagggcaagaccuucuacgugcucccgaacgacgacacgcugcgcgucgaggccuucgaguacuaccacaccaccgaccccuccuuccuggggcgguacaugagcgcccucaaccacaccaagaaguggaaguacccccaggugaacggccugacguccaucaagugggccgacaacaacugcuaccuggcgaccgcccuccugacccugcagcagaucgagcucaaguucaaccccccggcccugcaggacgccuacuaccgcgcgcgggccggggaggccgccaacuucugcgcccugauccucgcguacugcaacaagaccgugggcgagcugggcgacguccgcgagacgaugagcuaccuguuccagcacgccaaccucgacuccugcaagcgggugcugaacgucgugugcaagaccugcgggcagcagcagaccacccugaagggcguggaggccgucauguacauggggacccucagcuacgagcaguucaagaagggcgugcagauccccugcacgugcgggaagcaggccaccaaguaccuggugcagcaggagucccccuucgucaugaugagcgcccccccggcgcaguacgagcugaagcacggcaccuucaccugcgccuccgaguacacgggcaacuaccagugcgggcacuacaagcacaucaccagcaaggagacccucuacugcaucgacggcgcccugcugaccaagagcuccgaguacaaggggcccaucacggacguguucuacaaggagaacagcuacaccaccaccaucaagcccgugacguacaagcucgacggcgucgugugcaccgagaucgaccccaagcuggacaacuacuacaagaaggacaacuccuacuucaccgagcagccgaucgaccuggugcccaaccagcccuaccccaacgccagcuucgacaacuucaaguucgucugcgacaacaucaaguucgccgacgaccucaaccagcugaccggguacaagaagccggcgucccgcgagcugaaggugacguucuuccccgaccucaacggcgacguggucgccaucgacuacaagcacuacacccccagcuucaagaagggcgccaagcugcugcacaagcccaucguguggcacgugaacaacgccaccaacaaggcgaccuacaagccgaacacguggugcauccggugccucugguccaccaagcccgucgagaccagcaacuccuucgacgugcugaagagcgaggacgcccaggggauggacaaccuggccugcgaggaccucaagcccguguccgaggaggucguggagaaccccaccauccagaaggacgugcuggagugcaacgucaagacgaccgagguggugggcgacaucauccugaagccggccaacaacagccucaagaucaccgaggaggucgggcacaccgaccugauggccgcguacguggacaacuccagccugacgaucaagaagcccaacgagcucucccgcgugcugggccugaagacccucgccacccacgggcuggccgccgucaacagcgugcccugggacaccaucgccaacuacgcgaagccguuccugaacaagguggucuccacgaccaccaacaucgugacccgcugccucaaccgggugugcacgaacuacaugcccuacuucuucacccugcugcuccagcugugcaccuucacccgcagcaccaacucccggaucaaggccagcaugcccacgaccaucgccaagaacaccgucaagagcgugggcaaguucugccuggaggccuccuucaacuaccucaagagccccaacuucuccaagcugaucaacaucaucaucugguuccugcuccugagcgugugccugggcucccucaucuacagcaccgccgcgcuggggguccugauguccaaccucggcaugccgagcuacugcacgggguaccgcgagggcuaccugaacuccaccaacgugaccaucgccaccuacugcacgggcagcauccccugcuccgugugccugagcgggcucgacucccuggacaccuaccccagccuggagaccauccagaucaccaucuccagcuucaagugggaccucacggccuucggccuggucgccgagugguuccuggccuacauccucuucacccgguucuucuacgugcuggggcuggcggccaucaugcagcucuucuucuccuacuucgccgugcacuucaucagcaacuccuggcugauguggcugaucaucaaccugguccagauggcccccaucagcgcgauggugcgcauguacaucuucuucgccagcuucuacuacguguggaaguccuacguccacgugguggacggcugcaacagcuccaccugcaugaugugcuacaagcggaaccgcgccacccgggucgagugcacgaccaucgugaacgggguccgccggagcuucuacguguacgccaacggcggcaagggguucugcaagcuccacaacuggaacugcgugaacugcgacaccuucugcgccggcuccaccuucaucagcgacgaggucgcgcgcgaccugucccugcaguucaagcggccgaucaaccccacggaccagagcuccuacaucguggacagcgugaccgucaagaacggguccauccaccucuacuucgacaaggccggccagaagaccuacgagcgccacagccugucccacuucgugaaccuggacaaccuccgggccaacaacaccaaggggagccugcccaucaacgugaucgucuucgacggcaaguccaagugcgaggagagcuccgccaagagcgccuccguguacuacagccagcugaugugccagcccauccuccugcuggaccaggcgcucgugagcgacgucggcgacuccgccgagguggccgugaagauguucgacgccuacgucaacacguucagcuccaccuucaacgugccgauggagaagcugaagacccugguggccaccgcggaggccgagcucgccaagaacgucagccuggacaacgugcuguccacguucaucagcgccgcgcgccagggguucguggacuccgacgucgagaccaaggacgugguggagugccucaagcugagccaccaguccgacaucgaggucaccggcgacagcugcaacaacuacaugcugaccuacaacaagguggagaacaugacgccccgggaccucggggccugcaucgacugcuccgcccgccacaucaacgcccagguggccaagagccacaacaucgcgcugaucuggaacgucaaggacuucaugucccugagcgagcagcuccggaagcagauccgcuccgccgccaagaagaacaaccugcccuucaagcugaccugcgccaccacccgccagguggugaacgucgugacgaccaagaucgcccucaagggcggguga

SEQ ID NO: 17802 - RNA, 5841 nt, Artificial Sequence
  SARS-CoV-2__MT834626.1__non-structural protein 3 (NSP3) CDS gc
auggcccccaccaaggugaccuucggcgacgacacggucaucgaggugcagggguacaagagcgugaacaucaccuucgagcuggacgagcgcaucgacaagguccucaacgagaagugcuccgccuacaccguggagcugggcaccgaggugaacgaguucgcgugcgucguggccgacgccgugaucaagacgcugcagccggucagcgagcuccugaccccccuggggaucgaccucgacgagugguccauggccaccuacuaccuguucgacgagagcggcgaguucaagcuggccucccacauguacugcagcuucuacccccccgacgaggacgaggaggagggggacugcgaggaggaggaguucgagccguccacccaguacgaguacggcacggaggacgacuaccagggcaagccccucgaguucggggcgaccagcgccgcccugcagcccgaggaggagcaggaggaggacuggcuggacgacgacucccagcagaccgugggccagcaggacgggagcgaggacaaccagaccacgaccauccagaccaucguggagguccagccccagcucgagauggagcugaccccgguggugcagacgaucgaggucaacuccuucagcggcuaccugaagcucaccgacaacguguacaucaagaacgccgacaucguggaggaggcgaagaaggucaagcccaccgugguggucaacgccgccaacguguaccugaagcacgggggcggcguggccggggcccugaacaaggcgaccaacaacgccaugcaggucgaguccgacgacuacaucgccacgaacggcccccucaagguggggggcagcugcguccuguccggccacaaccuggccaagcacugccuccacgugguggggcccaacgucaacaagggcgaggacauccagcugcugaagagcgccuacgagaacuucaaccagcacgaggugcuccuggcgccgcugcucuccgccgggaucuucggcgccgaccccauccacagccugcgggugugcgucgacaccgugcgcaccaacguguaccuggccgucuucgacaagaaccucuacgacaagcugguguccagcuuccuggagaugaagagcgagaagcagguggagcagaagaucgccgagauccccaaggaggaggucaagcccuucaucaccgaguccaagccgagcguggagcagcggaagcaggacgacaagaagaucaaggcgugcguggaggaggucacgaccacccucgaggagaccaaguuccugacggagaaccugcuccuguacaucgacaucaacgggaaccugcaccccgacuccgccacccucgugagcgacaucgacaucaccuuccugaagaaggacgcccccuacaucgugggcgacgucgugcaggagggcgugcugaccgccgucgugauccccacgaagaaggccgggggcaccaccgagaugcucgcgaaggcccugcgcaaggugccgaccgacaacuacaucacgaccuaccccgggcagggccugaacggguacaccgucgaggaggccaagaccgugcucaagaagugcaaguccgccuucuacauccugcccagcaucaucuccaacgagaagcaggagauccugggcaccgugagcuggaaccuccgggagaugcuggcgcacgccgaggagacgcgcaagcugaugcccgucugcguggagaccaaggccaucguguccaccauccagcggaaguacaagggcaucaagauccaggagggggucguggacuacggcgcccgcuucuacuucuacaccagcaagacgaccguggccucccugaucaacacccucaacgaccugaacgagacccuggucacgaugccgcucggguacgugacccacggccugaaccuggaggaggcggcccgguacaugcgcagccucaaggugcccgccaccgucuccgugagcucccccgacgccgugaccgccuacaacggguaccugacgagcuccagcaagacccccgaggagcacuucaucgagaccaucucccuggcgggcagcuacaaggacuggagcuacuccggccagagcacccagcucgggaucgaguuccugaagcggggcgacaaguccgucuacuacacgagcaacccgaccaccuuccaccuggacggggaggugaucaccuucgacaaccucaagacgcugcugucccuccgcgaggugcggaccaucaaggucuucaccaccguggacaacaucaaccugcacacgcagguggucgacaugagcaugaccuacggccagcaguucggccccaccuaccuggacggggccgacgugaccaagaucaagccccacaacucccacgagggcaagacguucuacgugcucccgaacgacgacacccugcgcgucgaggccuucgaguacuaccacaccaccgaccccagcuuccuggggcgguacauguccgcccucaaccacacgaagaaguggaaguacccccaggugaacggccugaccagcaucaagugggccgacaacaacugcuaccuggcgaccgcccuccugacccugcagcagaucgagcucaaguucaaccccccggcccugcaggacgccuacuaccgcgcgcgggccggggaggccgccaacuucugcgcccugauccucgcguacugcaacaagacggugggcgagcugggcgacguccgcgagaccauguccuaccuguuccagcacgccaaccucgacagcugcaagcgggugcugaacgucgugugcaagaccugcgggcagcagcagaccacccugaagggcguggaggccgucauguacauggggacgcucuccuacgagcaguucaagaagggcgugcagauccccugcaccugcgggaagcaggccaccaaguaccuggugcagcaggagagccccuucgucaugauguccgcccccccggcgcaguacgagcugaagcacggcaccuucacgugcgccagcgaguacaccggcaacuaccagugcgggcacuacaagcacaucaccuccaaggagacccucuacugcaucgacggcgcccugcugacgaagagcagcgaguacaaggggcccaucaccgacguguucuacaaggagaacuccuacaccaccacgaucaagcccgugaccuacaagcucgacggcgucgugugcaccgagaucgaccccaagcuggacaacuacuacaagaaggacaacagcuacuucaccgagcagccgaucgaccuggugcccaaccagcccuaccccaacgccuccuucgacaacuucaaguucgucugcgacaacaucaaguucgccgacgaccucaaccagcugacgggguacaagaagccggcgagccgcgagcugaaggugaccuucuuccccgaccucaacggcgacguggucgccaucgacuacaagcacuacacccccuccuucaagaagggcgccaagcugcugcacaagcccaucguguggcacgugaacaacgccaccaacaaggcgacguacaagccgaacaccuggugcauccggugccucuggagcaccaagcccgucgagaccuccaacagcuucgacgugcugaaguccgaggacgcccaggggauggacaaccuggccugcgaggaccucaagcccgugagcgaggaggucguggagaaccccacgauccagaaggacgugcuggagugcaacgucaagaccaccgagguggugggcgacaucauccugaagccggccaacaacucccucaagaucaccgaggaggucgggcacacggaccugauggccgcguacguggacaacagcucccugaccaucaagaagcccaacgagcucagccgcgugcugggccugaagacccucgccacccacgggcuggccgccgucaacuccgugcccugggacacgaucgccaacuacgcgaagccguuccugaacaagguggucagcaccaccaccaacaucgugacgcgcugccucaaccgggugugcaccaacuacaugcccuacuucuucacccugcugcuccagcugugcaccuucacccgcuccacgaacagccggaucaaggccuccaugcccaccaccaucgccaagaacaccgucaagagcgugggcaaguucugccuggaggccagcuucaacuaccucaagucccccaacuucagcaagcugaucaacaucaucaucugguuccugcuccuguccgugugccugggcagccucaucuacuccacggccgcgcuggggguccugaugagcaaccucggcaugccguccuacugcaccggguaccgcgagggcuaccugaacagcaccaacgugaccaucgccacguacugcaccggcuccauccccugcagcgugugccuguccgggcucgacagccuggacaccuaccccucccuggagaccauccagaucacgaucagcuccuucaagugggaccucaccgccuucggccuggucgccgagugguuccuggccuacauccucuucacccgguucuucuacgugcuggggcuggcggccaucaugcagcucuucuucagcuacuucgccgugcacuucaucuccaacagcuggcugauguggcugaucaucaaccugguccagauggcccccaucuccgcgauggugcgcauguacaucuucuucgccagcuucuacuacguguggaagagcuacguccacgugguggacggcugcaacuccagcaccugcaugaugugcuacaagcggaaccgcgccacgcgggucgagugcaccaccaucgugaacgggguccgccgguccuucuacguguacgccaacggcggcaagggguucugcaagcuccacaacuggaacugcgugaacugcgacaccuucugcgccggcagcacguucaucuccgacgaggucgcgcgcgaccugagccugcaguucaagcggccgaucaaccccaccgaccaguccagcuacaucguggacuccgugaccgucaaggacgggagcauccaccucuacuucgacaaggccggccagaagaccuacgagcgccacucccugagccacuucgugaaccuggacaaccuccgggccaacaacacgaaggggucccugcccaucaacgugaucgucuucgacggcaagagcaagugcgaggaguccagcgccaaguccgccagcguguacuacucccagcugaugugccagcccauccuccugcuggaccaggcgcucgugagcgacgucggcgacagcgccgagguggccgugaagauguucgacgccuacgucaacaccuucuccagcaccuucaacgugccgauggagaagcugaagacccugguggccacggcggaggccgagcucgccaagaacgucucccuggacaacgugcugagcaccuucaucuccgccgcgcgccagggguucguggacagcgacgucgagaccaaggacgugguggagugccucaagcugucccaccagagcgacaucgaggucaccggcgacuccugcaacaacuacaugcugacguacaacaagguggagaacaugaccccccgggaccucggggccugcaucgacugcagcgcccgccacaucaacgcccagguggccaagucccacaacaucgcgcugaucuggaacgucaaggacuucaugagccuguccgagcagcuccggaagcagauccgcagcgccgccaagaagaacaaccugcccuucaagcugaccugcgccaccacgcgccagguggugaacgucgugaccaccaagaucgcccucaagggcggguga

SEQ ID NO: 17803 - RNA, 5841 nt, Artificial Sequence
  SARS-CoV-2__MT834646.1__non-structural protein 3 (NSP3) CDS gc
auggcccccaccaaggugaccuucggcgacgacacggucaucgaggugcagggguacaagagcgugaacaucaccuucgagcuggacgagcgcaucgacaagguccucaacgagaagugcuccgccuacaccguggagcugggcaccgaggugaacgaguucgcgugcgucguggccgacgccgugaucaagacgcugcagccggucagcgagcuccugaccccccuggggaucgaccucgacgagugguccauggccaccuacuaccuguucgacgagagcggcgaguucaagcuggccucccacauguacugcagcuucuacccccccgacgaggacgaggaggagggggacugcgaggaggaggaguucgagccguccacccaguacgaguacggcacggaggacgacuaccagggcaagccccucgaguucggggcgaccagcgccgcccugcagcccgaggaggagcaggaggaggacuggcuggacgacgacucccagcagaccgugggccagcaggacgggagcgaggacaaccagaccacgaccauccagaccaucguggagguccagccccagcucgagauggagcugaccccgguggugcagacgaucgaggucaacuccuucagcggcuaccugaagcucaccgacaacguguacaucaagaacgccgacaucguggaggaggcgaagaaggucaagcccaccgugguggucaacgccgccaacguguaccugaagcacgggggcggcguggccggggcccugaacaaggcgaccaacaacgccaugcaggucgaguccgacgacuacaucgccacgaacggcccccucaagguggggggcagcugcguccuguccggccacaaccuggccaagcacugccuccacgugguggggcccaacgucaacaagggcgaggacauccagcugcugaagagcgccuacgagaacuucaaccagcacgaggugcuccuggcgccgcugcucuccgccgggaucuucggcgccgaccccauccacagccugcgggugugcgucgacaccgugcgcaccaacguguaccuggccgucuucgacaagaaccucuacgacaagcugguguccagcuuccuggagaugaagagcgagaagcagguggagcagaagaucgccgagauccccaaggaggaggucaagcccuucaucaccgaguccaagccgagcguggagcagcggaagcaggacgacaagaagaucaaggcgugcguggaggaggucacgaccacccucgaggagaccaaguuccugacggagaaccugcuccuguacaucgacaucaacgggaaccugcaccccgacuccgccacccucgugagcgacaucgacaucaccuuccugaagaaggacgcccccuacaucgugggcgacgucgugcaggagggcgugcugaccgccgucgugauccccacgaagaaggccgggggcaccaccgagaugcucgcgaaggcccugcgcaaggugccgaccgacaacuacaucacgaccuaccccgggcagggccugaacggguacaccgucgaggaggccaagaccgugcucaagaagugcaaguccgccuucuacauccugcccagcaucaucuccaacgagaagcaggagauccugggcaccgugagcuggaaccuccgggagaugcuggcgcacgccgaggagacgcgcaagcugaugcccgucugcguggagaccaaggccaucguguccaccauccagcggaaguacaagggcaucaagauccaggagggggucguggacuacggcgcccgcuucuacuucuacaccagcaagacgaccguggccucccugaucaacacccucaacgaccugaacgagacccuggucacgaugccgcucggguacgugacccacggccugaaccuggaggaggcggcccgguacaugcgcagccucaaggugcccgccaccgucuccgugagcucccccgacgccgugaccgccuacaacggguaccugacgagcuccagcaagacccccgaggagcacuucaucgagaccaucucccuggcgggcagcuacaaggacuggagcuacuccggccagagcacccagcucgggaucgaguuccugaagcggggcgacaaguccgucuacuacacgagcaacccgaccaccuuccaccuggacggggacgugaucaccuucgacaaccucaagacgcugcugucccuccgcgaggugcggaccaucaaggucuucaccaccguggacaacaucaaccugcacacgcagguggucgacaugagcaugaccuacggccagcaguucggccccaccuaccuggacggggccgacgugaccaagaucaagccccacaacucccacgagggcaagacguucuacgugcucccgaacgacgacacccugcgcgucgaggccuucgaguacuaccacaccaccgaccccagcuuccuggggcgguacauguccgcccucaaccacacgaagaaguggaaguacccccaggugaacggccugaccagcaucaagugggccgacaacaacugcuaccuggcgaccgcccuccugacccugcagcagaucgagcucaaguucaaccccccggcccugcaggacgccuacuaccgcgcgcgggccggggaggccgccaacuucugcgcccugauccucgcguacugcaacaagacggugggcgagcugggcgacguccgcgagaccauguccuaccuguuccagcacgccaaccucgacagcugcaagcgggugcugaacgucgugugcaagaccugcgggcagcagcagaccacccugaagggcguggaggccgucauguacauggggacgcucuccuacgagcaguucaagaagggcgugcagauccccugcaccugcgggaagcaggccaccaaguaccuggugcagcaggagagccccuucgucaugauguccgcccccccggcgcaguacgagcugaagcacggcaccuucacgugcgccagcgaguacaccggcaacuaccagugcgggcacuacaagcacaucaccuccaaggagacccucuacugcaucgacggcgcccugcugacgaagagcagcgaguacaaggggcccaucaccgacguguucuacaaggagaacuccuacaccaccacgaucaagcccgugaccuacaagcucgacggcgucgugugcaccgagaucgaccccaagcuggacaacuacuacaagaaggacaacagcuacuucaccgagcagccgaucgaccuggugcccaaccagcccuaccccaacgccuccuucgacaacuucaaguucgucugcgacaacaucaaguucgccgacgaccucaaccagcugacgggguacaagaagccggcgagccgcgagcugaaggugaccuucuuccccgaccucaacggcgacguggucgccaucgacuacaagcacuacacccccuccuucaagaagggcgccaagcugcugcacaagcccaucguguggcacgugaacaacgccaccaacaaggcgacguacaagccgaacaccuggugcauccggugccucuggagcaccaagcccgucgagaccuccaacagcuucgacgugcugaaguccgaggacgcccaggggauggacaaccuggccugcgaggaccucaagcccgugagcgaggaggucguggagaaccccacgauccagaaggacgugcuggagugcaacgucaagaccaccgagguggugggcgacaucauccugaagccggccaacaacucccucaagaucaccgaggaggucgggcacacggaccugauggccgcguacguggacaacagcucccugaccaucaagaagcccaacgagcucagccgcgugcugggccugaagacccucgccacccacgggcuggccgccgucaacuccgugcccugggacacgaucgccaacuacgcgaagccguuccugaacaagguggucagcaccaccaccaacaucgugacgcgcugccucaaccgggugugcaccaacuacaugcccuacuucuucacccugcugcuccagcugugcaccuucacccgcuccacgaacagccggaucaaggccuccaugcccaccaccaucgccaagaacaccgucaagagcgugggcaaguucugccuggaggccagcuucaacuaccucaagucccccaacuucagcaagcugaucaacaucaucaucugguuccugcuccuguccgugugccugggcagccucaucuacuccacggccgcgcuggggguccugaugagcaaccucggcaugccguccuacugcaccggguaccgcgagggcuaccugaacagcaccaacgugaccaucgccacguacugcaccggcuccauccccugcagcgugugccuguccgggcucgacagccuggacaccuaccccucccuggagaccauccagaucacgaucagcuccuucaagugggaccucaccgccuucggccuggucgccgagugguuccuggccuacauccucuucacccgguucuucuacgugcuggggcuggcggccaucaugcagcucuucuucagcuacuucgccgugcacuucaucuccaacagcuggcugauguggcugaucaucaaccugguccagauggcccccaucuccgcgauggugcgcauguacaucuucuucgccagcuucuacuacguguggaagagcuacguccacgugguggacggcugcaacuccagcaccugcaugaugugcuacaagcggaaccgcgccacgcgggucgagugcaccaccaucgugaacgggguccgccgguccuucuacguguacgccaacggcggcaagggguucugcaagcuccacaacuggaacugcgugaacugcgacaccuucugcgccggcagcacguucaucuccgacgaggucgcgcgcgaccugagccugcaguucaagcggccgaucaaccccaccgaccaguccagcuacaucguggacuccgugaccgucaagaacgggagcauccaccucuacuucgacaaggccggccagaagaccuacgagcgccacucccugagccacuucgugaaccuggacaaccuccgggccaacaacacgaaggggucccugcccaucaacgugaucgucuucgacggcaagagcaagugcgaggaguccagcgccaaguccgccagcguguacuacucccagcugaugugccagcccauccuccugcuggaccaggcgcucgugagcgacgucggcgacagcgccgagguggccgugaagauguucgacgccuacgucaacaccuucuccagcaccuucaacgugccgauggagaagcugaagacccugguggccacggcggaggccgagcucgccaagaacgucucccuggacaacgugcugagcaccuucaucuccgccgcgcgccagggguucguggacagcgacgucgagaccaaggacgugguggagugccucaagcugucccaccagagcgacaucgaggucaccggcgacuccugcaacaacuacaugcugacguacaacaagguggagaacaugaccccccgggaccucggggccugcaucgacugcagcgcccgccacaucaacgcccagguggccaagucccacaacaucgcgcugaucuggaacgucaaggacuucaugagccuguccgagcagcuccggaagcagauccgcagcgccgccaagaagaacaaccugcccuucaagcugaccugcgccaccacgcgccagguggugaacgucgugaccaccaagaucgcccucaagggcggguga

SEQ ID NO: 17804 - RNA, 5841 nt, Artificial Sequence
  SARS-CoV-2__MT834656.1__non-structural protein 3 (NSP3) CDS gc
auggcccccaccaaggugaccuucggcgacgacacggucaucgaggugcagggguacaagagcgugaacaucaccuucgagcuggacgagcgcaucgacaagguccucaacgagaagugcuccgccuacaccguggagcugggcaccgaggugaacgaguucgcgugcgucguggccgacgccgugaucaagacgcugcagccggucagcgagcuccugaccccccuggggaucgaccucgacgagugguccauggccaccuacuaccuguucgacgagagcggcgaguucaagcuggccucccacauguacugcagcuucuacccccccgacgaggacgaggaggagggggacugcgaggaggaggaguucgagccguccacccaguacgaguacggcacggaggacgacuaccagggcaagccccucgaguucggggcgaccagcgccgcccugcagcccgaggaggagcaggaggaggacuggcuggacgacgacucccagcagaccgugggccagcaggacgggagcgaggacaaccagaccacgaccauccagaccaucguggagguccagccccagcucgagauggagcugaccccgguggugcagacgaucgaggucaacuccuucagcggcuaccugaagcucaccgacaacguguacaucaagaacgccgacaucguggaggaggcgaagaaggucaagcccaccgugguggucaacgccgccaacguguaccugaagcacgggggcggcguggccggggcccugaacaaggcgaccaacaacgccaugcaggucgaguccgacgacuacaucgccacgaacggcccccucaagguggggggcagcugcguccuguccggccacaaccuggccaagcacugccuccacgugguggggcccaacgucaacaagggcgaggacauccagcugcugaagagcgccuacgagaacuucaaccagcacgaggugcuccuggcgccgcugcucuccgccgggaucuucggcgccgaccccauccacagccugcgggugugcgucgacaccgugcgcaccaacguguaccuggccgucuucgacaagaaccucuacgacaagcugguguccagcuuccuggagaugaagagcgagaagcagguggagcagaagaucgccgagauccccaaggaggaggucaagcccuucaucaccgaguccaagccgagcguggagcagcggaagcaggacgacaagaagaucaaggcgugcguggaggaggucacgaccacccucgaggagaccaaguuccugacggagaaccugcuccuguacaucgacaucaacgggaaccugcaccccgacuccgccacccucgugagcgacaucgacaucaccuuccugaagaaggacgcccccuacaucgugggcgacgucgugcaggagggcgugcugaccgccgucgugauccccacgaagaaggccgggggcaccaccgagaugcucgcgaaggcccugcgcaaggugccgaccgacaacuacaucacgaccuaccccgggcagggccugaacggguacaccgucgaggaggccaagaccgugcucaagaagugcaaguccgccuucuacauccugcccagcaucaucuccaacgagaagcaggagauccugggcaccgugagcuggaaccuccgggagaugcuggcgcacgccgaggagacgcgcaagcugaugcccgucugcguggagaccaaggccaucguguccaccauccagcggaaguacaagggcaucaagauccaggagggggucguggacuacggcgcccgcuucuacuucuacaccagcaagacgaccguggccucccugaucaacacccucaacgaccugaacgagacccuggucacgaugccgcucggguacgugacccacggccugaaccuggaggaggcggcccgguacaugcgcagccucaaggugcccgccaccgucuccgugagcucccccgacgccgugaccgccuacaacggguaccugacgagcuccagcaagacccccgaggagcacuucaucgagaccaucucccuggcgggcagcuacaaggacuggagcuacuccggccagagcacccagcucgggaucgaguuccugaagcggggcgacaaguccgucuacuacacgagcaacccgaccaccuuccaccuggacggggaggugaucaccuucgacaaccucaagacgcugcugucccuccgcgaggugcggaccaucaaggucuucaccaccguggacaacaucaaccugcacacgcagguggucgacaugagcaugaccuacggccagcaguucggccccaccuaccuggacggggccgacgugaccaagaucaagccccacaacucccacgagggcaagacguucuacgugcucccgaacgacgacacccugcgcgucgaggccuucgaguacuaccacaccaccgaccccagcuuccuggggcgguacauguccgcccucaaccacacgaagaaguggaaguacccccaggugaacggccugaccagcaucaagugggccgacaacaacugcuaccuggcgaccgcccuccugacccugcagcagaucgagcucaaguucaaccccccggcccugcaggacgccuacuaccgcgcgcgggccggggaggccgccaacuucugcgcccugauccucgcguacugcaacaagacggugggcgagcugggcgacguccgcgagaccauguccuaccuguuccagcacgccaaccucgacagcugcaagcgggugcugaacgucgugugcaagaccugcgggcagcagcagaccacccugaagggcguggaggccgucauguacauggggacgcucuccuacgagcaguucaagaagggcgugcagauccccugcaccugcgggaagcaggccaccaaguaccuggugcagcaggagagccccuucgucaugauguccgcccccccggcgcaguacgagcugaagcacggcaccuucacgugcgccagcgaguacaccggcaacuaccagugcgggcacuacaagcacaucaccuccaaggagacccucuacugcaucgacggcgcccugcugacgaagagcagcgaguacaaggggcccaucaccgacguguucuacaaggagaacuccuacaccaccacgaucaagcccgugaccuacaagcucgacggcgucgugugcaccgagaucgaccccaagcuggacaacuacuacaagaaggacaacagcuacuucaccgagcagccgaucgaccuggugcccaaccagcccuaccccaacgccggguucgacaacuucaaguucgucugcgacaacaucaaguucgccgacgaccucaaccagcugacgggcuacaagaagccggcgucccgcgagcugaaggugaccuucuuccccgaccucaacggcgacguggucgccaucgacuacaagcacuacacccccagcuucaagaagggggccaagcugcugcacaagcccaucguguggcacgugaacaacgccaccaacaaggcgacguacaagccgaacaccuggugcauccggugccucugguccaccaagcccgucgagaccagcaacuccuucgacgugcugaagagcgaggacgcccagggcauggacaaccuggccugcgaggaccucaagcccguguccgaggaggucguggagaaccccacgauccagaaggacgugcuggagugcaacgucaagaccaccgagguggugggggacaucauccugaagccggccaacaacagccucaagaucaccgaggaggucggccacacggaccugauggccgcguacguggacaacuccagccugaccaucaagaagcccaacgagcucucccgcgugcuggggcugaagacccucgccacccacggccuggccgccgucaacagcgugcccugggacacgaucgccaacuacgcgaagccguuccugaacaagguggucuccaccaccaccaacaucgugacgcgcugccucaaccgggugugcaccaacuacaugcccuacuucuucacccugcugcuccagcugugcaccuucacccgcagcacgaacucccggaucaaggccagcaugcccaccaccaucgccaagaacaccgucaaguccgugggcaaguucugccuggaggccagcuucaacuaccucaagagccccaacuucuccaagcugaucaacaucaucaucugguuccugcuccugagcgugugccuggggucccucaucuacagcacggccgcgcugggcguccugauguccaaccucgggaugccgagcuacugcaccggcuaccgcgagggcuaccugaacuccaccaacgugaccaucgccacguacugcaccgggagcauccccugcuccgugugccugagcggccucgacucccuggacaccuaccccagccuggagaccauccagaucacgaucuccagcuucaagugggaccucaccgccuucgggcuggucgccgagugguuccuggccuacauccucuucacccgguucuucuacgugcugggccuggcggccaucaugcagcucuucuucuccuacuucgccgugcacuucaucagcaacuccuggcugauguggcugaucaucaaccugguccagauggcccccaucagcgcgauggugcgcauguacaucuucuucgccuccuucuacuacguguggaagagcuacguccacgugguggacgggugcaacagcuccaccugcaugaugugcuacaagcggaaccgcgccacgcgggucgagugcaccaccaucgugaacggcguccgccggagcuucuacguguacgccaacggcgggaagggcuucugcaagcuccacaacuggaacugcgugaacugcgacaccuucugcgccggguccacguucaucagcgacgaggucgcgcgcgaccugucccugcaguucaagcggccgaucaaccccaccgaccagagcuccuacaucguggacagcgugaccgucaagaacggcuccauccaccucuacuucgacaaggccgggcagaagaccuacgagcgccacagccugucccacuucgugaaccuggacaaccuccgggccaacaacacgaagggcagccugcccaucaacgugaucgucuucgacggcaaguccaagugcgaggagagcuccgccaagagcgccuccguguacuacagccagcugaugugccagcccauccuccugcuggaccaggcgcucguguccgacgucggggacagcgccgagguggccgugaagauguucgacgccuacgucaacaccuucagcuccaccuucaacgugccgauggagaagcugaagacccugguggccacggcggaggccgagcucgccaagaacgucagccuggacaacgugcuguccaccuucaucagcgccgcgcgccagggcuucguggacuccgacgucgagaccaaggacgugguggagugccucaagcugagccaccaguccgacaucgaggucaccggggacagcugcaacaacuacaugcugacguacaacaagguggagaacaugaccccccgggaccucggcgccugcaucgacugcuccgcccgccacaucaacgcccagguggccaagagccacaacaucgcgcugaucuggaacgucaaggacuucaugucccugagcgagcagcuccggaagcagauccgcuccgccgccaagaagaacaaccugcccuucaagcugaccugcgccaccacgcgccagguggugaacgucgugaccaccaagaucgcccucaaggggggcuga

SEQ ID NO: 17805 - RNA, 5841 nt, Artificial Sequence
  SARS-CoV-2__MT834661.1__non-structural protein 3 (NSP3) CDS gc
auggcccccaccaaggugaccuucggcgacgacacggucaucgaggugcagggguacaagagcgugaacaucaccuucgagcuggacgagcgcaucgacaagguccucaacgagaagugcuccgccuacaccguggagcugggcaccgaggugaacgaguucgcgugcgucguggccgacgccgugaucaagacgcugcagccggucagcgagcuccugaccccccuggggaucgaccucgacgagugguccauggccaccuacuaccuguucgacgagagcggcgaguucaagcuggccucccacauguacugcagcuucuacccccccgacgaggacgaggaggagggggacugcgaggaggaggaguucgagccguccacccaguacgaguacggcacggaggacgacuaccagggcaagccccucgaguucggggcgaccagcgccgcccugcagcccgaggaggagcaggaggaggacuggcuggacgacgacucccagcagaccgugggccagcaggacgggagcgaggacaaccagaccacgaccauccagaccaucguggagguccagccccagcucgagauggagcugaccccgguggugcagacgaucgaggucaacuccuucagcggcuaccugaagcucaccgacaacguguacaucaagaacgccgacaucguggaggaggcgaagaaggucaagcccaccgugguggucaacgccgccaacguguaccugaagcacgggggcggcguggccggggcccugaacaaggcgaccaacaacgccaugcaggucgaguccgacgacuacaucgccacgaacggcccccucaagguggggggcagcugcguccuguccggccacaaccuggccaagcacugccuccacgugguggggcccaacgucaacaagggcgaggacauccagcugcugaagagcgccuacgagaacuucaaccagcacgaggugcuccuggcgccgcugcucuccgccgggaucuucggcgccgaccccauccacagccugcgggugugcgucgacaccgugcgcaccaacguguaccuggccgucuucgacaagaaccucuacgacaagcugguguccagcuuccuggagaugaagagcgagaagcagguggagcagaagaucgccgagauccccaaggaggaggucaagcccuucaucaccgaguccaagccgagcguggagcagcggaagcaggacgacaagaagaucaaggcgugcguggaggaggucacgaccacccucgaggagaccaaguuccugacggagaaccugcuccuguacaucgacaucaacgggaaccugcaccccgacuccgccacccucgugagcgacaucgacaucaccuuccugaagaaggacgcccccuacaucgugggcgacgucgugcaggagggcgugcugaccgccgucgugauccccacgaagaaggccgggggcaccaccgagaugcucgcgaaggcccugcgcaaggugccgaccgacaacuacaucacgaccuaccccgggcagggccugaacggguacaccgucgaggaggccaagaccgugcucaagaagugcaaguccgccuucuacauccugcccagcaucaucuccaacgagaagcaggagauccugggcaccgugagcuggaaccuccgggagaugcuggcgcacgccgaggagacgcgcaagcugaugcccgucugcguggagaccaaggccaucguguccaccauccagcggaaguacaagggcaucaagauccaggagggggucguggacuacggcgcccgcuucuacuucuacaccagcaagacgaccguggccucccugaucaacacccucaacgaccugaacgagacccuggucacgaugccgcucggguacgugacccacggccugaaccuggaggaggcggcccgguacaugcgcagccucaaggugcccgccaccgucuccgugagcucccccgacgccgugaccgccuacaacggguaccugacgagcuccagcaagacccccgaggagcacuucaucgagaccaucucccuggcgggcagcuacaaggacuggagcuacuccggccagagcacccagcucgggaucgaguuccugaagcggggcgacaaguccgucuacuacacgagcaacccgaccaccuuccaccuggacggggaggugaucaccuucgacaaccucaagacgcugcugucccuccgcgaggugcggaccaucaaggucuucaccaccguggacaacaucaaccugcacacgcagguggucgacaugagcaugaccuacggccagcaguucggccccaccuaccuggacggggccgacgugaccaagaucaagccccacaacucccacgagggcaagacguucuacgugcucccgaacgacgacacccugcgcgucgaggccuucgaguacuaccacaccaccgaccccagcuuccuggggcgguacauguccgcccucaaccacacgaagaaguggaaguacccccaggugaacggccugaccagcaucaagugggccgacaacaacugcuaccuggcgaccgcccuccugacccugcagcagaucgagcucaaguucaaccccccggcccugcaggacgccuacuaccgcgcgcgggccggggaggccgccaacuucugcgcccugauccucgcguacugcaacaagacggugggcgagcugggcgacguccgcgagaccauguccuaccuguuccagcacgccaaccucgacagcugcaagcgggugcugaacgucgugugcaagaccugcgggcagcagcagaccacccugaagggcguggaggccgucauguacauggggacgcucuccuacgagcaguucaagaagggcgugcagauccccugcaccugcgggaagcaggccaccaaguaccuggugcagcaggagagccccuucgucaugauguccgcccccccggcgcaguacgagcugaagcacggcaccuucacgugcgccagcgaguacaccggcaacuaccagugcgggcacuacaagcacaucaccuccaaggagacccucuacugcaucgacggcgcccugcugacgaagagcagcgaguacaaggggcccaucaccgacguguucuacaaggagaacuccuacaccaccacgaucaagcccgugaccuacaagcucgacggcgucgugugcaccgagaucgaccccaagcuggacaacuacuacaagaaggacaacagcuacuucaccgagcagccgaucgaccuggugcccaaccagcccuaccccaacgccuccuucgacaacuucaaguucgucugcgacaacaucaaguucgccgacgaccucaaccagcugacgggguacaagaagccggcgagccgcgagcugaaggugaccuucuuccccgaccucaacggcgacguggucgccaucgacuacaagcacuacacccccuccuucaagaagggcgccaagcugcugcacaagcccaucguguggcacgugaacaacgccaccaacaaggcgacguacaagccgaacaccuggugcauccggugccucuggagcaccaagcccgucgagaccuccaacagcuucgacgugcugaaguccgaggacgcccaggggauggacaaccuggccugcgaggaccucaagcccgugagcgaggaggucguggagaaccccacgauccagaaggacgugcuggagugcaacgucaagaccaccgagguggugggcgacaucauccugaagccggccaacaacucccucaagaucaccgaggaggucgggcacacggaccugauggccgcguacguggacaacagcucccugaccaucaagaagcccaacgagcucagccgcgugcugggccugaagacccucgccacccacgggcuggccgccgucaacuccgugcccugggacacgaucgccaacuacgcgaagccguuccugaacaagguggucagcaccaccaccaacaucgugacgcgcugccucaaccgggugugcaccaacuacaugcccuacuucuucacccugcugcuccagcugugcaccuucacccgcuccacgaacagccggaucaaggccuccaugcccaccaccaucgccaagaacaccgucaagagcgugggcaaguucugccuggaggccagcuucaacuaccucaagucccccaacuucagcaagcugaucaacaucaucaucugguuccugcuccuguccgugugccugggcagccucaucuacuccacggccgcgcuggggguccugaugagcaaccucggcaugccguccuacugcaccggguaccgcgagggcuaccugaacagcaccaacgugaccaucgccacguacugcaccggcuccauccccugcagcgugugccuguccgggcucgacagccuggacaccuaccccucccuggagaccauccagaucacgaucagcuccuucaagugggaccucaccgccuucggccuggucgccgagugguuccuggccuacauccucuucacccgguucuucuacgugcuggggcuggcggccaucaugcagcucuucuucagcuacuucgccgugcacuucaucuccaacagcuggcugauguggcugaucaucaaccugguccagauggcccccaucuccgcgauggugcgcauguacaucuucuucgccagcuucuacuacguguggaagagcuacguccacgugguggacggcugcaacuccagcaccugcaugaugugcuacaagcggaaccgcgccacgcgggucgagugcaccaccaucgugaacgggguccgccgguccuucuacguguacgccaacggcggcaagggguucugcaagcuccacaacuggaacugcgugaacugcgacaccuucugcgccggcagcacguucaucuccgacgaggucgcgcgcgaccugagccugcaguucaagcggccgaucaaccccaccgaccaguccuucuacaucguggacagcgugaccgucaagaacggguccauccaccucuacuucgacaaggccggccagaagaccuacgagcgccacagccugucccacuucgugaaccuggacaaccuccgggccaacaacacgaaggggagccugcccaucaacgugaucgucuucgacggcaaguccaagugcgaggagagcuccgccaagagcgccuccguguacuacagccagcugaugugccagcccauccuccugcuggaccaggcgcucguguccgacgucggcgacagcgccgagguggccgugaagauguucgacgccuacgucaacaccuucagcuccaccuucaacgugccgauggagaagcugaagacccugguggccacggcggaggccgagcucgccaagaacgucagccuggacaacgugcuguccaccuucaucagcgccgcgcgccagggguucguggacuccgacgucgagaccaaggacgugguggagugccucaagcugagccaccaguccgacaucgaggucaccggcgacagcugcaacaacuacaugcugacguacaacaagguggagaacaugaccccccgggaccucggggccugcaucgacugcuccgcccgccacaucaacgcccagguggccaagagccacaacaucgcgcugaucuggaacgucaaggacuucaugucccugagcgagcagcuccggaagcagauccgcuccgccgccaagaagaacaaccugcccuucaagcugaccugcgccaccacgcgccagguggugaacgucgugaccaccaagaucgcccucaagggcggguga

SEQ ID NO: 17806 - RNA, 5841 nt, Artificial Sequence
  SARS-CoV-2__MT834662.1__non-structural protein 3 (NSP3) CDS gc
auggcccccaccaaggugaccuucggcgacgacacggucaucgaggugcagggguacaagagcgugaacaucaccuucgagcuggacgagcgcaucgacaagguccucaacgagaagugcuccgccuacaccguggagcugggcaccgaggugaacgaguucgcgugcgucguggccgacgccgugaucaagacgcugcagccggucagcgagcuccugaccccccuggggaucgaccucgacgagugguccauggccaccuacuaccuguucgacgagagcggcgaguucaagcuggccucccacauguacugcagcuucuacccccccgacgaggacgaggaggagggggacugcgaggaggaggaguucgagccguccacccaguacgaguacggcacggaggacgacuaccagggcaagccccucgaguucggggcgaccagcgccgcccugcagcccgaggaggagcaggaggaggacuggcuggacgacgacucccagcagaccgugggccagcaggacgggagcgaggacaaccagaccacgaccauccagaccaucguggagguccagccccagcucgagauggagcugaccccgguggugcagacgaucgaggucaacuccuucagcggcuaccugaagcucaccgacaacguguacaucaagaacgccgacaucguggaggaggcgaagaaggucaagcccaccgugguggucaacgccgccaacguguaccugaagcacgggggcggcguggccggggcccugaacaaggcgaccaacaacgccaugcaggucgaguccgacgacuacaucgccacgaacggcccccucaagguggggggcagcugcguccuguccggccacaaccuggccaagcacugccuccacgugguggggcccaacgucaacaagggcgaggacauccagcugcugaagagcgccuacgagaacuucaaccagcacgaggugcuccuggcgccgcugcucuccgccgggaucuucggcgccgaccccauccacagccugcgggugugcgucgacaccgugcgcaccaacguguaccuggccgucuucgacaagaaccucuacgacaagcugguguccagcuuccuggagaugaagagcgagaagcagguggagcagaagaucgccgagauccccaaggaggaggucaagcccuucaucaccgaguccaagccgagcguggagcagcggaagcaggacgacaagaagaucaaggcgugcguggaggaggucacgaccacccucgaggagaccaaguuccugacggagaaccugcuccuguacaucgacaucaacgggaaccugcaccccgacuccgccacccucgugagcgacaucgacaucaccuuccugaagaaggacgcccccuacaucgugggcgacgucgugcaggagggcgugcugaccgccgucgugauccccacgaagaaggccgggggcaccaccgagaugcucgcgaaggcccugcgcaaggugccgaccgacaacuacaucacgaccuaccccgggcagggccugaacggguacaccgucgaggaggccaagaccgugcucaagaagugcaaguccgccuucuacauccugcccagcaucaucuccaacgagaagcaggagauccugggcaccgugagcuggaaccuccgggagaugcuggcgcacgccgaggagacgcgcaagcugaugcccgucugcguggagaccaaggccaucguguccaccauccagcggaaguacaagggcaucaagauccaggagggggucguggacuacggcgcccgcuucuacuucuacaccagcaagacgaccguggccucccugaucaacacccucaacgaccugaacgagacccuggucacgaugccgcucggguacgugacccacggccugaaccuggaggaggcggcccgguacaugcgcagccucaaggugcccgccaccgucuccgugagcucccccgacgccgugaccgccuacaacggguaccugacgagcuccagcaagacccccgaggagcacuucaucgagaccaucucccuggcgggcagcuacaaggacuggagcuacuccggccagagcacccagcucgggaucgaguuccugaagcggggcgacaaguccgucuacuacacgagcaacccgaccaccuuccaccuggacggggaggugaucaccuucgacaaccucaagacgcugcugucccuccgcgaggugcggaccaucaaggucuucaccaccguggacaacaucaaccugcacacgcagguggucgacaugagcaugaccuacggccagcaguucggccccaccuaccuggacggggccgacgugaccaagaucaagccccacaacucccacgagggcaagacguucuacgugcucccgaacgacgacacccugcgcgucgaggccuucgaguacuaccacaccaccgaccccagcuuccuggggcgguacauguccgcccucaaccacacgaagaaguggaaguacccccaggugaacggccugaccagcaucaagugggccgacaacaacugcuaccuggcgaccgcccuccugacccugcagcagaucgagcucaaguucaaccccccggcccugcaggacgccuacuaccgcgcgcgggccggggaggccgccaacuucugcgcccugauccucgcguacugcaacaagacggugggcgagcugggcgacguccgcgagaccauguccuaccuguuccagcacgccaaccucgacagcugcaagcgggugcugaacgucgugugcaagaccugcgggcagcagcagaccacccugaagggcguggaggccgucauguacauggggacgcucuccuacgagcaguucaagaagggcgugcagauccccugcaccugcgggaagcaggccaccaaguaccuggugcagcaggagagccccuucgucaugauguccgcccccccggcgcaguacgagcugaagcacggcaccuucacgugcgccagcgaguacaccggcaacuaccagugcgggcacuacaagcacaucaccuccaaggagacccucuacugcaucgacggcgcccugcugacgaagagcagcgaguacaaggggcccaucaccgacguguucuacaaggagaacuccuacaccaccacgaucaagcccgugaccuacaagcucgacggcgucgugugcaccgagaucgaccccaagcuggacaacuacuacaagaaggacaacagcuacuucaccgagcagccgaucgaccuggugcccaaccagcccuaccccaacgccuccuucgacaacuucaaguucgucugcgacaacaucaaguucgccgacgaccucaaccagcugacgggguacaagaagccggcgagccgcgagcugaaggugaccuucuuccccgaccucaacggcgacguggucgccaucgacuacaagcacuacacccccuccuucaagaagggcgccaagcugcugcacaagcccaucguguggcacgugaacaacgccaccaacaaggcgacguacaagccgaacaccuggugcauccggugccucuggagcaccaagcccgucgagaccuccaacagcuucgacgugcugaaguccgaggacgcccaggggauggacaaccuggccugcgaggaccucaagcccgugagcgaggaggucguggagaaccccacgauccagaaggacgugcuggagugcaacgucaagaccaccgagguggugggcgacaucauccugaagccggccaacaacucccucaagaucaccgaggaggucgggcacacggaccugauggccgcguacguggacaacagcucccugaccaucaagaagcccaacgagcucagccgcgugcugggccugaagacccucgccacccacgggcuggccgccgucaacuccgugcccugggacacgaucgccaacuacgcgaagccguuccugaacaagguggucagcaccaccaccaacaucgugacgcgcugccucaaccgggugugcaccaacuacaugcccuacuucuucacccugcugcuccagcugugcaccuucacccgcuccacgaacagccggaucaaggccuccaugcccaccaccaucgccaagaacaccgucaagagcgugggcaaguucugccuggaggccagcuucaacuaccucaagucccccaacuucagcaagcugaucaacaucaucaucugguuccugcuccuguccgugugccugggcagccucaucuacuccacggccgcgcuggggguccugaugagcaaccucggcaugccguccuacugcaccggguaccgcgagggcuaccugaacagcaccaacgugaccaucgccacguacugcaccggcuccauccccugcagcgugugccuguccgggcucgacagccuggacaccuaccccucccuggagaccauccagaucacgaucagcuccuucaagugggaccucaccgccuucggccuggucgccgagugguuccuggccuacauccucuucacccgguucuucuacgugcuggggcuggcggccaucaugcagcucuucuucagcuacuucgccgugcacuucaucuccaacagcuggcugauguggcugaucaucaaccugguccagauggcccccaucuccgcgauggugcgcauguacaucuucuucgccagcuucuacuacguguggaagagcuacguccacgugguggacggcugcaacuccagcaccugcaugaugugcuacaagcggaaccgcgccacgcgggucgagugcaccaccaucgugaacgggguccgccgguccuucuacguguacgccaacggcggcaagggguucugcaagcuccacaacuggaacugcgugaacugcgacaccuucugcgccggcagcacguucaucuccgacgaggucgcgcgcgaccugagccugcaguucaagcggccgaucaaccccaccgaccaguccagcuacaucguggacuccgugaccgucaagaacgggagcauccaccucuacuucgacaaggccggccagaagaccuacgagcgccacucccugagccacuucgugaaccuggacaaccuccgggccaacaacacgaaggggucccugcccaucaacgugaucgucuucgacggcaagagcaagugcgaggaguccagcgccaaguccgccagcguguacuacucccagcugaugugccagcccauccuccugcuggaccaggcgcucgugagcgacgucggcgacagcgccgagguggccgugaagauguucgacgccuacgucaacaccuucuccagcaccuucaacgugccgauggagaagcugaagacccugguggccacggcggaggccgagcucgccaagaacgucucccuggacaacgugcugagcaccuucaucuccgccgcgcgccagggguucguggacagcgacgucgagaccaaggacgugguggagugccucaagcugucccaccagagcgacaucgaggucaccggcgacuccugcaacaacuacaugcugacguacaacaagguggagaacaugaccccccgggacuucggggccugcaucgacugcagcgcccgccacaucaacgcccagguggccaagucccacaacaucgcgcucaucuggaacgucaaggacuucaugagccuguccgagcagcugcggaagcagauccgcagcgccgccaagaagaacaaccuccccuucaagcugaccugcgccaccacgcgccagguggugaacgucgugaccaccaagaucgcccugaagggcggguga

SEQ ID NO: 17807 - RNA, 5841 nt, Artificial Sequence
  SARS-CoV-2__MT834668.1__non-structural protein 3 (NSP3) CDS gc
auggcccccaccaaggugaccuucggcgacgacacggucaucgaggugcagggguacaagagcgugaacaucaccuucgagcuggacgagcgcaucgacaagguccucaacgagaagugcuccgccuacaccguggagcugggcaccgaggugaacgaguucgcgugcgucguggccgacgccgugaucaagacgcugcagccggucagcgagcuccugaccccccuggggaucgaccucgacgagugguccauggccaccuacuaccuguucgacgagagcggcgaguucaagcuggccucccacauguacugcagcuucuacccccccgacgaggacgaggaggagggggacugcgaggaggaggaguucgagccguccacccaguacgaguacggcacggaggacgacuaccagggcaagccccucgaguucggggcgaccagcgccgcccugcagcccgaggaggagcaggaggaggacuggcuggacgacgacucccagcagaccgugggccagcaggacgggagcgaggacaaccagaccacgaccauccagaccaucguggagguccagccccagcucgagauggagcugaccccgguggugcagacgaucgaggucaacuccuucagcggcuaccugaagcucaccgacaacguguacaucaagaacgccgacaucguggaggaggcgaagaaggucaagcccaccgugguggucaacgccgccaacguguaccugaagcacgggggcggcguggccggggcccugaacaaggcgaccaacaacgccaugcaggucgaguccgacgacuacaucgccacgaacggcccccucaagguggggggcagcugcguccuguccggccacaaccuggccaagcacugccuccacgugguggggcccaacgucaacaagggcgaggacauccagcugcugaagagcgccuacgagaacuucaaccagcacgaggugcuccuggcgccgcugcucuccgccgggaucuucggcgccgaccccauccacagccugcgggugugcgucgacaccgugcgcaccaacguguaccuggccgucuucgacaagaaccucuacgacaagcugguguccagcuuccuggagaugaagagcgagaagcagguggagcagaagaucgccgagauccccaaggaggaggucaagcccuucaucaccgaguccaagccgagcguggagcagcggaagcaggacgacaagaagaucaaggcgugcguggaggaggucacgaccacccucgaggagaccaaguuccugacggagaaccugcuccuguacaucgacaucaacgggaaccugcaccccgacuccgccacccucgugagcgacaucgacaucaccuuccugaagaaggacgcccccuacaucgugggcgacgucgugcaggagggcgugcugaccgccgucgugauccccacgaagaaggccgggggcaccaccgagaugcucgcgaaggcccugcgcaaggugccgaccgacaacuacaucacgaccuaccccgggcagggccugaacggguacaccgucgaggaggccaagaccgugcucaagaagugcaaguccgccuucuacauccugcccagcaucaucuccaacgagaagcaggagauccugggcaccgugagcuggaaccuccgggagaugcuggcgcacgccgaggagacgcgcaagcugaugcccgucugcguggagaccaaggccaucguguccaccauccagcggaaguacaagggcaucaagauccaggagggggucguggacuacggcgcccgcuucuacuucuacaccagcaagacgaccguggccucccugaucaacacccucaacgaccugaacgagacccuggucacgaugccgcucggguacgugacccacggccugaaccuggaggaggcggcccgguacaugcgcagccucaaggugcccgccaccgucuccgugagcucccccgacgccgugaccgccuacaacggguaccugacgagcuccagcaagacccccgaggagcacuucaucgagaccaucucccuggcgggcagcuacaaggacuggagcuacuccggccagagcacccagcucgggaucgaguuccugaagcggggcgacaaguccgucuacuacacgagcaacccgaccaccuuccaccuggacggggaggugaucaccuucgacaaccucaagacgcugcugucccuccgcgaggugcggaccaucaaggucuucaccaccguggacaacaucaaccugcacacgcagguggucgacaugagcaugaccuacggccagcaguucggccccaccuaccuggacggggccgacgugaccaagaucaagucccacaacagccacgagggcaagacguucuacgugcuccccaacgacgacacccugcgcgucgaggccuucgaguacuaccacaccaccgacccguccuuccuggggcgguacaugagcgcccucaaccacacgaagaaguggaaguacccccaggugaacggccugaccuccaucaagugggccgacaacaacugcuaccuggcgaccgcccuccugacccugcagcagaucgagcucaaguucaacccccccgcccugcaggacgccuacuaccgcgcgcgggccggggaggccgccaacuucugcgcccugauccucgcguacugcaacaagacggugggcgagcugggcgacguccgcgagaccaugagcuaccuguuccagcacgccaaccucgacuccugcaagcgggugcugaacgucgugugcaagaccugcgggcagcagcagaccacccugaagggcguggaggccgucauguacauggggacgcucagcuacgagcaguucaagaagggcgugcagaucccgugcaccugcgggaagcaggccaccaaguaccuggugcagcaggagucccccuucgucaugaugagcgccccccccgcgcaguacgagcugaagcacggcaccuucacgugcgccuccgaguacaccggcaacuaccagugcgggcacuacaagcacaucaccagcaaggagacccucuacugcaucgacggcgcccugcugacgaagagcuccgaguacaaggggccgaucaccgacguguucuacaaggagaacagcuacaccaccacgaucaagcccgugaccuacaagcucgacggcgucgugugcaccgagaucgaccccaagcuggacaacuacuacaagaaggacaacuccuacuucaccgagcagcccaucgaccuggugccgaaccagcccuaccccaacgccagcuucgacaacuucaaguucgucugcgacaacaucaaguucgccgacgaccucaaccagcugacgggguacaagaagcccgcgucccgcgagcugaaggugaccuucuucccggaccucaacggcgacguggucgccaucgacuacaagcacuacacccccagcuucaagaagggcgccaagcugcugcacaagcccaucguguggcacgugaacaacgccaccaacaaggcgacguacaagcccaacaccuggugcauccggugccucugguccaccaagccggucgagaccagcaacuccuucgacgugcugaagagcgaggacgcccaggggauggacaaccuggccugcgaggaccucaagcccguguccgaggaggucguggagaaccccacgauccagaaggacgugcuggagugcaacgucaagaccaccgagguggugggcgacaucauccugaagcccgccaacaacagccucaagaucaccgaggaggucgggcacacggaccugauggccgcguacguggacaacuccagccugaccaucaagaagccgaacgagcucucccgcgugcugggccugaagacccucgccacccacgggcuggccgccgucaacagcgugcccugggacacgaucgccaacuacgcgaagcccuuccugaacaagguggucuccaccaccaccaacaucgugacgcgcugccucaaccgggugugcaccaacuacaugccguacuucuucacccugcugcuccagcugugcaccuucacccgcagcacgaacucccggaucaaggccagcaugcccaccaccaucgccaagaacaccgucaagagcgugggcaaguucugccuggaggccuccuucaacuaccucaagagccccaacuucuccaagcugaucaacaucaucaucugguuccugcuccugagcgugugccugggcucccucaucuacagcacggccgcgcuggggguccugauguccaaccucggcaugcccagcuacugcaccggguaccgcgagggcuaccugaacuccaccaacgugaccaucgccacguacugcaccggcagcaucccgugcuccgugugccugagcgggcucgacucccuggacaccuaccccagccuggagaccauccagaucacgaucuccagcuucaagugggaccucaccgccuucggccuggucgccgagugguuccuggccuacauccucuucacccgguucuucuacgugcuggggcuggcggccaucaugcagcucuucuucuccuacuucgccgugcacuucaucagcaacuccuggcugauguggcugaucaucaaccugguccagauggcccccaucagcgcgauggugcgcauguacaucuucuucgccagcuucuacuacguguggaaguccuacguccacgugguggacggcugcaacagcuccaccugcaugaugugcuacaagcggaaccgcgccacgcgggucgagugcaccaccaucgugaacgggguccgccggagcuucuacguguacgccaacggcggcaagggguucugcaagcuccacaacuggaacugcgugaacugcgacaccuucugcgccggcuccacguucaucagcgacgaggucgcgcgcgaccugucccugcaguucaagcggcccaucaacccgaccgaccagagcuccuacaucguggacagcgugaccgucaagaacggguccauccaccucuacuucgacaaggccggccagaagaccuacgagcgccacagccugucccacuucgugaaccuggacaaccuccgggccaacaacacgaaggggagccugcccaucaacgugaucgucuucgacggcaaguccaagugcgaggagagcuccgccaagagcgccuccguguacuacagccagcugaugugccagcccauccuccugcuggaccaggcgcucgugagcgacgucggcgacuccgccgagguggccgugaagauguucgacgccuacgucaacaccuucagcuccaccuucaacgugcccauggagaagcugaagacccugguggccacggcggaggccgagcucgccaagaacgucagccuggacaacgugcuguccaccuucaucagcgccgcgcgccagggguucguggacuccgacgucgagaccaaggacgugguggagugccucaagcugagccaccaguccgacaucgaggucaccggcgacagcugcaacaacuacaugcugacguacaacaagguggagaacaugaccccgcgggaccucggggccugcaucgacugcuccgcccgccacaucaacgcccagguggccaagagccacaacaucgcgcugaucuggaacgucaaggacuucaugucccugagcgagcagcuccggaagcagauccgcuccgccgccaagaagaacaaccugcccuucaagcugaccugcgccaccacgcgccagguggugaacgucgugaccaccaagaucgcccucaagggcggguga

SEQ ID NO: 17808 - RNA, 5841 nt, Artificial Sequence
  SARS-CoV-2__MT834697.1__non-structural protein 3 (NSP3) CDS gc
auggcccccaccaaggugaccuucggcgacgacacggucaucgaggugcagggguacaagagcgugaacaucaccuucgagcuggacgagcgcaucgacaagguccucaacgagaagugcuccgccuacaccguggagcugggcaccgaggugaacgaguucgcgugcgucguggccgacgccgugaucaagacgcugcagccggucagcgagcuccugaccccccuggggaucgaccucgacgagugguccauggccaccuacuaccuguucgacgagagcggcgaguucaagcuggccucccacauguacugcagcuucuacccccccgacgaggacgaggaggagggggacugcgaggaggaggaguucgagccguccacccaguacgaguacggcacggaggacgacuaccagggcaagccccucgaguucggggcgaccagcgccgcccugcagcccgaggaggagcaggaggaggacuggcuggacgacgacucccagcagaccgugggccagcaggacgggagcgaggacaaccagaccacgaccauccagaccaucguggagguccagccccagcucgagauggagcugaccccgguggugcagacgaucgaggucaacuccuucagcggcuaccugaagcucaccgacaacguguacaucaagaacgccgacaucguggaggaggcgaagaaggucaagcccaccgugguggucaacgccgccaacguguaccugaagcacgggggcggcguggccggggcccugaacaaggcgaccaacaacgccaugcaggucgaguccgacgacuacaucgccacgaacggcccccucaagguggggggcagcugcguccuguccggccacaaccuggccaagcacugccuccacgugguggggcccaacgucaacaagggcgaggacauccagcugcugaagagcgccuacgagaacuucaaccagcacgaggugcuccuggcgccgcugcucuccgccgggaucuucggcgccgaccccauccacagccugcgggugugcgucgacaccgugcgcaccaacguguaccuggccgucuucgacaagaaccucuacgacaagcugguguccagcuuccuggagaugaagagcgagaagcagguggagcagaagaucgccgagauccccaaggaggaggucaagcccuucaucaccgaguccaagccgagcguggagcagcggaagcaggacgacaagaagaucaaggcgugcguggaggaggucacgaccacccucgaggagaccaaguuccugacggagaaccugcuccuguacaucgacaucaacgggaaccugcaccccgacuccgccacccucgugagcgacaucgacaucaccuuccugaagaaggacgcccccuacaucgugggcgacgucgugcaggagggcgugcugaccgccgucgugauccccacgaagaaggccgggggcaccaccgagaugcucgcgaaggcccugcgcaaggugccgaccgacaacuacaucacgaccuaccccgggcagggccugaacggguacaccgucgaggaggccaagaccgugcucaagaagugcaaguccgccuucuacauccugcccagcaucaucuccaacgagaagcaggagauccugggcaccgugagcuggaaccuccgggagaugcuggcgcacgccgaggagacgcgcaagcugaugcccgucugcguggagaccaaggccaucguguccaccauccagcggaaguacaagggcaucaagauccaggagggggucguggacuacggcgcccgcuucuacuucuacaccagcaagacgaccguggccucccugaucaacacccucaacgaccugaacgagacccuggucacgaugccgcucggguacgugacccacggccugaaccuggaggaggcggcccgguacaugcgcagccucaaggugcccgccaccgucuccgugagcucccccgacgccgugaccgccuacaacggguaccugacgagcuccagcaagacccccgaggagcacuucaucgagaccaucucccuggcgggcagcuacaaggacuggagcuacuccggccagagcacccagcucgggaucgaguuccugaagcggggcgacaaguccgucuacuacacgagcaacccgaccaccuuccaccuggacggggaggugaucaccuucgacaaccucaagacgcugcugucccuccgcgaggugcggaccaucaaggucuucaccaccguggacaacaucaaccugcacacgcagguggucgacaugagcaugaccuacggccagcaguucggccccaccuaccuggacggggccgacgugaccaagaucaagccccacaacucccacgagggcaagacguucuacgugcucccgaacgacgacacccugcgcgucgaggccuucgaguacuaccacaccaccgaccccagcuuccuggggcgguacauguccgcccucaaccacacgaagaaguggaaguacccccaggugaacggccugaccagcaucaagugggccgacaacaacugcuaccuggcgaccgcccuccugacccugcagcagaucgagcucaaguucaaccccccggcccugcaggacgccuacuaccgcgcgcgggccggggaggccgccaacuucugcgcccugauccucgcguacugcaacaagacggugggcgagcugggcgacguccgcgagaccauguccuaccuguuccagcacgccaaccucgacagcugcaagcgggugcugaacgucgugugcaagaccugcgggcagcagcagaccacccugaagggcguggaggccgucauguacauggggacgcucuccuacgagcaguucaagaagggcgugcagauccccugcaccugcgggaagcaggccaccaaguaccuggugcagcaggagagccccuucgucaugauguccgcccccccggcgcaguacgagcugaagcacggcaccuucacgugcgccagcgaguacaccggcaacuaccagugcgggcacuacaagcacaucaccuccaaggagacccucuacugcaucgacggcgcccugcugacgaagagcagcgaguacaaggggcccaucaccgacguguucuacaaggagaacuccuacaccaccacgaucaagcccgugaccuacaagcucgacggcgucgugugcaccgagaucgaccccaagcuggacaacuacuacaagaaggacaacagcuacuucaccgagcagccgaucgaccuggugcccaaccagcccuaccccaacgccaucuucgacaacuucaaguucgucugcgacaacaucaaguucgccgacgaccucaaccagcugacgggguacaagaagccggcgucccgcgagcugaaggugaccuucuuccccgaccucaacggcgacguggucgccaucgacuacaagcacuacacccccagcuucaagaagggcgccaagcugcugcacaagcccaucguguggcacgugaacaacgccaccaacaaggcgacguacaagccgaacaccuggugcauccggugccucugguccaccaagcccgucgagaccagcaacuccuucgacgugcugaagagcgaggacgcccaggggauggacaaccuggccugcgaggaccucaagcccguguccgaggaggucguggagaaccccacgauccagaaggacgugcuggagugcaacgucaagaccaccgagguggugggcgacaucauccugaagccggccaacaacagccucaagaucaccgaggaggucgggcacacggaccugauggccgcguacguggacaacuccagccugaccaucaagaagcccaacgagcucucccgcgugcugggccugaagacccucgccacccacgggcuggccgccgucaacagcgugcccugggacacgaucgccaacuacgcgaagccguuccugaacaagguggucuccaccaccaccaacaucgugacgcgcugccucaaccgggugugcaccaacuacaugcccuacuucuucacccugcugcuccagcugugcaccuucacccgcagcacgaacucccggaucaaggccagcaugcccaccaccaucgccaagaacaccgucaaguccgugggcaaguucugccuggaggccagcuucaacuaccucaagagccccaacuucuccaagcugaucaacaucaucaucugguuccugcuccugagcgugugccugggcucccucaucuacagcacggccgcgcuggggguccugauguccaaccucggcaugccgagcuacugcaccggguaccgcgagggcuaccugaacuccaccaacgugaccaucgccacguacugcaccggcagcauccccugcuccgugugccugagcgggcucgacucccuggacaccuaccccagccuggagaccauccagaucacgaucuccagcuucaagugggaccucaccgccuucggccuggucgccgagugguuccuggccuacauccucuucacccgguucuucuacgugcuggggcuggcggccaucaugcagcucuucuucuccuacuucgccgugcacuucaucagcaacuccuggcugauguggcugaucaucaaccugguccagauggcccccaucagcgcgauggugcgcauguacaucuucuucgccuccuucuacuacguguggaagagcuacguccacgugguggacggcugcaacagcuccaccugcaugaugugcuacaagcggaaccgcgccacgcgggucgagugcaccaccaucgugaacgggguccgccggagcuucuacguguacgccaacggcggcaagggguucugcaagcuccacaacuggaacugcgugaacugcgacaccuucugcgccggcuccacguucaucagcgacgaggucgcgcgcgaccugucccugcaguucaagcggccgaucaaccccaccgaccagagcuccuacaucguggacagcgugaccgucaagaacggguccauccaccucuacuucgacaaggccggccagaagaccuacgagcgccacagccugucccacuucgugaaccuggacaaccuccgggccaacaacacgaaggggagccugcccaucaacgugaucgucuucgacggcaaguccaagugcgaggagagcuccgccaagagcgccuccguguacuacagccagcugaugugccagcccauccuccugcuggaccaggcgcucguguccgacgucggcgacagcgccgagguggccgugaagauguucgacgccuacgucaacaccuucagcuccaccuucaacgugccgauggagaagcugaagacccugguggccacggcggaggccgagcucgccaagaacgucagccuggacaacgugcuguccaccuucaucagcgccgcgcgccagggguucguggacuccgacgucgagaccaaggacgugguggagugccucaagcugagccaccaguccgacaucgaggucaccggcgacagcugcaacaacuacaugcugacguacaacaagguggagaacaugaccccccgggaccucggggccugcaucgacugcuccgcccgccacaucaacgcccagguggccaagagccacaacaucgcgcugaucuggaacgucaaggacuucaugucccugagcgagcagcuccggaagcagauccgcuccgccgccaagaagaacaaccugcccuucaagcugaccugcgccaccacgcgccagguggugaacgucgugaccaccaagaucgcccucaagggcggguga

SEQ ID NO: 17809 - RNA, 5841 nt, Artificial Sequence
  SARS-CoV-2__MT834733.1__non-structural protein 3 (NSP3) CDS gc
auggcccccaccaaggugaccuucggcgacgacacggucaucgaggugcagggguacaagagcgugaacaucaccuucgagcuggacgagcgcaucgacaagguccucaacgagaagugcuccgccuacaccguggagcugggcaccgaggugaacgaguucgcgugcgucguggccgacgccgugaucaagacgcugcagccggucagcgagcuccugaccccccuggggaucgaccucgacgagugguccauggccaccuacuaccuguucgacgagagcggcgaguucaagcuggccucccacauguacugcagcuucuacccccccgacgaggacgaggaggagggggacugcgaggaggaggaguucggcccguccacccaguacgaguacggcacggaggacgacuaccaggggaagccccucgaguucggcgcgaccagcgccgcccugcagcccgaggaggagcaggaggaggacuggcuggacgacgacucccagcagaccguggggcagcaggacggcagcgaggacaaccagaccacgaccauccagaccaucguggagguccagccccagcucgagauggagcugaccccgguggugcagacgaucgaggucaacuccuucagcggguaccugaagcucaccgacaacguguacaucaagaacgccgacaucguggaggaggcgaagaaggucaagcccaccgugguggucaacgccgccaacguguaccugaagcacggcggcgggguggccggcgcccugaacaaggcgaccaacaacgccaugcaggucgaguccgacgacuacaucgccacgaacgggccccucaaggugggcggcagcugcguccuguccgggcacaaccuggccaagcacugccuccacguggugggccccaacgucaacaagggggaggacauccagcugcugaagagcgccuacgagaacuucaaccagcacgaggugcuccuggcgccgcugcucuccgccggcaucuucggggccgaccccauccacagccugcgggugugcgucgacaccgugcgcaccaacguguaccuggccgucuucgacaagaaccucuacgacaagcugguguccagcuuccuggagaugaagagcgagaagcagguggagcagaagaucgccgagauccccaaggaggaggucaagcccuucaucaccgaguccaagccgagcguggagcagcggaagcaggacgacaagaagaucaaggcgugcguggaggaggucacgaccacccucgaggagaccaaguuccugacggagaaccugcuccuguacaucgacaucaacggcaaccugcaccccgacuccgccacccucgugagcgacaucgacaucaccuuccugaagaaggacgcccccuacaucgugggcgacgucgugcaggagggggugcugaccgccgucgugauccccacgaagaaggccggcgggaccaccgagaugcucgcgaaggcccugcgcaaggugccgaccgacaacuacaucacgaccuaccccggccaggggcugaacggcuacaccgucgaggaggccaagaccgugcucaagaagugcaaguccgccuucuacauccugcccagcaucaucuccaacgagaagcaggagauccugggcaccgugagcuggaaccuccgggagaugcuggcgcacgccgaggagacgcgcaagcugaugcccgucugcguggagaccaaggccaucguguccaccauccagcggaaguacaaggggaucaagauccaggagggcgucguggacuacggggcccgcuucuacuucuacaccagcaagacgaccguggccucccugaucaacacccucaacgaccugaacgagacccuggucacgaugccgcucggcuacgugacccacgggcugaaccuggaggaggcggcccgguacaugcgcagccucaaggugcccgccaccgucuccgugagcucccccgacgccgugaccgccuacaacggcuaccugacgagcuccagcaagacccccgaggagcacuucaucgagaccaucucccuggcgggcagcuacaaggacuggagcuacuccgggcagagcacccagcucggcaucgaguuccugaagcggggggacaaguccgucuacuacacgagcaacccgaccaccuuccaccuggacggcgaggugaucaccuucgacaaccucaagacgcugcugucccuccgcgaggugcggaccaucaaggucuucaccaccguggacaacaucaaccugcacacgcagguggucgacaugagcaugaccuacggccagcaguucgggcccaccuaccuggacggcgccgacgugaccaagaucaagccccacaacucccacgaggggaagacguucuacgugcucccgaacgacgacacccugcgcgucgaggccuucgaguacuaccacaccaccgaccccagcuuccugggccgguacauguccgcccucaaccacacgaagaaguggaaguacccccaggugaacgggcugaccagcaucaagugggccgacaacaacugcuaccuggcgaccgcccuccugacccugcagcagaucgagcucaaguucaaccccccggcccugcaggacgccuacuaccgcgcgcgggccggcgaggccgccaacuucugcgcccugauccucgcguacugcaacaagacggugggcgagcugggggacguccgcgagaccauguccuaccuguuccagcacgccaaccucgacagcugcaagcgggugcugaacgucgugugcaagaccugcggccagcagcagaccacccugaaggggguggaggccgucauguacaugggcacgcucuccuacgagcaguucaagaagggggugcagauccccugcaccugcggcaagcaggccaccaaguaccuggugcagcaggagagccccuucgucaugauguccgcccccccggcgcaguacgagcugaagcacggcaccuucacgugcgccagcgaguacaccgggaacuaccagugcggccacuacaagcacaucaccuccaaggagacccucuacugcaucgacggggcccugcugacgaagagcagcgaguacaagggccccaucaccgacguguucuacaaggagaacuccuacaccaccacgaucaagcccgugaccuacaagcucgacggggucgugugcaccgagaucgaccccaagcuggacaacuacuacaagaaggacaacagcuacuucaccgagcagccgaucgaccuggugcccaaccagcccuaccccaacgccuccuucgacaacuucaaguucgucugcgacaacaucaaguucgccgacgaccucaaccagcugacgggcuacaagaagccggcgagccgcgagcugaaggugaccuucuuccccgaccucaacggcgacguggucgccaucgacuacaagcacuacacccccuccuucaagaagggggccaagcugcugcacaagcccaucguguggcacgugaacaacgccaccaacaaggcgacguacaagccgaacaccuggugcauccggugccucuggagcaccaagcccgucgagaccuccaacagcuucgacgugcugaaguccgaggacgcccagggcauggacaaccuggccugcgaggaccucaagcccgugagcgaggaggucguggagaaccccacgauccagaaggacgugcuggagugcaacgucaagaccaccgagguggugggggacaucauccugaagccggccaacaacucccucaagaucaccgaggaggucggccacacggaccugauggccgcguacguggacaacagcucccugaccaucaagaagcccaacgagcucagccgcgugcuggggcugaagacccucgccacccacggccuggccgccgucaacuccgugcccugggacacgaucgccaacuacgcgaagccguuccugaacaagguggucagcaccaccaccaacaucgugacgcgcugccucaaccgggugugcaccaacuacaugcccuacuucuucacccugcugcuccagcugugcaccuucacccgcuccacgaacagccggaucaaggccuccaugcccaccaccaucgccaagaacaccgucaagagcgugggcaaguucugccuggaggccagcuucaacuaccucaagucccccaacuucagcaagcugaucaacaucaucaucugguuccugcuccuguccgugugccuggggagccucaucuacuccacggccgcgcugggcguccugaugagcaaccucgggaugccguccuacugcaccggcuaccgcgagggcuaccugaacagcaccaacgugaccaucgccacguacugcaccggguccauccccugcagcgugugccuguccggccucgacagccuggacaccuaccccucccuggagaccauccagaucacgaucagcuccuucaagugggaccucaccgccuucgggcuggucgccgagugguuccuggccuacauccucuucacccgguucuucuacgugcugggccuggcggccaucaugcagcucuucuucagcuacuucgccgugcacuucaucuccaacagcuggcugauguggcugaucaucaaccugguccagauggcccccaucuccgcgauggugcgcauguacaucuucuucgccagcuucuacuacguguggaagagcuacguccacgugguggacgggugcaacuccagcaccugcaugaugugcuacaagcggaaccgcgccacgcgggucgagugcaccaccaucgugaacggcguccgccgguccuucuacguguacgccaacggcgggaagggcuucugcaagcuccacaacuggaacugcgugaacugcgacaccuucugcgccgggagcacguucaucuccgacgaggucgcgcgcgaccugagccugcaguucaagcggccgaucaaccccaccgaccaguccagcuacaucguggacuccgugaccgucaagaacggcagcauccaccucuacuucgacaaggccgggcagaagaccuacgagcgccacucccugagccacuucgugaaccuggacaaccuccgggccaacaacacgaagggcucccugcccaucaacgugaucgucuucgacggcaagagcaagugcgaggaguccagcgccaaguccgccagcguguacuacucccagcugaugugccagcccauccuccugcuggaccaggcgcucgugagcgacgucggggacagcgccgagguggccgugaagauguucgacgccuacgucaacaccuucuccagcaccuucaacgugccgauggagaagcugaagacccugguggccacggcggaggccgagcucgccaagaacgucucccuggacaacgugcugagcaccuucaucuccgccgcgcgccagggcuucguggacagcgacgucgagaccaaggacgugguggagugccucaagcugucccaccagagcgacaucgaggucaccggggacuccugcaacaacuacaugcugacguacaacaagguggagaacaugaccccccgggaccucggcgccugcaucgacugcagcgcccgccacaucaacgcccagguggccaagucccacaacaucgcgcugaucuggaacgucaaggacuucaugagccuguccgagcagcuccggaagcagauccgcagcgccgccaagaagaacaaccugcccuucaagcugaccugcgccaccacgcgccagguggugaacgucgugaccaccaagaucgcccucaaggggggcuga

SEQ ID NO: 17810 - RNA, 5841 nt, Artificial Sequence
  SARS-CoV-2__MT704820.1__non-structural protein 3 (NSP3) CDS gc
auggcccccaccaaggugaccuucggcgacgacacggucaucgaggugcagggguacaagagcgugaacaucaccuucgagcuggacgagcgcaucgacaagguccucaacgagaagugcuccgccuacaccguggagcugggcaccgaggugaacgaguucgcgugcgucguggccgacgccgugaucaagacgcugcagccggucagcgagcuccugaccccccuggggaucgaccucgacgagugguccauggccaccuacuaccuguucgacgagagcggcgaguucaagcuggccucccacauguacugcagcuucuacccccccgacgaggacgaggaggagggggacugcgaggaggaggaguucgagccguccacccaguacgaguacggcacggaggacgacuaccagggcaagccccucgaguucggggcgaccagcgccgcccugcagcccgaggaggagcaggaggaggacuggcuggacgacgacucccagcagaccgugggccagcaggacgggagcgaggacaaccagaccacgaccauccagaccaucguggagguccagccccagcucgagauggagcugaccccgguggugcagacgaucgaggucaacuccuucagcggcuaccugaagcucaccgacaacguguacaucaagaacgccgacaucguggaggaggcgaagaaggucaagcccaccgugguggucaacgccgccaacguguaccugaagcacgggggcggcguggccggggcccugaacaaggcgaccaacaacgccaugcaggucgaguccgacgacuacaucgccacgaacggcccccucaagguggggggcagcugcguccuguccggccacaaccuggccaagcacugccuccacgugguggggcccaacgucaacaagggcgaggacauccagcugcugaagagcgccuacgagaacuucaaccagcacgaggugcuccuggcgccgcugcucuccgccgggaucuucggcgccgaccccauccacagccugcgggugugcgucgacaccgugcgcaccaacguguaccuggccgucuucgacaagaaccucuacgacaagcugguguccagcuuccuggagaugaagagcgagaagcagguggagcagaagaucgccgagauccccaaggaggaggucaagcccuucaucaccgaguccaagccgagcguggagcagcggaagcaggacgacaacaagaucaaggcgugcguggaggaggucacgaccacccucgaggagaccaaguuccugacggagaaccugcuccuguacaucgacaucaacgggaaccugcaccccgacuccgccacccucgugagcgacaucgacaucaccuuccugaagaaggacgcccccuacaucgugggcgacgucgugcaggagggcgugcugaccgccgucgugauccccacgaagaaggccgggggcaccaccgagaugcucgcgaaggcccugcgcaaggugccgaccgacaacuacaucacgaccuaccccgggcagggccugaacggguacaccgucgaggaggccaagaccgugcucaagaagugcaaguccgccuucuacauccugcccagcaucaucuccaacgagaagcaggagauccugggcaccgugagcuggaaccuccgggagaugcuggcgcacgccgaggagacgcgcaagcugaugcccgucugcguggagaccaaggccaucguguccaccauccagcggaaguacaagggcaucaagauccaggagggggucguggacuacggcgcccgcuucuacuucuacaccagcaagacgaccguggccucccugaucaacacccucaacgaccugaacgagacccuggucacgaugccgcucggguacgugacccacggccugaaccuggaggaggcggcccgguacaugcgcagccucaaggugcccgccaccgucuccgugagcucccccgacgccgugaccgccuacaacggguaccugacgagcuccagcaagacccccgaggagcacuucaucgagaccaucucccuggcgggcagcuacaaggacuggagcuacuccggccagagcacccagcucgggaucgaguuccugaagcggggcgacaaguccgucuacuacacgagcaacccgaccaccuuccaccuggacggggaggugaucaccuucgacaaccucaagacgcugcugucccuccgcgaggugcggaccaucaaggucuucaccaccguggacaacaucaaccugcacacgcagguggucgacaugagcaugaccuacggccagcaguucggccccaccuaccuggacggggccgacgugaccaagaucaagccccacaacucccacgagggcaagacguucuacgugcucccgaacgacgacacccugcgcgucgaggccuucgaguacuaccacaccaccgaccccagcuuccuggggcgguacauguccgcccucaaccacacgaagaaguggaaguacccccaggugaacggccugaccagcaucaagugggccgacaacaacugcuaccuggcgaccgcccuccugacccugcagcagaucgagcucaaguucaaccccccggcccugcaggacgccuacuaccgcgcgcgggccggggaggccgccaacuucugcgcccugauccucgcguacugcaacaagacggugggcgagcugggcgacguccgcgagaccauguccuaccuguuccagcacgccaaccucgacagcugcaagcgggugcugaacgucgugugcaagaccugcgggcagcagcagaccacccugaagggcguggaggccgucauguacauggggacgcucuccuacgagcaguucaagaagggcgugcagauccccugcaccugcgggaagcaggccaccaaguaccuggugcagcaggagagccccuucgucaugauguccgcccccccggcgcaguacgagcugaagcacggcaccuucacgugcgccagcgaguacaccggcaacuaccagugcgggcacuacaagcacaucaccuccaaggagacccucuacugcaucgacggcgcccugcugacgaagagcagcgaguacaaggggcccaucaccgacguguucuacaaggagaacuccuacaccaccacgaucaagcccgugaccuacaagcucgacggcgucgugugcaccgagaucgaccccaagcuggacaacuacuacaagaaggacaacagcuacuucaccgagcagccgaucgaccuggugcccaaccagcccuaccccaacgccuccuucgacaacuucaaguucgucugcgacaacaucaaguucgccgacgaccucaaccagcugacgggguacaagaagccggcgagccgcgagcugaaggugaccuucuuccccgaccucaacggcgacguggucgccaucgacuacaagcacuacacccccuccuucaagaagggcgccaagcugcugcacaagcccaucguguggcacgugaacaacgccaccaacaaggcgacguacaagccgaacaccuggugcauccggugccucuggagcaccaagcccgucgagaccuccaacagcuucgacgugcugaaguccgaggacgcccaggggauggacaaccuggccugcgaggaccucaagcccgugagcgaggaggucguggagaaccccacgauccagaaggacgugcuggagugcaacgucaagaccaccgagguggugggcgacaucauccugaagccggccaacaacucccucaagaucaccgaggaggucgggcacacggaccugauggccgcguacguggacaacagcucccugaccaucaagaagcccaacgagcucagccgcgugcugggccugaagacccucgccacccacgggcuggccgccgucaacuccgugcccugggacacgaucgccaacuacgcgaagccguuccugaacaagguggucagcaccaccaccaacaucgugacgcgcugccucaaccgggugugcaccaacuacaugcccuacuucuucacccugcugcuccagcugugcaccuucacccgcuccacgaacagccggaucaaggccuccaugcccaccaccaucgccaagaacaccgucaagagcgugggcaaguucugccuggaggccagcuucaacuaccucaagucccccaacuucagcaagcugaucaacaucaucaucugguuccugcuccuguccgugugccugggcagccucaucuacuccacggccgcgcuggggguccugaugagcaaccucggcaugccguccuacugcaccggguaccgcgagggcuaccugaacagcaccaacgugaccaucgccacguacugcaccggcuccauccccugcagcgugugccuguccgggcucgacagccuggacaccuaccccucccuggagaccauccagaucacgaucagcuccuucaagugggaccucaccgccuucggccuggucgccgagugguuccuggccuacauccucuucacccgguucuucuacgugcuggggcuggcggccaucaugcagcucuucuucagcuacuucgccgugcacuucaucuccaacagcuggcugauguggcugaucaucaaccugguccagauggcccccaucuccgcgauggugcgcauguacaucuucuucgccagcuucuacuacguguggaagagcuacguccacgugguggacggcugcaacuccagcaccugcaugaugugcuacaagcggaaccgcgccacgcgggucgagugcaccaccaucgugaacgggguccgccgguccuucuacguguacgccaacggcggcaagggguucugcaagcuccacaacuggaacugcgugaacugcgacaccuucugcgccggcagcacguucaucuccgacgaggucgcgcgcgaccugagccugcaguucaagcggccgaucaaccccaccgaccaguccagcuacaucguggacuccgugaccgucaagaacgggagcauccaccucuacuucgacaaggccggccagaagaccuacgagcgccacucccugagccacuucgugaaccuggacaaccuccgggccaacaacacgaaggggucccugcccaucaacgugaucgucuucgacggcaagagcaagugcgaggaguccagcgccaaguccgccagcguguacuacucccagcugaugugccagcccauccuccugcuggaccaggcgcucgugagcgacgucggcgacagcgccgagguggccgugaagauguucgacgccuacgucaacaccuucuccagcaccuucaacgugccgauggagaagcugaagacccugguggccacggcggaggccgagcucgccaagaacgucucccuggacaacgugcugagcaccuucaucuccgccgcgcgccagggguucguggacagcgacgucgagaccaaggacgugguggagugccucaagcugucccaccagagcgacaucgaggucaccggcgacuccugcaacaacuacaugcugacguacaacaagguggagaacaugaccccccgggaccucggggccugcaucgacugcagcgcccgccacaucaacgcccagguggccaagucccacaacaucgcgcugaucuggaacgucaaggacuucaugagccuguccgagcagcuccggaagcagauccgcagcgccgccaagaagaacaaccugcccuucaagcugaccugcgccaccacgcgccagguggugaacgucgugaccaccaagaucgcccucaagggcggguga

SEQ ID NO: 17811 - RNA, 5841 nt, Artificial Sequence
  SARS-CoV-2__MT827209.1__non-structural protein 3 (NSP3) CDS gc
auggcccccaccaaggugaccuucggcgacgacacggucaucgaggugcagggguacaagagcgugaacaucaccuucgagcuggacgagcgcaucgacaagguccucaacgagaagugcuccgccuacaccguggagcugggcaccgaggugaacgaguucgcgugcgucguggccgacgccgugaucaagacgcugcagccggucagcgagcuccugaccccccuggggaucgaccucgacgagugguccauggccaccuacuaccuguucgacgagagcggcgaguucaagcuggccucccacauguacugcagcuucuacccccccgacgaggacgaggaggagggggacugcgaggaggaggaguucgagccguccacccaguacgaguacggcacggaggacgacuaccagggcaagccccucgaguucggggcgaccagcgccgcccugcagcccgaggaggagcaggaggaggacuggcuggacgacgacucccagcagaccgugggccagcaggacgggagcgaggacaaccagaccacgaccauccagaccaucguggagguccagccccagcucgagauggagcugaccccgguggugcagacgaucgaggucaacuccuucagcggcuaccugaagcucaccgacaacguguacaucaagaacgccgacaucguggaggaggcgaagaaggucaagcccaccgugguggucaacgccgccaacguguaccugaagcacgggggcggcguggccggggcccugaacaaggcgaccaacaacgccaugcaggucgaguccgacgacuacaucgccacgaacggcccccucaagguggggggcagcugcguccuguccggccacaaccuggccaagcacugccuccacgugguggggcccaacgucaacaagggcgaggacauccagcugcugaagagcgccuacgagaacuucaaccagcacgaggugcuccuggcgccgcugcucuccgccgggaucuucggcgccgaccccauccacagccugcgggugugcgucgacaccgugcgcaccaacguguaccuggccgucuucgacaagaaccucuacgacaagcugguguccagcuuccuggagaugaagagcgagaagcagguggagcagaagaucgccgagauccccaaggaggaggucaagcccuucaucaccgaguccaagccgagcguggagcagcggaagcaggacgacaagaagaucaaggcgugcguggaggaggucacgaccacccucgaggagaccaaguuccugacggagaaccugcuccuguacaucgacaucaacgggaaccugcaccccgacuccgccacccucgugagcgacaucgacaucaccuuccugaagaaggacgcccccuacaucgugggcgacgucgugcaggagggcgugcugaccgccgucgugauccccacgaagaaggccgggggcaccaccgagaugcucgcgaaggcccugcgcaaggugccgaccgacaacuacaucacgaccuaccccgggcagggccugaacggguacaccgucgaggaggccaagaccgugcucaagaagugcaaguccgccuucuacauccugcccagcaucaucuccaacgagaagcaggagauccugggcaccgugagcuggaaccuccgggagaugcuggcgcacgccgaggagacgcgcaagcugaugcccgucugcguggagaccaaggccaucguguccaccauccagcggaaguacaagggcaucaagauccaggagggggucguggacuacggcgcccgcuucuacuucuacaccagcaagacgaccguggccucccugaucaacacccucaacgaccugaacgagacccuggucacgaugccgcucggguacgugacccacggccugaaccuggaggaggcggcccgguacaugcgcagccucaaggugcccgccaccgucuccgugagcucccccgacgccgugaccgccuacaacggguaccugacgagcuccagcaagacccccgaggagcacuucaucgagaccaucucccuggcgggcagcuacaaggacuggagcuacuccggccagagcacccagcucgggaucgaguuccugaagcggggcgacaaguccgucuacuacacgagcaacccgaccaccuuccaccuggacggggaggugaucaccuucgacaaccucaagacgcugcugucccuccgcgaggugcggaccaucaaggucuucaccaccguggacaacaucaaccugcacacgcagguggucgacaugagcaugaccuacggccagcaguucggccccaccuaccuggacggggccgacgugaccaagaucaagccccacaacucccacgagggcaagacguucuacgugcucccgaacgacgacacccugcgcgucgaggccuucgaguacuaccacaccaccgaccccagcuuccuggggcgguacauguccgcccucaaccacacgaagaaguggaaguacccccaggugaacggccugaccagcaucaagugggccgacaacaacugcuaccuggcgaccgcccuccugacccugcagcagaucgagcucaaguucaaccccccggcccugcaggacgccuacuaccgcgcgcgggccggggaggccgccaacuucugcgcccugauccucgcguacugcaacaagacggugggcgagcugggcgacguccgcgagaccauguccuaccuguuccagcacgccaaccucgacagcugcaagcgggugcugaacgucgugugcaagaccugcgggcagcagcagaccacccugaagggcguggaggccgucauguacauggggacgcucuccuacgagcaguucaagaagggcgugcagauccccugcaccugcgggaagcaggccaccaaguaccuggugcagcaggagagccccuucgucaugauguccgcccccccggcgcaguacgagcugaagcacggcaccuucacgugcgccagcgaguacaccggcaacuaccagugcgggcacuacaagcacaucaccuccaaggagacccucuacugcaucgacggcgcccugcugacgaagagcagcgaguacaaggggcccaucaccgacguguucuacaaggagaacuccuacaccaccacgaucaagcccgugaccuacaagcucgacggcgucgugugcaccgagaucgaccccaagcuggacaacuacuacaagaaggacaacagcuacuucaccgagcagccgaucgaccuggugcccaaccagcccuaccccaacgccuccuucgacaacuucaaguucgucugcgacaacaucaaguucgccgacgaccucaaccagcugacgggguacaagaagccggcgagccgcgagcugaaggugaccuucuuccccgaccucaacggcgacguggucgccaucgacuacaagcacuacacccccuccuucaagaagggcgccaagcugcugcacaagcccaucguguggcacgugaacaacgccaccaacaaggucacguacaagccgaacaccuggugcauccggugccucuggagcaccaagcccguggagaccuccaacagcuucgacgugcugaaguccgaggacgcgcaggggauggacaaccuggccugcgaggaccucaagcccgucagcgaggaggugguggagaaccccacgauccagaaggacguccuggagugcaacgugaagaccaccgagguggucggcgacaucauccugaagccggccaacaacucccucaagaucaccgaggagguggggcacacggaccugauggccgccuacguggacaacagcucccugaccaucaagaagcccaacgagcucagccgcguccugggccugaagacccucgcgacccacgggcuggccgccgugaacuccgugcccugggacacgaucgccaacuacgccaagccguuccugaacaaggucgugagcaccaccaccaacaucgugacgcgcugccucaaccgggucugcaccaacuacaugcccuacuucuucacccugcugcuccagcugugcaccuucacccgcuccacgaacagccggaucaaggcguccaugcccaccaccaucgccaagaacaccgugaagagcgugggcaaguucugccuggaggccagcuucaacuaccucaagucccccaacuucagcaagcugaucaacaucaucaucugguuccugcuccuguccgucugccugggcagccucaucuacuccacggccgcccugggggugcugaugagcaaccucggcaugccguccuacugcaccggguaccgcgagggcuaccugaacagcaccaacgugaccaucgcgacguacugcaccggcuccauccccugcagcgucugccuguccgggcucgacagccuggacaccuaccccucccuggagaccauccagaucacgaucagcuccuucaagugggaccucaccgccuucggccugguggccgagugguuccuggccuacauccucuucacccgguucuucuacgugcuggggcuggccgcgaucaugcagcucuucuucagcuacuucgccguccacuucaucuccaacagcuggcugauguggcugaucaucaaccuggugcagauggcccccaucuccgccauggugcgcauguacaucuucuucgcgagcuucuacuacgucuggaagagcuacgugcacguggucgacggcugcaacuccagcaccugcaugaugugcuacaagcggaaccgcgccacgcggguggagugcaccaccaucgucaacggggugcgccgguccuucuacguguacgccaacggcggcaagggguucugcaagcuccacaacuggaacugcgucaacugcgacaccuucugcgccggcagcacguucaucuccgacgagguggcccgcgaccugagccugcaguucaagcggccgaucaaccccaccgaccaguccagcuacaucguggacuccgucaccgugaagaacgggagcauccaccucuacuucgacaaggcgggccagaagaccuacgagcgccacucccugagccacuucgugaaccuggacaaccuccgggccaacaacacgaaggggucccugcccaucaacgucaucguguucgacggcaagagcaagugcgaggaguccagcgccaaguccgccagcguguacuacucccagcugaugugccagcccauccuccugcuggaccaggcccucgucagcgacgugggcgacagcgcggagguggccgucaagauguucgacgccuacgugaacaccuucuccagcaccuucaacgugccgauggagaagcugaagacccuggucgccacggccgaggcggagcucgccaagaacgugucccuggacaacgugcugagcaccuucaucuccgccgcccgccagggguucgucgacagcgacguggagaccaaggacguggucgagugccucaagcugucccaccagagcgacaucgaggugaccggcgacuccugcaacaacuacaugcugacguacaacaagguggagaacaugaccccccgggaccucggggcgugcaucgacugcagcgcccgccacaucaacgcccaggucgccaagucccacaacaucgcccugaucuggaacgugaaggacuucaugagccuguccgagcagcuccggaagcagauccgcagcgcggccaagaagaacaaccugcccuucaagcugaccugcgccaccacgcgccagguggucaacguggugaccaccaagaucgcccucaagggcggguga

SEQ ID NO: 17812 - RNA, 5841 nt, Artificial Sequence
  SARS-CoV-2__MT827213.1__non-structural protein 3 (NSP3) CDS gc
auggcccccaccaaggugaccuucggcgacgacacggucaucgaggugcagggguacaagagcgugaacaucaccuucgagcuggacgagcgcaucgacaagguccucaacgagaagugcuccgccuacaccguggagcugggcaccgaggugaacgaguucgcgugcgucguggccgacgccgugaucaagacgcugcagccggucagcgagcuccugaccccccuggggaucgaccucgacgagugguccauggccaccuacuaccuguucgacgagagcggcgaguucaagcuggccucccacauguacugcagcuucuacccccccgacgaggacgaggaggagggggacugcgaggaggaggaguucgagccguccacccaguacgaguacggcacggaggacgacuaccagggcaagccccucgaguucggggcgaccagcgccgcccugcagcccgaggaggagcaggaggaggacuggcuggacgacgacucccagcagaccgugggccagcaggacgggagcgaggacaaccagaccacgaccauccagaccaucguggagguccagccccagcucgagauggagcugaccccgguggugcagacgaucgaggucaacuccuucagcggcuaccugaagcucaccgacaacguguacaucaagaacgccgacaucguggaggaggcgaagaaggucaagcccaccgugguggucaacgccgccaacguguaccugaagcacgggggcggcguggccggggcccugaacaaggcgaccaacaacgccaugcaggucgaguccgacgacuacaucgccacgaacggcccccucaagguggggggcagcugcguccuguccggccacaaccuggccaagcacugccuccacgugguggggcccaacgucaacaagggcgaggacauccagcugcugaagagcgccuacgagaacuucaaccagcacgaggugcuccuggcgccgcugcucuccgccgggaucuucggcgccgaccccauccacagccugcgggugugcgucgacaccgugcgcaccaacguguaccuggccgucuucgacaagaaccucuacgacaagcugguguccagcuuccuggagaugaagagcgagaagcagguggagcagaagaucgccgagauccccaaggaggaggucaagcccuucaucaccgaguccaagccgagcguggagcagcggaagcaggacgacaagaagaucaaggcgugcguggaggaggucacgaccacccucgaggagaccaaguuccugacggagaaccugcuccuguacaucgacaucaacgggaaccugcaccccgacuccgccacccucgugagcgacaucgacaucaccuuccugaagaaggacgcccccuacaucgugggcgacgucgugcaggagggcgugcugaccgccgucgugauccccacgaagaaggccgggggcaccaccgagaugcucgcgaaggcccugcgcaaggugccgaccgacaacuacaucacgaccuaccccgggcagggccugaacggguacaccgucgaggaggccaagaccgugcucaagaagugcaaguccgccuucuacauccugcccagcaucaucuccaacgagaagcaggagauccugggcaccgugagcuggaaccuccgggagaugcuggcgcacgccgaggagacgcgcaagcugaugcccgucugcguggagaccaaggccaucguguccaccauccagcggaaguacaagggcaucaagauccaggagggggucguggacuacggcgcccgcuucuacuucuacaccagcaagacgaccguggccucccugaucaacacccucaacgaccugaacgagacccuggucacgaugccgcucggguacgugacccacggccugaaccuggaggaggcggcccgguacaugcgcagccucaaggugcccgccaccgucuccgugagcucccccgacgccgugaccgccuacaacggguaccugacgagcuccagcaagacccccgaggagcacuucaucgagaccaucucccuggcgggcagcuacaaggacuggagcuacuccggccagagcacccagcucgggaucgaguuccugaagcggggcgacaaguccgucuacuacacgagcaacccgaccaccuuccaccuggacggggaggugaucaccuucgacaaccucaagacgcugcugucccuccgcgaggugcggaccaucaaggucuucaccaccguggacaacaucaaccugcacacgcagguggucgacaugagcaugaccuacggccagcaguucggccccaccuaccuggacggggccgacgugaccaagaucaagccccacaacucccacgagggcaagacguucuacgugcucccgaacgacgacacccugcgcgucgaggccuucgaguacuaccacaccaccgaccccagcuuccuggggcgguacauguccgcccucaaccacacgaagaaguggaaguacccccaggugaacggccugaccagcaucaagugggccgacaacaacugcuaccuggcgaccgcccuccugacccugcagcagaucgagcucaaguucaaccccccggcccugcaggacgccuacuaccgcgcgcgggccggggaggccgccaacuucugcgcccugauccucgcguacugcaacaagacggugggcgagcugggcgacguccgcgagaccauguccuaccuguuccagcacgccaaccucgacagcugcaagcgggugcugaacgucgugugcaagaccugcgggcagcagcagaccacccugaagggcguggaggccgucauguacauggggacgcucuccuacgagcaguucaagaagggcgugcagauccccugcaccugcgggaagcaggccaccaaguaccuggugcagcaggagagccccuucgucaugauguccgcccccccggcgcaguacgagcugaagcacggcaccuucacgugcgccagcgaguacaccggcaacuaccagugcgggcacuacaagcacaucaccuccaaggagacccucuacugcaucgacggcgcccugcugacgaagagcagcgaguacaaggggcccaucaccgacguguucuacaaggagaacuccuacaccaccacgaucaagcccgugaccuacaagcucgacggcgucgugugcaccgagaucgaccccaagcuggacaacuacuacaagaaggacaacagcuacuucaccgagcagccgaucgaccuggugcccaaccagcccuaccccaacgccuccuucgacaacuucaaguucgucugcgacaacaucaaguucgccgacgaccucaaccagcugacgggguacaagaagccggcgagccgcgagcugaaggugaccuucuuccccgaccucaacggcgacguggucgccaucgacuacaagcacuacacccccuccuucaagaagggcgccaagcugcugcacaagcccaucguguggcacgugaacaacgccaccaacaaggcgacguacaagccgaacaccuggugcauccggugccucuggagcaccaagcccgucgagaccuccaacagcuucgacgugcugaaguccgaggacgcccaggggauggacaaccuggccugcgaggaccucaagcccgugagcgaggaggucguggagaaccccacgauccagaaggacgugcuggagugcaacgucaagaccaccgagguggugggcgacaucauccugaagccggccaacaacucccucaagaucaccgaggaggucgggcacacggaccugauggccgcguacguggacaacagcucccugaccaucaagaagcccaacgagcucagccgcgugcugggccugaagacccucgccacccacgggcuggccgccgucaacuccgugcccugggacacgaucgccaacuacgcgaagccguuccugaacaagguggucagcaccaccaccaacaucgugacgcgcugccucaaccgggugugcaccaacuacaugcccuacuucuucacccugcugcuccagcugugcaccuucacccgcuccacgaacagccggaucaaggccuccaugcccaccaccaucgccaagaacaccgucaagagcgugggcaaguucugccuggaggccagcuucaacuaccucaagucccccaacuucagcaagcugaucaacaucaucaucugguuccugcuccuguccgugugccugggcagccucaucuacuccacggccgcgcuggggguccugaugagcaaccucggcaugccguccuacugcaccggguaccgcgagggcuaccugaacagcaccaacgugaccaucgccacguacugcaccggcuccauccccugcagcgugugccuguccgggcucgacagccuggacaccuaccccucccuggagaccauccagaucacgaucagcuccuucaagugggaccucaccgccuucggccuggucgccgagugguuccuggccuacauccucuucacccgguucuucuacgugcuggggcuggcggccaucaugcagcucuucuucagcuacuucgccgugcacuucaucuccaacagcuggcugauguggcugaucaucaaccugguccagauggcccccaucuccgcgauggugcgcauguacaucuucuucgccagcuucuacuacguguggaagagcuacguccacgugguggacggcugcaacuccagcaccugcaugaugugcuacaagcggaaccgcgccacgcgggucgagugcaccaccaucgugaacgggguccgccgguccuucuacguguacgccaacggcggcaagggguucugcaagcuccacaacuggaacugcgugaacugcgacaccuucugcgccggcagcacguucaucuccgacgaggucgcgcgcgaccugagccugcaguucaagcggccgaucaaccccaccgaccaguccagcuacaucguggacuccgugaccgucaagaacgggagcauccaccucuacuucgacaaggccggccagaagaccuacgagcgccacucccugagccacuucgugaaccuggacaaccuccgggccaacaacacgaaggggucccugcccaucaacgugaucgucuucgacggcaagagcaagugcgaggaguccagcgccaaguccgccagcguguacuacucccagcugaugugccagcccauccuccugcuggaccaggcgcucgugagcgacgucggcgacagcguggagguggccgucaagauguucgacgccuacgugaacaccuucuccagcaccuucaacgugccgauggagaagcugaagacccuggucgccacggccgaggcggagcucgccaagaacgugucccuggacaacgugcugagcaccuucaucuccgccgcccgccagggguucgucgacagcgacguggagaccaaggacguggucgagugccucaagcugucccaccagagcgacaucgaggugaccggcgacuccugcaacaacuacaugcugacguacaacaagguggagaacaugaccccccgggaccucggggcgugcaucgacugcagcgcccgccacaucaacgcccaggucgccaagucccacaacaucgcccugaucuggaacgugaaggacuucaugagccuguccgagcagcuccggaagcagauccgcagcgcggccaagaagaacaaccugcccuucaagcugaccugcgccaccacgcgccagguggucaacguggugaccaccaagaucgcccucaagggcggguga

SEQ ID NO: 17813 - RNA, 5841 nt, Artificial Sequence
  SARS-CoV-2__MT827229.1__non-structural protein 3 (NSP3) CDS gc
auggcccccaccaaggugaccuucggcgacgacacggucaucgaggugcagggguacaagagcgugaacaucaccuucgagcuggacgagcgcaucgacaagguccucaacgagaagugcuccgccuacaccguggagcugggcaccgaggugaacgaguucgcgugcgucguggccgacgccgugaucaagacgcugcagccggucagcgagcuccugaccccccuggggaucgaccucgacgagugguccauggccaccuacuaccuguucgacgagagcggcgaguucaagcuggccucccacauguacugcagcuucuacccccccgacgaggacgaggaggagggggacugcgaggaggaggaguucgagccguccacccaguacgaguacggcacggaggacgacuaccagggcaagccccucgaguucggggcgaccagcgccgcccugcagcccgaggaggagcaggaggaggacuggcuggacgacgacucccagcagaccgugggccagcaggacgggagcgaggacaaccagaccacgaccauccagaccaucguggagguccagccccagcucgagauggagcugaccccgguggugcagacgaucgaggucaacuccuucagcggcuaccugaagcucaccgacaacguguacaucaagaacgccgacaucguggaggaggcgaagaaggucaagcccaccgugguggucaacgccgccaacguguaccugaagcacgggggcggcguggccggggcccugaacaaggcgaccaacaacgccaugcaggucgaguccgacgacuacaucgccacgaacggcccccucaagguggggggcagcugcguccuguccggccacaaccuggccaagcacugccuccacgugguggggcccaacgucaacaagggcgaggacauccagcugcugaagagcgccuacgagaacuucaaccagcacgaggugcuccuggcgccgcugcucuccgccgggaucuucggcgccgaccccauccacagccugcgggugugcgucgacaccgugcgcaccaacguguaccuggccgucuucgacaagaaccucuacgacaagcugguguccagcuuccuggagaugaagagcgagaagcagguggagcagaagaucgccgagauccccaaggaggaggucaagcccuucaucaccgaguccaagccgagcguggagcagcggaagcaggacgacaagaagaucaaggcgugcguggaggaggucacgaccacccucgaggagaccaaguuccugacggagaaccugcuccuguacaucgacaucaacgggaaccugcaccccgacuccgccacccucgugagcgacaucgacaucaccuuccugaagaaggacgcccccuacaucgugggcgacgucgugcaggagggcgugcugaccgccgucgugauccccacgaagaaggccgggggcaccaccgagaugcucgcgaaggcccugcgcaaggugccgaccgacaacuacaucacgaccuaccccgggcagggccugaacggguacaccgucgaggaggccaagaccgugcucaagaagugcaaguccgccuucuacauccugcccagcaucaucuccaacgagaagcaggagauccugggcaccgugagcuggaaccuccgggagaugcuggcgcacgccgaggagacgcgcaagcugaugcccgucugcguggagaccaaggccaucguguccaccauccagcggaaguacaagggcaucaagauccaggagggggucguggacuacggcgcccgcuucuacuucuacaccagcaagacgaccguggccucccugaucaacacccucaacgaccugaacgagacccuggucacgaugccgcucggguacgugacccacggccugaaccuggaggaggcggcccgguacaugcgcagccucaaggugcccgccaccgucuccgugagcucccccgacgccgugaccgccuacaacggguaccugacgagcuccagcaagacccccgaggagcacuucaucgagaccaucucccuggcgggcagcuacaaggacuggagcuacuccggccagagcacccagcucgggaucgaguuccugaagcggggcgacaaguccgucuacuacacgagcaacccgaccaccuuccaccuggacggggaggugaucaccuucgacaaccucaagacgcugcugucccuccgcgaggugcggaccaucaaggucuucaccaccguggacaacaucaaccugcacacgcagguggucgacaugagcaugaccuacggccagcaguucggccccaccuaccuggacggggccgacgugaccaagaucaagccccacaacucccacgagggcaagacguucuacgugcucccgaacgacgacacccugcgcgucgaggccuucgaguacuaccacaccaccgaccccagcuuccuggggcgguacauguccgcccucaaccacacgaagaaguggaaguacccccaggugaacggccugaccagcaucaagugggccgacaacaacugcuaccuggcgaccgcccuccugacccugcagcagaucgagcucaaguucaaccccccggcccugcaggacgccuacuaccgcgcgcgggccggggaggccgccaacuucugcgcccugauccucgcguacugcaacaagacggugggcgagcugggcgacguccgcgagaccauguccuaccuguuccagcacgccaaccucgacagcugcaagcgggugcugaacgucgugugcaagaccugcgggcagcagcagaccacccugaagggcguggaggccgucauguacauggggacgcucuccuacgagcaguucaagaagggcgugcagauccccugcaccugcgggaagcaggccaccaaguaccuggugcagcaggagagccccuucgucaugauguccgcccccccggcgcaguacgagcugaagcacggcaccuucacgugcgccagcgaguacaccggcaacuaccagugcgggcacuacaagcacaucaccuccaaggagacccucuacugcaucgacggcgcccugcugacgaagagcagcgaguacaaggggcccaucaccgacguguucuacaaggagaacuccuacaccaccacgaucaagcccgugaccuacaagcucgacggcgucgugugcaccgagaucgaccccaagcuggacaacuacuacaagaaggacaacagcuacuucaccgagcagccgaucgaccuggugcccaaccagcccuaccccaacgccuccuucgacaacuucaaguucgucugcgacaacaucaaguucgccgacgaccucaaccagcugacgggguacaagaagccggcgagccgcgagcugaaggugaccuucuuccccgaccucaacggcgacguggucgccaucgacuacaagcacuacacccccuccuucaagaagggcgccaagcugcugcacaagcccaucguguggcacgugaacaacgccaccaacaaggcgacguacaagccgaacaccuggugcauccggugccucuggagcaccaagcccgucgagaccuccaacagcuucgacgugcugaaguccgaggacgcccaggggauggacaaccuggccugcgaggaccucaagcccgugagcgaggaggucguggagaaccccacgauccagaaggacgugcuggagugcaacgucaagaccaccgagguggugggcgacaucauccugaagccggccaacaacucccucaagaucaccgaggaggucgggcacacggaccugauggccgcguacguggacaacagcucccugaccaucaagaagcccaacgagcucagccgcgugcugggccugaagacccucgccacccacgggcuggccgccgucaacuccgugcccugggacacgaucgccaacuacgcgaagccguuccugaacaagguggucagcaucaccaccaacaucgugacccgcugccucaaccgggugugcacgaacuacaugcccuacuucuucacccugcugcuccagcugugcaccuucacccgcuccaccaacagccggaucaaggccuccaugcccacgaccaucgccaagaacaccgucaagagcgugggcaaguucugccuggaggccagcuucaacuaccucaagucccccaacuucagcaagcugaucaacaucaucaucugguuccugcuccuguccgugugccugggcagccucaucuacuccaccgccgcgcuggggguccugaugagcaaccucggcaugccguccuacugcacgggguaccgcgagggcuaccugaacagcaccaacgugaccaucgccaccuacugcacgggcuccauccccugcagcgugugccuguccgggcucgacagccuggacaccuaccccucccuggagaccauccagaucaccaucagcuccuucaagugggaccucacggccuucggccuggucgccgagugguuccuggccuacauccucuucacccgguucuucuacgugcuggggcuggcggccaucaugcagcucuucuucagcuacuucgccgugcacuucaucuccaacagcuggcugauguggcugaucaucaaccugguccagauggcccccaucuccgcgauggugcgcauguacaucuucuucgccagcuucuacuacguguggaagagcuacguccacgugguggacggcugcaacuccagcaccugcaugaugugcuacaagcggaaccgcgccacccgggucgagugcacgaccaucgugaacgggguccgccgguccuucuacguguacgccaacggcggcaagggguucugcaagcuccacaacuggaacugcgugaacugcgacaccuucugcgccggcagcaccuucaucuccgacgaggucgcgcgcgaccugagccugcaguucaagcggccgaucaaccccacggaccaguccagcuacaucguggacuccgugaccgucaagaacgggagcauccaccucuacuucgacaaggccggccagaagaccuacgagcgccacucccugagccacuucgugaaccuggacaaccuccgggccaacaacaccaaggggucccugcccaucaacgugaucgucuucgacggcaagagcaagugcgaggaguccagcgccaaguccgccagcguguacuacucccagcugaugugccagcccauccuccugcuggaccaggcgcucgugagcgacgucggcgacagcgccgagguggccgugaagauguucgacgccuacgucaacacguucuccagcaccuucaacgugccgauggagaagcugaagacccugguggccaccgcggaggccgagcucgccaagaacgucucccuggacaacgugcugagcacguucaucuccgccgcgcgccagggguucguggacagcgacgucgagaccaaggacgugguggagugccucaagcugucccaccagagcgacaucgaggucaccggcgacuccugcaacaacuacaugcugaccuacaacaagguggagaacaugacgccccgggaccucggggccugcaucgacugcagcgcccgccacaucaacgcccagguggccaagucccacaacaucgcgcugaucuggaacgucaaggacuucaugagccuguccgagcagcuccggaagcagauccgcagcgccgccaagaagaacaaccugcccuucaagcugaccugcgccaccacccgccagguggugaacgucgugacgaccaagaucgcccucaagggcggguga

SEQ ID NO: 17814 - RNA, 5841 nt, Artificial Sequence
  SARS-CoV-2__MT827234.1__non-structural protein 3 (NSP3) CDS gc
auggcccccaccaaggugaccuucggcgacgacacggucaucgaggugcagggguacaagagcgugaacaucaccuucgagcuggacgagcgcaucgacaagguccucaacgagaagugcuccgccuacaccguggagcugggcaccgaggugaacgaguucgcgugcgucguggccgacgccgugaucaagacgcugcagccggucagcgagcuccugaccccccuggggaucgaccucgacgagugguccauggccaccuacuaccuguucgacgagagcggcgaguucaagcuggccucccacauguacugcagcuucuacccccccgacgaggacgaggaggagggggacugcgaggaggaggaguucgagccguccacccaguacgaguacggcacggaggacgacuaccagggcaagccccucgaguucggggcgaccagcgccgcccugcagcccgaggaggagcaggaggaggacuggcuggacgacgacucccagcagaccgugggccagcaggacgggagcgaggacaaccagaccacgaccauccagaccaucguggagguccagccccagcucgagauggagcugaccccgguggugcagacgaucgaggucaacuccuucagcggcuaccugaagcucaccgacaacguguacaucaagaacgccgacaucguggaggaggcgaagaaggucaagcccaccgugguggucaacgccgccaacguguaccugaagcacgggggcggcguggccggggcccugaacaaggcgaccaacaacgccaugcaggucgaguccgacgacuacaucgccacgaacggcccccucaagguggggggcagcugcguccuguccggccacaaccuggccaagcacugccuccacgugguggggcccaacgucaacaagggcgaggacauccagcugcugaagagcgccuacgagaacuucaaccagcacgaggugcuccuggcgccgcugcucuccgccgggaucuucggcgccgaccccaucuacagccugcgggugugcgucgacaccgugcgcaccaacguguaccuggccgucuucgacaagaaccucuacgacaagcugguguccagcuuccuggagaugaagagcgagaagcagguggagcagaagaucgccgagauccccaaggaggaggucaagcccuucaucaccgaguccaagccgagcguggagcagcggaagcaggacgacaagaagaucaaggcgugcguggaggaggucacgaccacccucgaggagaccaaguuccugacggagaaccugcuccuguacaucgacaucaacgggaaccugcaccccgacuccgccacccucgugagcgacaucgacaucaccuuccugaagaaggacgcccccuacaucgugggcgacgucgugcaggagggcgugcugaccgccgucgugauccccacgaagaaggccgggggcaccaccgagaugcucgcgaaggcccugcgcaaggugccgaccgacaacuacaucacgaccuaccccgggcagggccugaacggguacaccgucgaggaggccaagaccgugcucaagaagugcaaguccgccuucuacauccugcccagcaucaucuccaacgagaagcaggagauccugggcaccgugagcuggaaccuccgggagaugcuggcgcacgccgaggagacgcgcaagcugaugcccgucugcguggagaccaaggccaucguguccaccauccagcggaaguacaagggcaucaagauccaggagggggucguggacuacggcgcccgcuucuacuucuacaccagcaagacgaccguggccucccugaucaacacccucaacgaccugaacgagacccuggucacgaugccgcucggguacgugacccacggccugaaccuggaggaggcggcccgguacaugcgcagccucaaggugcccgccaccgucuccgugagcucccccgacgccgugaccgccuacaacggguaccugacgagcuccagcaagacccccgaggagcacuucaucgagaccaucucccuggcgggcagcuacaaggacuggagcuacuccggccagagcacccagcucgggaucgaguuccugaagcggggcgacaaguccgucuacuacacgagcaacccgaccaccuuccaccuggacggggaggugaucaccuucgacaaccucaagacgcugcugucccuccgcgaggugcggaccaucaaggucuucaccaccguggacaacaucaaccugcacacgcagguggucgacaugagcaugaccuacggccagcaguucggccccaccuaccuggacggggccgacgugaccaagaucaagccccacaacucccacgagggcaagacguucuacgugcucccgaacgacgacacccugcgcgucgaggccuucgaguacuaccacaccaccgaccccagcuuccuggggcgguacauguccgcccucaaccacacgaagaaguggaaguacccccaggugaacggccugaccagcaucaagugggccgacaacaacugcuaccuggcgaccgcccuccugacccugcagcagaucgagcucaaguucaaccccccggcccugcaggacgccuacuaccgcgcgcgggccggggaggccgccaacuucugcgcccugauccucgcguacugcaacaagacggugggcgagcugggcgacguccgcgagaccauguccuaccuguuccagcacgccaaccucgacagcugcaagcgggugcugaacgucgugugcaagaccugcgggcagcagcagaccacccugaagggcguggaggccgucauguacauggggacgcucuccuacgagcaguucaagaagggcgugcagauccccugcaccugcgggaagcaggccaccaaguaccuggugcagcaggagagccccuucgucaugauguccgcccccccggcgcaguacgagcugaagcacggcaccuucacgugcgccagcgaguacaccggcaacuaccagugcgggcacuacaagcacaucaccuccaaggagacccucuacugcaucgacggcgcccugcugacgaagagcagcgaguacaaggggcccaucaccgacguguucuacaaggagaacuccuacaccaccacgaucaagcccgugaccuacaagcucgacggcgucgugugcaccgagaucgaccccaagcuggacaacuacuacaagaaggacaacagcuacuucaccgagcagccgaucgaccuggugcccaaccagcccuaccccaacgccuccuucgacaacuucaaguucgucugcgacaacaucaaguucgccgacgaccucaaccagcugacgggguacaagaagccggcgagccgcgagcugaaggugaccuucuuccccgaccucaacggcgacguggucgccaucgacuacaagcacuacacccccuccuucaagaagggcgccaagcugcugcacaagcccaucguguggcacgugaacaacgccaccaacaaggcgacguacaagccgaacaccuggugcauccggugccucuggagcaccaagcccgucgagaccuccaacagcuucgacgugcugaaguccgaggacgcccaggggauggacaaccuggccugcgaggaccucaagcccgugagcgaggaggucguggagaaccccacgauccagaaggacgugcuggagugcaacgucaagaccaccgagguggugggcgacaucauccugaagccggccaacaacucccucaagaucaccgaggaggucgggcacacggaccugauggccgcguacguggacaacagcucccugaccaucaagaagcccaacgagcucagccgcgugcugggccugaagacccucgccacccacgggcuggccgccgucaacuccgugcccugggacacgaucgccaacuacgcgaagccguuccugaacaagguggucagcaccaccaccaacaucgugacgcgcugccucaaccgggugugcaccaacuacaugcccuacuucuucacccugcugcuccagcugugcaccuucacccgcuccacgaacagccggaucaaggccuccaugcccaccaccaucgccaagaacaccgucaagagcgugggcaaguucugccuggaggccagcuucaacuaccucaagucccccaacuucagcaagcugaucaacaucaucaucugguuccugcuccuguccgugugccugggcagccucaucuacuccacggccgcgcuggggguccugaugagcaaccucggcaugccguccuacugcaccggguaccgcgagggcuaccugaacagcaccaacgugaccaucgccacguacugcaccggcuccauccccugcagcgugugccuguccgggcucgacagccuggacaccuaccccucccuggagaccauccagaucacgaucagcuccuucaagugggaccucaccgccuucggccuggucgccgagugguuccuggccuacauccucuucacccgguucuucuacgugcuggggcuggcggccaucaugcagcucuucuucagcuacuucgccgugcacuucaucuccaacagcuggcugauguggcugaucaucaaccugguccagauggcccccaucuccgcgauggugcgcauguacaucuucuucgccagcuucuacuacguguggaagagcuacguccacgugguggacggcugcaacuccagcaccugcaugaugugcuacaagcggaaccgcgccacgcgggucgagugcaccaccaucgugaacgggguccgccgguccuucuacguguacgccaacggcggcaagggguucugcaagcuccacaacuggaacugcgugaacugcgacaccuucugcgccggcagcacguucaucuccgacgaggucgcgcgcgaccugagccugcaguucaagcggccgaucaaccccaccgaccaguccagcuacaucguggacuccgugaccgucaagaacgggagcauccaccucuacuucgacaaggccggccagaagaccuacgagcgccacucccugagccacuucgugaaccuggacaaccuccgggccaacaacacgaaggggucccugcccaucaacgugaucgucuucgacggcaagagcaagugcgaggaguccagcgccaaguccgccagcguguacuacucccagcugaugugccagcccauccuccugcuggaccaggcgcucgugagcgacgucggcgacagcgccgagguggccgugaagauguucgacgccuacgucaacaccuucuccagcaccuucaacgugccgauggagaagcugaagacccugguggccacggcggaggccgagcucgccaagaacgucucccuggacaacgugcugagcaccuucaucuccgccgcgcgccagggguucguggacagcgacgucgagaccaaggacgugguggagugccucaagcugucccaccagagcgacaucgaggucaccggcgacuccugcaacaacuacaugcugacguacaacaagguggagaacaugaccccccgggaccucggggccugcaucgacugcagcgcccgccacaucaacgcccagguggccaagucccacaacaucgcgcugaucuggaacgucaaggacuucaugagccuguccgagcagcuccggaagcagauccgcagcgccgccaagaagaacaaccugcccuucaagcugaccugcgccaccacgcgccagguggugaacgucgugaccaccaagaucgcccucaagggcggguga

SEQ ID NO: 17815 - RNA, 5841 nt, Artificial Sequence
  SARS-CoV-2__MT827253.1__non-structural protein 3 (NSP3) CDS gc
auggcccccaccaaggugaccuucggcgacgacacggucaucgaggugcagggguacaagagcgugaacaucaccuucgagcuggacgagcgcaucgacaagguccucaacgagaagugcuccgccuacaccguggagcugggcaccgaggugaacgaguucgcgugcgucguggccgacgccgugaucaagacgcugcagccggucagcgagcuccugaccccccuggggaucgaccucgacgagugguccauggccaccuacuaccuguucgacgagagcggcgaguucaagcuggccucccacauguacugcagcuucuacccccccgacgaggacgaggaggagggggacugcgaggaggaggaguucgagccguccacccaguacgaguacggcacggaggacgacuaccagggcaagccccucgaguucggggcgaccagcgccgcccugcagcccgaggaggagcaggaggaggacuggcuggacgacgacucccagcagaccgugggccagcaggacgggagcgaggacaaccagaccacgaccauccagaccaucguggagguccagccccagcucgagauggagcugaccccgguggugcagacgaucgaggucaacuccuucagcggcuaccugaagcucaccgacaacguguacaucaagaacgccgacaucguggaggaggcgaagaaggucaagcccaccgugguggucaacgccgccaacguguaccugaagcacgggggcggcguggccggggcccugaacaaggcgaccaacaacgccaugcaggucgaguccgacgacuacaucgccacgaacggcccccucaagguggggggcagcugcguccuguccggccacaaccuggccaagcacugccuccacgugguggggcccaacgucaacaagggcgaggacauccagcugcugaagagcgccuacgagaacuucaaccagcacgaggugcuccuggcgccgcugcucuccgccgggaucuucggcgccgaccccauccacagccugcgggugugcgucgacaccgugcgcaccaacguguaccuggccgucuucgacaagaaccucuacgacaagcugguguccagcuuccuggagaugaagagcgagaagcagguggagcagaagaucgccgagauccccaaggaggaggucaagcccuucaucaccgaguccaagccgagcguggagcagcggaagcaggacgacaagaagaucaaggcgugcguggaggaggucacgaccacccucgaggagaccaaguuccugacggagaaccugcuccuguacaucgacaucaacgggaaccugcaccccgacuccgccacccucgugagcgacaucgacaucaccuuccugaagaaggacgcccccuacaucgugggcgacgucgugcaggagggcgugcugaccgccgucgugauccccacgaagaaggccgggggcaccaccgagaugcucgcgaaggcccugcgcaaggugccgaccgacaacuacaucacgaccuaccccgggcagggccugaacggguacaccgucgaggaggccaagaccgugcucaagaagugcaaguccgccuucuacauccugcccagcaucaucuccaacgagaagcaggagauccugggcaccgugagcuggaaccuccgggagaugcuggcgcacgccgaggagacgcgcaagcugaugcccgucugcguggagaccaaggccaucguguccaccauccagcggaaguacaagggcaucaagauccaggagggggucguggacuacggcgcccgcuucuacuucuacaccagcaagacgaccguggccucccugaucaacacccucaacgaccugaacgagacccuggucacgaugccgcucggguacgugacccacggccugaaccuggaggaggcggcccgguacaugcgcagccucaaggugcccgccaccgucuccgugagcucccccgacgccgugaccgccuacaacggguaccugacgagcuccagcaagacccccgaggagcacuucaucgagaccaucucccuggcgggcagcuacaaggacuggagcuacuccggccagagcacccagcucgggaucgaguuccugaagcggggcgacaaguccgucuacuacacgagcaacccgaccaccuuccaccuggacggggaggugaucaccuucgacaaccucaagacgcugcugucccuccgcgaggugcggaccaucaaggucuucaccaccguggacaacaucaaccugcacacgcagguggucgacaugagcaugaccuacggccagcaguucggccccaccuaccuggacggggccgacgugaccaagaucaagccccacaacucccacgagggcaagacguucuacgugcucccgaacgacgacacccugcgcgucgaggccuucgaguacuaccacaccaccgaccccagcuuccuggggcgguacauguccgcccucaaccacacgaagaaguggaaguacccccaggugaacggccugaccagcaucaagugggccgacaacaacugcuaccuggcgaccgcccuccugacccugcagcagaucgagcucaaguucaaccccccggcccugcaggacgccuacuaccgcgcgcgggccggggaggccgccaacuucugcgcccugauccucgcguacugcaacaagacggugggcgagcugggcgacguccgcgagaccauguccuaccuguuccagcacgccaaccucgacagcugcaagcgggugcugaacgucgugugcaagaccugcgggcagcagcagaccacccugaagggcguggaggccgucauguacauggggacgcucuccuacgagcaguucaagaagggcgugcagauccccugcaccugcgggaagcaggccaccaaguaccuggugcagcaggagagccccuucgucaugauguccgcccccccggcgcaguacgagcugaagcacggcaccuucacgugcgccagcgaguacaccggcaacuaccagugcgggcacuacaagcacaucaccuccaaggagacccucuacugcaucgacggcgcccugcugacgaagagcagcgaguacaaggggcccaucaccgacguguucuacaaggagaacuccuacaccaccacgaucaagcccgugaccuacaagcucgacggcgucgugugcaccgagaucgaccccaagcuggacaacuacuacaagaaggacaacagcuacuucaccgagcagccgaucgaccuggugcccaaccagcccuaccccaacgccuccuucgacaacuucaaguucgucugcgacaacaucaaguucgccgacgaccucaaccagcugacgggguacaagaagccggcgagccgcgagcugaaggugaccuucuuccccgaccucaacggcgacguggucgccaucgacuacaagcacuacacccccuccuucaagaagggcgccaagcugcugcacaagcccaucguguggcacgugaacaacgccaccaacaaggcgacguacaagccgaacaccuggugcauccggugccucuggagcaccaagcccgucgagaccuccaacagcuucgacgugcugaaguccgaggacgcccaggggauggacaaccuggccugcgaggaccucaagcccgugagcgaggaggucguggagaaccccacgauccagaaggacgugcuggagugcaacgucaagaccaccgagguggugggcgacaucauccugaagccggccaacaacucccucaagaucaccgaggaggucgggcacacggaccugauggccgcguacguggacaacagcucccugaccaucaagaagcccaacgagcucagccgcgugcugggccugaagacccucgccacccacgggcuggccgccgucaacuccgugcccugggacacgaucgccaacuacgcgaagccguuccugaacaagguggucagcaccaccaccaacaucgugacgcgcugccucaaccgggugugcaccaacuacaugcccuacuucuucacccugcugcuccagcugugcaccuucacccgcuccacgaacagccggaucaaggccuccaugcccaccaccaucgccaacaacaccgucaagagcgugggcaaguucugccuggaggccagcuucaacuaccucaagucccccaacuucagcaagcugaucaacaucaucaucugguuccugcuccuguccgugugccugggcagccucaucuacuccacggccgcgcuggggguccugaugagcaaccucggcaugccguccuacugcaccggguaccgcgagggcuaccugaacagcaccaacgugaccaucgccacguacugcaccggcuccauccccugcagcgugugccuguccgggcucgacagccuggacaccuaccccucccuggagaccauccagaucacgaucagcuccuucaagugggaccucaccgccuucggccuggucgccgagugguuccuggccuacauccucuucacccgguucuucuacgugcuggggcuggcggccaucaugcagcucuucuucagcuacuucgccgugcacuucaucuccaacagcuggcugauguggcugaucaucaaccugguccagauggcccccaucuccgcgauggugcgcauguacaucuucuucgccagcuucuacuacguguggaagagcuacguccacgugguggacggcugcaacuccagcaccugcaugaugugcuacaagcggaaccgcgccacgcgggucgagugcaccaccaucgugaacgggguccgccgguccuucuacguguacgccaacggcggcaagggguucugcaagcuccacaacuggaacugcgugaacugcgacaccuucugcgccggcagcacguucaucuccgacgaggucgcgcgcgaccugagccugcaguucaagcggccgaucaaccccaccgaccaguccagcuacaucguggacuccgugaccgucaagaacgggagcauccaccucuacuucgacaaggccggccagaagaccuacgagcgccacucccugagccacuucgugaaccuggacaaccuccgggccaacaacacgaaggggucccugcccaucaacgugaucgucuucgacggcaagagcaagugcgaggaguccagcgccaaguccgccagcguguacuacucccagcugaugugccagcccauccuccugcuggaccaggcgcucgugagcgacgucggcgacagcgccgagguggccgugaagauguucgacgccuacgucaacaccuucuccagcaccuucaacgugccgauggagaagcugaagacccugguggccacggcggaggccgagcucgccaagaacgucucccuggacaacgugcugagcaccuucaucuccgccgcgcgccagggguucguggacagcgacgucgagaccaaggacgugguggagugccucaagcugucccaccagagcgacaucgaggucaccggcgacuccugcaacaacuacaugcugacguacaacaagguggagaacaugaccccccgggaccucggggccugcaucgacugcagcgcccgccacaucaacgcccagguggccaagucccacaacaucgcgcugaucuggaacgucaaggacuucaugagccuguccgagcagcuccggaagcagauccgcagcgccgccaagaagaacaaccugcccuucaagcugaccugcgccaccacgcgccagguggugaacgucgugaccaccaagaucgcccucaagggcggguga

SEQ ID NO: 17816 - RNA, 5841 nt, Artificial Sequence
  SARS-CoV-2__MT827840.1__non-structural protein 3 (NSP3) CDS gc
auggcccccaccaaggugaccuucggcgacgacacggucaucgaggugcagggguacaagagcgugaacaucaccuucgagcuggacgagcgcaucgacaagguccucaacgagaagugcuccgccuacaccguggagcugggcaccgaggugaacgaguucgcgugcgucguggccgacgccgugaucaagacgcugcagccggucagcgagcuccugaccccccuggggaucgaccucgacgagugguccauggccaccuacuaccuguucgacgagagcggcgaguucaagcuggccucccacauguacugcagcuucuacccccccgacgaggacgaggaggagggggacugcgaggaggaggaguucgagccguccacccaguacgaguacggcacggaggacgacuaccagggcaagccccucgaguucggggcgaccagcgccgcccugcagcccgaggaggagcaggaggaggacuggcuggacgacgacucccagcagaccgugggccagcaggacgggagcgaggacaaccagaccacgaccauccagaccaucguggagguccagccccagcucgagauggagcugaccccgguggugcagacgaucgaggucaacuccuucagcggcuaccugaagcucaccgacaacguguacaucaagaacgccgacaucguggaggaggcgaagaaggucaagcccaccgugguggucaacgccgccaacguguaccugaagcacgggggcggcguggccggggcccugaacaaggcgaccaacaacgccaugcaggucgaguccgacgacuacaucgccacgaacggcccccucaagguggggggcagcugcguccuguccggccacaaccuggccaagcacugccuccacgugguggggcccaacgucaacaagggcgaggacauccagcugcugaagagcgccuacgagaacuucaaccagcacgaggugcuccuggcgccgcugcucuccgccgggaucuucggcgccgaccccauccacagccugcgggugugcgucgacaccgugcgcaccaacguguaccuggccgucuucgacaagaaccucuacgacaagcugguguccagcuuccuggagaugaagagcgagaagcagguggagcagaagaucgccgagauccccaaggaggaggucaagcccuucaucaccgaguccaagccgagcguggagcagcggaagcaggacgacaagaagaucaaggcgugcguggaggaggucacgaccacccucgaggagaccaaguuccugacggagaaccugcuccuguacaucgacaucaacgggaaccugcaccccgacuccgccacccucgugagcgacaucgacaucaccuuccugaagaaggacgcccccuacaucgugggcgacgucgugcaggagggcgugcugaccgccgucgugauccccacgaagaaggccgggggcaccaccgagaugcucgcgaaggcccugcgcaaggugccgaccgacaacuacaucacgaccuaccccgggcagggccugaacggguacaccgucgaggaggccaagaccgugcucaagaagugcaaguccgccuucuacauccugcccagcaucaucuccaacgagaagcaggagauccugggcaccgugagcuggaaccuccgggagaugcuggcgcacgccgaggagacgcgcaagcugaugcccgucugcguggagaccaaggccaucguguccaccauccagcggaaguacaagggcaucaagauccaggagggggucguggacuacggcgcccgcuucuacuucuacaccagcaagacgaccguggccucccugaucaacacccucaacgaccugaacgagacccuggucacgaugccgcucggguacgugacccacggccugaaccuggaggaggcggcccgguacaugcgcagccucaaggugcccgccaccgucuccgugagcucccccgacgccgugaccgccuacaacggguaccugacgagcuccagcaagacccccgaggagcacuucaucgagaccaucucccuggcgggcagcuacaaggacuggagcuacuccggccagagcacccagcucgggaucgaguuccugaagcggggcgacaaguccgucuacuacacgaacccgaccaccuuccaccuggacggggaggugaucaccuucgacaaccucaagacgcugcugagccuccgcgaggugcggaccaucaaggucuucaccaccguggacaacaucaaccugcacacgcagguggucgacauguccaugaccuacggccagcaguucggccccaccuaccuggacggggccgacgugaccaagaucaagccccacaacagccacgagggcaagacguucuacgugcucccgaacgacgacacccugcgcgucgaggccuucgaguacuaccacaccaccgaccccuccuuccuggggcgguacaugagcgcccucaaccacacgaagaaguggaaguacccccaggugaacggccugaccuccaucaagugggccgacaacaacugcuaccuggcgaccgcccuccugacccugcagcagaucgagcucaaguucaaccccccggcccugcaggacgccuacuaccgcgcgcgggccggggaggccgccaacuucugcgcccugauccucgcguacugcaacaagacggugggcgagcugggcgacguccgcgagaccaugagcuaccuguuccagcacgccaaccucgacuccugcaagcgggugcugaacgucgugugcaagaccugcgggcagcagcagaccacccugaagggcguggaggccgucauguacauggggacgcucagcuacgagcaguucaagaagggcgugcagauccccugcaccugcgggaagcaggccaccaaguaccuggugcagcaggagucccccuucgucaugaugagcgcccccccggcgcaguacgagcugaagcacggcaccuucacgugcgccuccgaguacaccggcaacuaccagugcgggcacuacaagcacaucaccagcaaggagacccucuacugcaucgacggcgcccugcugacgaaguccagcgaguacaaggggcccaucaccgacguguucuacaaggagaacagcuacaccaccacgaucaagcccgugaccuacaagcucgacggcgucgugugcaccgagaucgaccccaagcuggacaacuacuacaagaaggacaacuccuacuucaccgagcagccgaucgaccuggugcccaaccagcccuaccccaacgccagcuucgacaacuucaaguucgucugcgacaacaucaaguucgccgacgaccucaaccagcugacgggguacaagaagccggcgucccgcgagcugaaggugaccuucuuccccgaccucaacggcgacguggucgccaucgacuacaagcacuacacccccagcuucaagaagggcgccaagcugcugcacaagcccaucguguggcacgugaacaacgccaccaacaaggcgacguacaagccgaacaccuggugcauccggugccucugguccaccaagcccgucgagaccagcaacuccuucgacgugcugaagagcgaggacgcccaggggauggacaaccuggccugcgaggaccucaagcccguguccgaggaggucguggagaaccccacgauccagaaggacgugcuggagugcaacgucaagaccaccgagguggugggcgacaucauccugaagccggccaacaacagccucaagaucaccgaggaggucgggcacacggaccugauggccgcguacguggacaacuccagccugaccaucaagaagcccaacgagcucucccgcgugcugggccugaagacccucgccacccacgggcuggccgccgucaacagcgugcccugggacacgaucgccaacuacgcgaagccguuccugaacaagguggucuccaccaccaccaacaucgugacgcgcugccucaaccgggugugcaccaacuacaugcccuacuucuucacccugcugcuccagcugugcaccuucacccgcagcacgaacucccggaucaaggccagcaugcccaccaccaucgccaagaacaccgucaaguccgugggcaaguucugccuggaggccagcuucaacuaccucaagagccccaacuucuccaagcugaucaacaucaucaucugguuccugcuccugagcgugugccugggcucccucaucuacagcacggccgcgcuggggguccugauguccaaccucggcaugccgagcuacugcaccggguaccgcgagggcuaccugaacuccaccaacgugaccaucgccacguacugcaccggcagcauccccugcuccgugugccugagcgggcucgacucccuggacaccuaccccagccuggagaccauccagaucacgaucuccagcuucaagugggaccucaccgccuucggccuggucgccgagugguuccuggccuacauccucuucacccgguucuucuacgugcuggggcuggcggccaucaugcagcucuucuucuccuacuucgccgugcacuucaucagcaacuccuggcugauguggcugaucaucaaccugguccagauggcccccaucagcgcgauggugcgcauguacaucuucuucgccuccuucuacuacguguggaagagcuacguccacgugguggacggcugcaacagcuccaccugcaugaugugcuacaagcggaaccgcgccacgcgggucgagugcaccaccaucgugaacgggguccgccggagcuucuacguguacgccaacggcggcaagggguucugcaagcuccacaacuggaacugcgugaacugcgacaccuucugcgccggcuccacguucaucagcgacgaggucgcgcgcgaccugucccugcaguucaagcggccgaucaaccccaccgaccagagcuccuacaucguggacagcgugaccgucaagaacggguccauccaccucuacuucgacaaggccggccagaagaccuacgagcgccacagccugucccacuucgugaaccuggacaaccuccgggccaacaacacgaaggggagccugcccaucaacgugaucgucuucgacggcaaguccaagugcgaggagagcuccgccaagagcgccuccguguacuacagccagcugaugugccagcccauccuccugcuggaccaggcgcucguguccgacgucggcgacagcgccgagguggccgugaagauguucgacgccuacgucaacaccuucagcuccaccuucaacgugccgauggagaagcugaagacccugguggccacggcggaggccgagcucgccaagaacgucagccuggacaacgugcuguccaccuucaucagcgccgcgcgccagggguucguggacuccgacgucgagaccaaggacgugguggagugccucaagcugagccaccaguccgacaucgaggucaccggcgacagcugcaacaacuacaugcugacguacaacaagguggagaacaugaccccccgggaccucggggccugcaucgacugcuccgcccgccacaucaacgcccagguggccaagagccacaacaucgcgcugaucuggaacgucaaggacuucaugucccugagcgagcagcuccggaagcagauccgcuccgccgccaagaagaacaaccugcccuucaagcugaccugcgccaccacgcgccagguggugaacgucgugaccaccaagaucgcccucaagggcgggaaguga

SEQ ID NO: 17817 - RNA, 5841 nt, Artificial Sequence
  SARS-CoV-2__MT825091.1__non-structural protein 3 (NSP3) CDS gc
auggcccccaccaaggugaccuucggcgacgacacggucaucgaggugcagggguacaagagcgugaacaucaccuucgagcuggacgagcgcaucgacaagguccucaacgagaagugcuccgccuacaccguggagcugggcaccgaggugaacgaguucgcgugcgucguggccgacgccgugaucaagacgcugcagccggucagcgagcuccugaccccccuggggaucgaccucgacgagugguccauggccaccuacuaccuguucgacgagagcggcgaguucaagcuggccucccacauguacugcagcuucuacccccccgacgaggacgaggaggagggggacugcgaggaggaggaguucgagccguccacccaguacgaguacggcacggaggacgacuaccagggccagccccucgaguucggggcgaccagcgccgcccugcagcccgaggaggagcaggaggaggacuggcuggacgacgacucccagcagaccgugggccagcaggacgggagcgaggacaaccagaccacgaccauccagaccaucguggagguccagccccagcucgagauggagcugaccccgguggugcagacgaucgaggucaacuccuucagcggcuaccugaagcucaccgacaacguguacaucaagaacgccgacaucguggaggaggcgaagaaggucaagcccaccgugguggucaacgccgccaacguguaccugaagcacgggggcggcguggccggggcccugaacaaggcgaccaacaacgccaugcaggucgaguccgacgacuacaucgccacgaacggcccccucaagguggggggcagcugcguccuguccggccacaaccuggccaagcaccggcuccacgugguggggcccaacgucaacaagggcgaggacauccagcugcugaagagcgccuacgagaacuucaaccagcacgaggugcuccuggcgccgcugcucuccgccgggaucuucggcgccgaccccauccacagccugcgcgugugcgucgacaccgugcggaccaacguguaccuggccgucuucgacaagaaccucuacgacaagcugguguccagcuuccuggagaugaagagcgugaagcaggucgagcagaagaucgccgagauccccaaggaggaggugaagcccuucaucaccgaguccaagccgagcguggagcagcgcaagcaggacgacaagaagaucaaggcgugcgucgaggaggugacgaccacccucgaggagaccaaguuccugacggagaaccugcuccuguacaucgacaucaacgggaaccugcaccccgacuccgccacccucgugagcgacaucgacaucaccuuccugaagaaggacgcccccuacaccgucggcgacguggugcaggagggcguccugacggccguggugauccccaccaagaaggccgggggcaccaccgagaugcucgcgaaggcccugcggaaggucccgacggacaacuacaucaccaccuaccccgggcagggccugaacggguacaccguggaggaggccaagaccgugcucaagaagugcaaguccgccuucuacauccugcccagcaucaucuccaacgagaagcaggagauccugggcacggucagcuggaaccuccccgagaugcuggcgcacgccgaggagacccgcaagcugaugccggugugcguggagaccaaggccaucgucuccaccauccagcggaaguacaagggcaucaagauccaggagggggugguggacuacggcgcccgcuucuacuucuacacgagcaagaccaccgucgccucccugaucaacacccucaacgaccugaacgagacgcuggugaccaugccccucggguacgugacccacggccugaaccuggaggaggcggcccgguacaugcgcagccucaagguccccgccaccguguccgugagcucccccgacgccgucacggccuacaacggguaccugaccuacagcuccaagaccccggaggagcacuucaucgagaccaucagccuggcgggcuccuacaaggacuggagcuacagcggccaguccacgcagcucgggaucgaguuccugaagcggggcgacaagagcguguacuacaccaacaaccccaccaccuuccaccuggacggggaggugaucacguucgacaaccucaagacccugcugucccuccgcgagguccggaccaucaagguguucaccacgguggacaacaucaaccugcacacccaggucguggacaugagcaugaccuacggccagcaguucggccccaccuacuccgacggggccgacgugacgaagaucaagccgcacaacagccacgagggcaagaccuucuacguccugcccaacgacgacacccuccgcguggaggccuucgaguacuaccacaccacggaccccuccuuccuggggcgguacaugagcgcccugaaccacaccaagaaguggaaguacccccaggugaacggccucaccuccaucaagugggccgacaacaacugcuaccuggcgaccgcccugcucacgcugcagcagaucgagcugaaguucaacccgcccgcccuccaggacgccuacuaccgcgcgcgggacggggaggccgccaacuucugcgcccugauccuggccuacugcaacaagaccgucggcgagcucggcgacgugcgcgagaccaugagcuaccuguuccagcacgcgaaccuggacuccugcaagcggguccucaacguggugugcaagaccugcgggcagcagcagaccacgcugaagggcgucgaggccgugauguacauggggacccugagcuacgagcaguucaagaagggcgugcagauccccugcaccugcgggaagcaggccaccaaguaccucguccagcaggagucccccuucgugaugaugagcgccccgcccgcccaguacgagcugaagcacggcacguucaccugcgcguccgaguacaccggcaacuaccagugcgggcacuacaagcacaucaccagcaaggagacgcuguacugcaucgacggcgcccuccugaccaaguccagcgaguacaaggggcccaucaccgacguguucuacaaggagaacagcuacaccacgaccaucaagcccgucaccuacaagcuggacggcguggugugcaccgagaucgacccgaagcucgacaacuacuacaagaaggacaacuccuacuucacggagcagcccaucgaccugguccccaaccagcccuacccgaacgggagcuucgacaacuucaaguucgugugcgacaacaucaaguucgccgacgaccugaaccagcucaccggcuacaagaagcccgccucccgcgagcugaaggugaccuucuuccccgaccugaacggcgacgucguggccaucgacuacaagcacuacacccccagcuucaagaagggggcgaagcuccugcacaagccgaucguguggcacgucaacaacgccacgaacaaggccaccuacaagcccaacaccuggugcauccggugccugugguccaccaagcccguggagacgagcaacuccuucgacgugcucaagagcgaggacgcccagggcauggacaaccuggcgugcgaggaccugaagcccgucuccgaggaggugguggagaacccgaccauccagaaggacguccucgagugcaacgugaagaccaccgagguggucggggacaucauccugaagcccgccaacaacagccugaagaucacggaggaggugggccacaccgaccucauggacgccuacguggacaacuccagccugaccaucaagaagcccaacgagcugucccgcguccucgggcugaagacccuggccacgcacggccucgccgcggugaacagcgugccgugggacaccaucgccaacuacgccaagcccuuccugaacaaggucguguccaccaccacgaacaucgugacccugugccucaaccuggucugcaccaacuacaugcccuacuucuucacccugcuccugcagcugugcaccuucacgcgcagcaccaacucccggaucaaggccagcaugcccaccaccaucgccaagaacacggugaaguccguggacaaguucugccucgaggcgagcuucaacuaccugaagagcccgaacuucuccaagcugaucaacaucaucaucugguuccuccugcugagcgucugccucggcucccugaucuacagcaccgccgcccugggggugcucauguccaaccugggcaugcccagcuacugcaccggguaccgcgagggcuaccugaacuccaccaacgugacgaucgccaccuacugcaccggcagcauccccugcuccgucugccucagcgggcuggacucccuggacaucuaccccagccucgagaccauccagaucacgaucuccagcuucaagugggaccugaccgccuucggccugguggcggagugguuccucgccuacauccuguucacccgguucuucuacgugcacgggcuggccgccaucaugcagcucuucuucuccuacuucgccguccacuucaucagcaacuccuggcugauguggcugaucaucaaccuggugcagauggcgccgaucagcgccauggugcgcauguacaucuucuucgccuccuucuacuacgucuggaagagcuacgugcacguggucgacggcugcaacagcuccaccugcaugaugugcuaccggcgcaaccgggccacgcgcguggagugcaccaccaucgucaacggggugcggcgcagcuucuacguguacgcgaacggcggcaagggguucugcaagcuccacaacuggaacugcgucaacugcgacaccuucugcgccggcuccacguucaucagcgacgagguggcccgggaccugucccugcaguucaagcgccccaucaaccccaccgaccagagcuccuacaucgacgacagcgugaccgucaagaacggguccauccaccucuacuucgacaaggccggccagaagaccuacgagcggcacagccugucccacuucgugaaccuggacaaccuccgcgccaacaacacgcgggggagccugcccaucaacgugaucgucuucgacggcaaguccaagugcgaggagagcuccgcgaagagcgccuccguguacuacagccagcugaugugccagccgauccuccugcuggaccaggcccucguguccgacgucggcgacagcgccgagguggccgugaagauguucgacgcguacgucagcaccuucuccagcaccuucaacgugcccauggagaagcugaagacccugguggccacggccgaggccgagcucgccaagaacgucucccuggacaacgugcugagcaccuucaucuccgcggcccgccagggguucguggacagcgacgucgagaccaaggacgugguggagugccuccggcugucccaccagagcgacaucgaggucaccggcgacuccugcaacaacuacaugcugacguacaacaagguggagaacaccaccccccgcgaccucggggccugcaucgacugcagcgcccggcacaucaacgcgcagguggccaagucccacaacaucgcccugaucuggaacgucaaggacuucaugagccuguccgagcagcuccgcaagcagauccgcagcgccgccaagaagaacaaccugcccuucaagcugaccugcgcgacgacccggcagguggugaacgucgugaccaccaagaucgcccucaaggugggcuga

SEQ ID NO: 17818 - RNA, 5841 nt, Artificial Sequence
  SARS-CoV-2__MT821531.1__non-structural protein 3 (NSP3) CDS gc
auggcccccaccaaggugaccuucggcgacgacacggucaucgaggugcagggguacaagagcgugaacaucaccuucgagcuggacgagcgcaucgacaagguccucaacgagaagugcuccgccuacaccguggagcugggcaccgaggugaacgaguucgcgugcgucguggccgacgccgugaucaagacgcugcagccggucagcgagcuccugaccccccuggggaucgaccucgacgagugguccauggccaccuacuaccuguucgacgagagcggcgaguucaagcuggccucccacauguacugcagcuucuacccccccgacgaggacgaggaggagggggacugcgaggaggaggaguucgagccguccacccaguacgaguacggcacggaggacgacuaccagggcaagccccucgaguucggggcgaccagcgccgcccugcagcccgaggaggagcaggaggaggacuggcuggacgacgacucccagcagaccgugggccagcaggacgggagcgaggacaaccagaccacgaccauccagaccaucguggagguccagccccagcucgagauggagcugaccccgguggugcagacgaucgaggucaacuccuucagcggcuaccugaagcucaccgacaacguguacaucaagaacgccgacaucguggaggaggcgaagaaggucaagcccaccgugguggucaacgccgccaacguguaccugaagcacgggggcggcguggccggggcccugaacaaggcgaccaacaacgccaugcaggucgaguccgacgacuacaucgccacgaacggcccccucaagguggggggcagcugcguccuguccggccacaaccuggccaagcacugccuccacgugguggggcccaacgucaacaagggcgaggacauccagcugcugaagagcgccuacgagaacuucaaccagcacgaggugcuccuggcgccgcugcucuccgccgggaucuucggcgccgaccccauccacagccugcgggugugcgucgacaccgugcgcaccaacguguaccuggccgucuucgacaagaaccucuacgacaagcugguguccagcuuccuggagaugaagagcgagaagcagguggagcagaagaucgccgagauccccaaggaggaggucaagcccuucaucaccgaguccaagccgagcguggagcagcggaagcaggacgacaagaagaucaaggcgugcguggaggaggucacgaccacccucgaggagaccaaguuccugacggagaaccugcuccuguacaucgacaucaacgggaaccugcaccccgacuccgccacccucgugagcgacaucgacaucaccuuccugaagaaggacgcccccuacaucgugggcgacgucgugcaggagggcgugcugaccgccgucgugauccccacgaagaaggccgggggcaccaccgagaugcucgcgaaggcccugcgcaaggugccgaccgacaacuacaucacgaccuaccccgggcagggccugaacggguacaccgucgaggaggccaagaccgugcucaagaagugcaaguccgccuucuacauccugcccagcaucaucuccaacgagaagcaggagauccugggcaccgugagcuggaaccuccgggagaugcuggcgcacgccgaggagacgcgcaagcugaugcccgucugcguggagaccaaggccaucguguccaccauccagcggaaguacaagggcaucaagauccaggagggggucguggacuacggcgugcgcuucuacuucuacaccagcaagacgaccgucgccucccugaucaacacccucaacgaccugaacgagacccuggugacgaugccgcucggguacgugacccacggccugaaccuggaggaggccgcgcgguacaugcgcagccucaagguccccgccaccguguccgugagcucccccgacgccgucaccgccuacaacggguaccugacgagcuccagcaagacccccgaggagcacuucaucgagaccaucucccuggccggcagcuacaaggacuggagcuacuccggccagagcacccagcucgggaucgaguuccugaagcggggcgacaaguccguguacuacacgagcaacccgaccaccuuccaccuggacggggaggugaucaccuucgacaaccucaagacgcugcugucccuccgcgagguccggaccaucaagguguucaccaccguggacaacaucaaccugcacacgcaggucguggacaugagcaugaccuacggccagcaguucggccccaccuaccuggacggggcggacgugaccaagaucaagccccacaacucccacgagggcaagacguucuacguccucccgaacgacgacacccugcgcguggaggccuucgaguacuaccacaccaccgaccccagcuuccuggggcgguacauguccgcccucaaccacacgaagaaguggaaguacccccaggugaacggccugaccagcaucaagugggccgacaacaacugcuaccuggccaccgcgcuccugacccugcagcagaucgagcucaaguucaaccccccggcccugcaggacgccuacuaccgcgcccgggcgggggaggccgccaacuucugcgcccugauccucgccuacugcaacaagacggucggcgagcugggcgacgugcgcgagaccauguccuaccuguuccagcacgcgaaccucgacagcugcaagcggguccugaacguggugugcaagaccugcgggcagcugcagaccacccucaagggcgucgaggccgugauguacauggggacgcuguccuacgagcaguucaagaagggcgugcagauccccugcaccugcgggaagcaggccaccaaguaccugguccagcaggagagccccuucgugaugauguccgcccccccggcccaguacgagcucaagcacggcaccuucacgugcgcgagcgaguacaccggcaacuaccagugcgggcacuacaagcacaucaccuccaaggagacccuguacugcaucgacggcgcccugcucacgaagagcagcgaguacaaggggcccaucaccgacguguucuacaaggagaacuccuacaccaccacgaucaagcccgucaccuacaagcuggacggcguggugugcaccgagaucgaccccaagcuggacaacuacuacaagaaggacaacagcuacuucaccgagcagccgaucgaccucguccccaaccagcccuaccccaacgccuccuucgacaacuucaaguucgugugcgacaacaucaaguucgccgacgaccugaaccagcugacgggguacaagaagccggccagccgcgagcucaaggugaccuucuuccccgaccugaacggcgacgucguggcgaucgacuacaagcacuacacccccuccuucaagaagggcgccaagcugcuccacaagcccaucguguggcacgucaacaacgccaccaacaaggccacguacaagccgaacaccuggugcauccggugccuguggagcaccaagcccguggagaccuccaacagcuucgacgugcugaaguccgaggacgcgcaggggauggacaaccucgccugcgaggaccugaagcccgucagcgaggaggugguggagaaccccacgauccagaaggacguccuggagugcaacgugaagaccaccgagguggucggcgacaucauccucaagccggccaacaacucccugaagaucaccgaggagguggggcacacggaccugauggccgccuacguggacaacagcucccucaccaucaagaagcccaacgagcugagccgcguccugggccucaagacccuggcgacccacgggcuggccgccgugaacuccgugcccugggacacgaucgccaacuacgccaagccguuccucaacaaggucgugagcaccaccaccaacaucgugacgcgcugccugaaccgggucugcaccaacuacaugcccuacuucuucacccugcuccugcagcugugcaccuucacccgcuccacgaacagccggaucaaggcguccaugcccaccaccaucgccaagaacaccgugaagagcgugggcaaguucugccucgaggccagcuucaacuaccugaagucccccaacuucagcaagcugaucaacaucaucaucugguuccuccugcuguccgucugccucggcagccugaucuacuccacggccgcccugggggugcucaugagcaaccugggcaugccguccuacugcaccggguaccgcgagggcuaccugaacagcaccaacgugaccaucgcgacguacugcaccggcuccauccccugcagcgucugccucuccgggcuggacagccuggacaccuaccccucccucgagaccauccagaucacgaucagcuccuucaagugggaccugaccgccuucggccugguggccgagugguuccucgccuacauccuguucacccgguucuucuacgugcuggggcucgccgcgaucaugcagcuguucuucagcuacuucgccguccacuucaucuccaacagcuggcugauguggcugaucaucaaccucgugcagauggcccccaucuccgccauggugcgcauguacaucuucuucgcgagcuucuacuacgucuggaagagcuacgugcacguggucgacggcugcaacuccagcaccugcaugaugugcuacaagcggaaccgcgccacgcggguggagugcaccaccaucgucaacggggugcgccgguccuucuacguguacgccaacggcggcaagggguucugcaagcugcacaacuggaacugcgucaacugcgacaccuucugcgccggcagcacguucaucuccgacgagguggcccgcgaccugagccuccaguucaagcggccgaucaaccccaccgaccaguccagcuacaucguggacuccgucaccgugaagaacgggagcauccaccuguacuucgacaaggcgggccagaagaccuacgagcgccacucccugagccacuucgugaaccucgacaaccugcgggccaacaacacgaaggggucccugcccaucaacgucaucguguucgacggcaagagcaagugcgaggaguccagcgccaaguccgccagcguguacuacucccagcucaugugccagcccauccugcugcucgaccaggcccuggucagcgacgugggcgacagcgcggagguggccgucaagauguucgacgccuacgugaacaccuucuccagcaccuucaacgugccgauggagaagcugaagacccucgucgccacggccgaggcggagcuggccaagaacgugucccuggacaacgugcucagcaccuucaucuccgccgcccgccagggguucgucgacagcgacguggagaccaaggacguggucgagugccugaagcugucccaccagagcgacaucgaggugaccggcgacuccugcaacaacuacaugcucacguacaacaagguggagaacaugaccccccgggaccugggggcgugcaucgacugcagcgcccgccacaucaacgcccaggucgccaagucccacaacaucgcccugaucuggaacgugaaggacuucaugagccucuccgagcagcugcggaagcagauccgcagcgcggccaagaagaacaaccugcccuucaagcucaccugcgccaccacgcgccagguggucaacguggugaccaccaagaucgcccugaagggcggguga

SEQ ID NO: 17819 - RNA, 5841 nt, Artificial Sequence
  SARS-CoV-2__MT821535.1__non-structural protein 3 (NSP3) CDS gc
auggcccccaccaaggugaccuucggcgacgacacggucaucgaggugcagggguacaagagcgugaacaucaccuucgagcuggacgagcgcaucgacaagguccucaacgagaagugcuccgccuacaccguggagcugggcaccgaggugaacgaguucgcgugcgucguggccgacgccgugaucaagacgcugcagccggucagcgagcuccugaccccccuggggaucgaccucgacgagugguccauggccaccuacuaccuguucgacgagagcggcgaguucaagcuggccucccacauguacugcagcuucuacccccccgacgaggacgaggaggagggggacugcgaggaggaggaguucgagccguccacccaguacgaguacggcacggaggacgacuaccagggcaagccccucgaguucggggcgaccagcgccgcccugcagcccgaggaggagcaggaggaggacuggcuggacgacgacucccagcagaccgugggccagcaggacgggagcgaggacaaccagaccacgaccauccagaccaucguggagguccagccccagcucgagauggagcugaccccgguggugcagacgaucgaggucaacuccuucagcggcuaccugaagcucaccgacaacguguacaucaagaacgccgacaucguggaggaggcgaagaaggucaagcccaccgugguggucaacgccgccaacguguaccugaagcacgggggcggcguggccggggcccugaacaaggcgaccaacaacgccaugcaggucgaguccgacgacuacaucgccacgaacggcccccucaagguggggggcagcugcguccuguccggccacaaccuggccaagcacugccuccacgugguggggcccaacgucaacaagggcgaggacauccagcugcugaagagcgccuacgagaacuucaaccagcacgaggugcuccuggcgccgcugcucuccgccgggaucuucggcgccgaccccauccacagccugcgggugugcgucgacaccgugcgcaccaacguguaccuggccgucuucgacaagaaccucuacgacaagcugguguccagcuuccuggagaugaagagcgagaagcagguggagcagaagaucgccgagauccccaaggaggaggucaagcccuucaucaccgaguccaagccgagcguggagcagcggaagcaggacgacaagaagaucaaggcgugcguggaggaggucacgaccacccucgaggagaccaaguuccugacggagaaccugcuccuguacaucgacaucaacgggaaccugcaccccgacuccgccacccucgugagcgacaucgacaucaccuuccugaagaaggacgcccccuacaucgugggcgacgucgugcaggagggcgugcugaccgccgucgugauccccacgaagaaggccgggggcaccaccgagaugcucgcgaaggcccugcgcaaggugccgaccgacaacuacaucacgaccuaccccgggcagggccugaacggguacaccgucgaggaggccaagaccgugcucaagaagugcaaguccgccuucuacauccugcccagcaucaucuccaacgagaagcaggagauccugggcaccgugagcuggaaccuccgggagaugcuggcgcacgccgaggagacgcgcaagcugaugcccgucugcguggagaccaaggccaucguguccaccauccagcggaaguacaagggcaucaagauccaggagggggucguggacuacggcgcccgcuucuacuucuacaccagcaagacgaccguggccucccugaucaacacccucaacgaccugaacgagacccuggucacgaugccgcucggguacgugacccacggccugaaccuggaggaggcggcccgguacaugcgcagccucaaggugcccgccaccgucuccgugagcucccccgacgccgugaccgccuacaacggguaccugacgagcuccagcaagacccccgaggagcacuucaucgagaccaucucccuggcgggcagcuacaaggacuggagcuacuccggccagagcacccagcucgggaucgaguuccugaagcggggcgacaaguccgucuacuacacgagcaacccgaccaccuuccaccuggacggggaggugaucaccuucgacaaccucaagacgcugcugucccuccgcgaggugcggaccaucaaggucuucaccaccguggacaacaucaaccugcacacgcagguggucgacaugagcaugaccuacggccagcaguucggccccaccuaccuggacggggccgacgugaccaagaucaagccccacaacucccacgagggcaagacguucuacgugcucccgaacgacgacacccugcgcgucgaggccuucgaguacuaccacaccaccgaccccagcuuccuggggcgguacauguccgcccucaaccacacgaagaaguggaaguacccccaggugaacggccugaccagcaucaagugggccgacaacaacugcuaccuggcgaccgcccuccugacccugcagcagaucgagcucaaguucaaccccccggcccugcaggacgccuacuaccgcgcgcgggccggggaggccgccaacuucugcgcccugauccucgcguacugcaacaagacggugggcgagcugggcgacguccgcgagaccauguccuaccuguuccagcacgccaaccucgacagcugcaagcgggugcugaacgucgugugcaagaccugcgggcagcugcagaccacccucaagggcguggaggccgucauguacauggggacgcuguccuacgagcaguucaagaagggcgugcagauccccugcaccugcgggaagcaggccaccaaguaccuggugcagcaggagagccccuucgucaugauguccgcccccccggcgcaguacgagcucaagcacggcaccuucacgugcgccagcgaguacaccggcaacuaccagugcgggcacuacaagcacaucaccuccaaggagacccuguacugcaucgacggcgcccugcucacgaagagcagcgaguacaaggggcccaucaccgacguguucuacaaggagaacuccuacaccaccacgaucaagcccgugaccuacaagcuggacggcgucgugugcaccgagaucgaccccaagcuggacaacuacuacaagaaggacaacagcuacuucaccgagcagccgaucgaccucgugcccaaccagcccuaccccaacgccuccuucgacaacuucaaguucgucugcgacaacaucaaguucgccgacgaccugaaccagcugacgggguacaagaagccggcgagccgcgagcucaaggugaccuucuuccccgaccugaacggcgacguggucgccaucgacuacaagcacuacacccccuccuucaagaagggcgccaagcugcuccacaagcccaucguguggcacgugaacaacgccaccaacaaggcgacguacaagccgaacaccuggugcauccggugccuguggagcaccaagcccgucgagaccuccaacagcuucgacgugcugaaguccgaggacgcccaggggauggacaaccucgccugcgaggaccugaagcccgugagcgaggaggucguggagaaccccacgauccagaaggacgugcuggagugcaacgucaagaccaccgagguggugggcgacaucauccucaagccggccaacaacucccugaagaucaccgaggaggucgggcacacggaccugauggccgcguacguggacaacagcucccucaccaucaagaagcccaacgagcugagccgcgugcugggccucaagacccuggccacccacgggcuggccgccgucaacuccgugcccugggacacgaucgccaacuacgcgaagccguuccucaacaagguggucagcaccaccaccaacaucgugacgcgcugccugaaccgggugugcaccaacuacaugcccuacuucuucacccugcuccugcagcugugcaccuucacccgcuccacgaacagccggaucaaggccuccaugcccaccaccaucgccaagaacaccgucaagagcgugggcaaguucugccucgaggccagcuucaacuaccugaagucccccaacuucagcaagcugaucaacaucaucaucugguuccuccugcuguccgugugccucggcagccugaucuacuccacggccgcgcuggggguccucaugagcaaccugggcaugccguccuacugcaccggguaccgcgagggcuaccugaacagcaccaacgugaccaucgccacguacugcaccggcuccauccccugcagcgugugccucuccgggcuggacagccuggacaccuaccccucccucgagaccauccagaucacgaucagcuccuucaagugggaccugaccgccuucggccuggucgccgagugguuccucgccuacauccuguucacccgguucuucuacgugcuggggcucgcggccaucaugcagcuguucuucagcuacuucgccgugcacuucaucuccaacagcuggcugauguggcugaucaucaaccucguccagauggcccccaucuccgcgauggugcgcauguacaucuucuucgccagcuucuacuacguguggaagagcuacguccacgugguggacggcugcaacuccagcaccugcaugaugugcuacaagcggaaccgcgccacgcgggucgagugcaccaccaucgugaacgggguccgccgguccuucuacguguacgccaacggcggcaagggguucugcaagcugcacaacuggaacugcgugaacugcgacaccuucugcgccggcagcacguucaucuccgacgaggucgcgcgcgaccugagccuccaguucaagcggccgaucaaccccaccgaccaguccagcuacaucguggacuccgugaccgucaagaacgggagcauccaccuguacuucgacaaggccggccagaagaccuacgagcgccacucccugagccacuucgugaaccucgacaaccugcgggccaacaacacgaaggggucccugcccaucaacgugaucgucuucgacggcaagagcaagugcgaggaguccagcgccaaguccgccagcguguacuacucccagcucaugugccagcccauccugcugcucgaccaggcgcuggugagcgacgucggcgacagcgccgagguggccgugaagauguucgacgccuacgucaacaccuucuccagcaccuucaacgugccgauggagaagcugaagacccucguggccacggcggaggccgagcuggccaagaacgucucccuggacaacgugcucagcaccuucaucuccgccgcgcgccagggguucguggacagcgacgucgagaccaaggacgugguggagugccugaagcugucccaccagagcgacaucgaggucaccggcgacuccugcaacaacuacaugcucacguacaacaagguggagaacaugaccccccgggaccugggggccugcaucgacugcagcgcccgccacaucaacgcccagguggccaagucccacaacaucgcgcugaucuggaacgucaaggacuucaugagccucuccgagcagcugcggaagcagauccgcagcgccgccaagaagaacaaccugcccuucaagcucaccugcgccaccacgcgccagguggugaacgucgugaccaccaagaucgcccugaagggcggguga

SEQ ID NO: 17820 - RNA, 5841 nt, Artificial Sequence
  SARS-CoV-2__MT821537.1__non-structural protein 3 (NSP3) CDS gc
auggcccccaccaaggugaccuucggcgacgacacggucaucgaggugcagggguacaagagcgugaacaucaccuucgagcuggacgagcgcaucgacaagguccucaacgagaagugcuccgccuacaccguggagcugggcaccgaggugaacgaguucgcgugcgucguggccgacgccgugaucaagacgcugcagccggucagcgagcuccugaccccccuggggaucgaccucgacgagugguccauggccaccuacuaccuguucgacgagagcggcgaguucaagcuggccucccacauguacugcagcuucuacccccccgacgaggacgaggaggagggggacugcgaggaggaggaguucgagccguccacccaguacgaguacggcacggaggacgacuaccagggcaagccccucgaguucggggcgaccagcgccgcccugcagcccgaggaggagcaggaggaggacuggcuggacgacgacucccagcagaccgugggccagcaggacgggagcgaggacaaccagaccacgaccauccagaccaucguggagguccagccccagcucgagauggagcugaccccgguggugcagacgaucgaggucaacuccuucagcggcuaccugaagcucaccgacaacguguacaucaagaacgccgacaucguggaggaggcgaagaaggucaagcccaccgugguggucaacgccgccaacguguaccugaagcacgggggcggcguggccggggcccugaacaaggcgaccaacaacgccaugcaggucgaguccgacgacuacaucgccacgaacggcccccucaagguggggggcagcugcguccuguccggccacaaccuggccaagcacugccuccacgugguggggcccaacgucaacaagggcgaggacauccagcugcugaagagcgccuacgagaacuucaaccagcacgaggugcuccuggcgccgcugcucuccgccgggaucuucggcgccgaccccauccacagccugcgggugugcgucgacaccgugcgcaccaacguguaccuggccgucuucgacaagaaccucuacgacaagcugguguccagcuuccuggagaugaagagcgagaagcagguggagcagaagaucgccgagauccccaaggaggaggucaagcccuucaucaccgaguccaagccgagcguggagcagcggaagcaggacgacaagaagaucaaggcgugcguggaggaggucacgaccacccucgaggagaccaaguuccugacggagaaccugcuccuguacaucgacaucaacgggaaccugcaccccgacuccgccacccucgugagcgacaucgacaucaccuuccugaagaaggacgcccccuacaucgugggcgacgucgugcaggagggcgugcugaccgccgucgugauccccacgaagaaggccgggggcaccaccgagaugcucgcgaaggcccugcgcaaggugccgaccgacaacuacaucacgaccuaccccgggcagggccugaacggguacaccgucgaggaggccaagaccgugcucaagaagugcaaguccgccuucuacauccugcccagcaucaucuccaacgagaagcaggagauccugggcaccgugagcuggaaccuccgggagaugcuggcgcacgccgaggagacgcgcaagcugaugcccgucugcguggagaccaaggccaucguguccaccauccagcggaaguacaagggcaucaagauccaggagggggucguggacuacggcgcccgcuucuacuucuacaccagcaagacgaccguggccucccugaucaacacccucaacgaccugaacgagacccuggucacgaugccgcucggguacgugacccacggccugaaccuggaggaggcggcccgguacaugcgcagccucaaggugcccgccaccgucuccgugagcucccccgacgccgugaccgccuacaacggguaccugacgagcuccagcaagacccccgaggagcacuucaucgagaccaucucccuggcgggcagcuacaaggacuggagcuacuccggccagagcacccagcucgggaucgaguuccugaagcggggcgacaaguccgucuacuacacgagcaacccgaccaccuuccaccuggacggggaggugaucaccuucgacaaccucaagacgcugcugucccuccgcgaggugcggaccaucaaggucuucaccaccguggacaacaucaaccugcacacgcagguggucgacaugagcaugaccuacggccagcaguucggccccaccuaccuggacggggccgacgugaccaagaucaagccccacaacucccacgagggcaagacguucuacgugcucccgaacgacgacacccugcgcgucgaggccuucgaguacuaccacaccaccgaccccagcuuccuggggcgguacauguccgcccucaaccacacgaagaaguggaaguacccccaggugaacggccugaccagcaucaagugggccgacaacaacugcuaccuggcgaccgcccuccugacccugcagcagaucgagcucaaguucaaccccccggcccugcaggacgccuacuaccgcgcgcgggccggggaggccgccaacuucugcgcccugauccucgcguacugcaacaagacggugggcgagcugggcgacguccgcgagaccauguccuaccuguuccagcacgccaaccucgacagcugcaagcgggugcugaacgucgugugcaagaccugcgggcagcagcagaccacccugaagggcguggaggccgucauguacauggggacgcucuccuacgagcaguucaagaagggcgugcagauccccugcaccugcgggaagcaggccaccaaguaccuggugcagcaggagagccccuucgucaugauguccgcccccccggcgcaguacgagcugaagcacggcaccuucacgugcgccagcgaguacaccggcaacuaccagugcgggcacuacaagcacaucaccuccaaggagacccucuacugcaucgacggcgugcugcugacgaagagcagcgaguacaaggggcccaucaccgacguguucuacaaggagaacuccuacaccaccacgaucaagcccgucaccuacaagcucgacggcguggugugcaccgagaucgaccccaagcuggacaacuacuacaagaaggacaacagcuacuucaccgagcagccgaucgaccugguccccaaccagcccuaccccaacgccuccuucgacaacuucaaguucgugugcgacaacaucaaguucgccgacgaccucaaccagcugacgggguacaagaagccggccagccgcgagcugaaggugaccuucuuccccgaccucaacggcgacgucguggcgaucgacuacaagcacuacacccccuccuucaagaagggcgccaagcugcugcacaagcccaucguguggcacgucaacaacgccaccaacaaggccacguacaagccgaacaccuggugcauccggugccucuggagcaccaagcccguggagaccuccaacagcuucgacgugcugaaguccgaggacgcgcaggggauggacaaccuggccugcgaggaccucaagcccgucagcgaggaggugguggagaaccccacgauccagaaggacguccuggagugcaacgugaagaccaccgagguggucggcgacaucauccugaagccggccaacaacucccucaagaucaccgaggagguggggcacacggaccugauggccgccuacguggacaacagcucccugaccaucaagaagcccaacgagcucagccgcguccugggccugaagacccucgcgacccacgggcuggccgccgugaacuccgugcccugggacacgaucgccaacuacgccaagccguuccugaacaaggucgugagcaccaccaccaacaucgugacgcgcugccucaaccgggucugcaccaacuacaugcccuacuucuucacccugcugcuccagcugugcaccuucacccgcuccacgaacagccggaucaaggcguccaugcccaccaccaucgccaagaacaccgugaagagcgugggcaaguucugccuggaggccagcuucaacuaccucaagucccccaacuucagcaagcugaucaacaucaucaucugguuccugcuccuguccgucugccugggcagccucaucuacuccacggccgcccugggggugcugaugagcaaccucggcaugccguccuacugcaccggguaccgcgagggcuaccugaacagcaccaacgugaccaucgcgacguacugcaccggcuccauccccugcagcgucugccuguccgggcucgacagccuggacaccuaccccucccuggagaccauccagaucacgaucagcuccuucaagugggaccucaccgccuucggccugguggccgagugguuccuggccuacauccucuucacccgguucuucuacgugcuggggcuggccgcgaucaugcagcucuucuucagcuacuucgccguccacuucaucuccaacagcuggcugauguggcugaucaucaaccuggugcagauggcccccaucuccgccauggugcgcauguacaucuucuucgcgagcuucuacuacgucuggaagagcuacgugcacguggucgacggcugcaacuccagcaccugcaugaugugcuacaagcggaaccgcgccacgcggguggagugcaccaccaucgucaacggggugcgccgguccuucuacguguacgccaacggcggcaagggguucugcaagcuccacaacuggaacugcgucaacugcgacaccuucugcgccggcagcacguucaucuccgacgagguggcccgcgaccugagccugcaguucaagcggccgaucaaccccaccgaccaguccagcuacaucguggacuccgucaccgugaagaacgggagcauccaccucuacuucgacaaggcgggccagaagaccuacgagcgccacucccugagccacuucgugaaccuggacaaccuccgggccaacaacacgaaggggucccugcccaucaacgucaucguguucgacggcaagagcaagugcgaggaguccagcgccaaguccgccagcguguacuacucccagcugaugugccagcccauccuccugcuggaccaggcccucgucagcgacgugggcgacagcgcggagguggccgucaagauguucgacgccuacgugaacaccuucuccagcaccuucaacgugccgauggagaagcugaagacccuggucgccacggccgaggcggagcucgccaagaacgugucccuggacaacgugcugagcaccuucaucuccgccgcccgccagggguucgucgacagcgacguggagaccaaggacguggucgagugccucaagcugucccaccagagcgacaucgaggugaccggcgacuccugcaacaacuacaugcugacguacaacaagguggagaacaugaccccccgggaccucggggcgugcaucgacugcagcgcccgccacaucaacgcccaggucgccaagucccacaacaucgcccugaucuggaacgugaaggacuucaugagccuguccgagcagcuccggaagcagauccgcagcgcggccaagaagaacaaccugcccuucaagcugaccugcgccaccacgcgccagguggucaacguggugaccaccaagaucgcccucaagggcggguga

SEQ ID NO: 17821 - RNA, 5841 nt, Artificial Sequence
  SARS-CoV-2__MT821555.1__non-structural protein 3 (NSP3) CDS gc
auggcccccaccaaggugaccuucggcgacgacacggucaucgaggugcagggguacaagagcgugaacaucaccuucgagcuggacgagcgcaucgacaagguccucaacgagaagugcuccgccuacaccguggagcugggcaccgaggugaacgaguucgcgugcgucguggccgacgccgugaucaagacgcugcagccggucagcgagcuccugaccccccuggggaucgaccucgacgagugguccauggccaccuacuaccuguucgacgagagcggcgaguucaagcuggccucccacauguacugcagcuucuacccccccgacgaggacgaggaggagggggacugcgaggaggaggaguucgagccguccacccaguacgaguacggcacggaggacgacuaccagggcaagccccucgaguucggggcgaccagcgccgcccugcagcccgaggaggagcaggaggaggacuggcuggacgacgacucccagcagaccgugggccagcaggacgggagcgaggacaaccagaccacgaccauccagaccaucguggagguccagccccagcucgagauggagcugaccccgguggugcagacgaucgaggucaacuccuucagcggcuaccugaagcucaccgacaacguguacaucaagaacgccgacaucguggaggaggcgaagaaggucaagcccaccgugguggucaacgccgccaacguguaccugaagcacgggggcggcguggccggggcccugaacaaggcgaccaacaacgccaugcaggucgaguccgacgacuacaucgccacgaacggcccccucaagguggggggcagcugcguccuguccggccacaaccuggccaagcacugccuccacgugguggggcccaacgucaacaagggcgaggacauccagcugcugaagagcgccuacgagaacuucaaccagcacgaggugcuccuggcgccgcugcucuccgccgggaucuucggcgccgaccccauccacagccugcgggugugcgucgacaccgugcgcaccaacguguaccuggccgucuucgacaagaaccucuacgacaagcugguguccagcuuccuggagaugaagagcgagaagcagguggagcagaagaucgccgagauccccaaggaggaggucaagcccuucaucaccgaguccaagccgagcguggagcagcggaagcaggacgacaagaagaucaaggcgugcguggaggaggucacgaccacccucgaggagaccaaguuccugacggagaaccugcuccuguacaucgacaucaacgggaaccugcaccccgacuccgccacccucgugagcgacaucgacaucaccuuccugaagaaggacgcccccuacaucgugggcgacgucgugcaggagggcgugcugaccgccgucgugauccccacgaagaaggccgggggcaccaccgagaugcucgcgaaggcccugcgcaaggugccgaccgacaacuacaucacgaccuaccccgggcagggccugaacggguacaccgucgaggaggccaagaccgugcucaagaagugcaaguccgccuucuacauccugcccagcaucaucuccaacgagaagcaggagauccugggcaccgugagcuggaaccuccgggagaugcuggcgcacgccgaggagacgcgcaagcugaugcccgucugcguggagaccaaggugaucgucuccaccauccagcggaaguacaagggcaucaagauccaggagggggugguggacuacggcgcccgcuucuacuucuacaccagcaagacgaccgucgccucccugaucaacacccucaacgaccugaacgagacccuggugacgaugccgcucggguacgugacccacggccugaaccuggaggaggccgcgcgguacaugcgcagccucaagguccccgccaccguguccgugagcucccccgacgccgucaccgccuacaacggguaccugacgagcuccagcaagacccccgaggagcacuucaucgagaccaucucccuggccggcagcuacaaggacuggagcuacuccggccagagcacccagcucgggaucgaguuccugaagcggggcgacaaguccguguacuacacgagcaacccgaccaccuuccaccuggacggggaggugaucaccuucgacaaccucaagacgcugcugucccuccgcgagguccggaccaucaagguguucaccaccguggacaacaucaaccugcacacgcaggucguggacaugagcaugaccuacggccagcaguucggccccaccuaccuggacggggcggacgugaccaagaucaagccccacaacucccacgagggcaagacguucuacguccucccgaacgacgacacccugcgcguggaggccuucgaguacuaccacaccaccgaccccagcuuccuggggcgguacauguccgcccucaaccacacgaagaaguggaaguacccccaggugaacggccugaccagcaucaagugggccgacaacaacugcuaccuggccaccgcgcuccugacccugcagcagaucgagcucaaguucaaccccccggcccugcaggacgccuacuaccgcgcccgggcgggggaggccgccaacuucugcgcccugauccucgccuacugcaacaagacggucggcgagcugggcgacgugcgcgagaccauguccuaccuguuccagcacgcgaaccucgacagcugcaagcggguccugaacguggugugcaagaccugcgggcagcagcagaccacccugaagggcgucgaggccgugauguacauggggacgcucuccuacgagcaguucaagaagggcgugcagauccccugcaccugcgggaagcaggccaccaaguaccugguccagcaggagagccccuucgugaugauguccgcccccccggcccaguacgagcugaagcacggcaccuucacgugcgcgagcgaguacaccggcaacuaccagugcgggcacuacaagcacaucaccuccaaggagacccucuacugcaucgacggcgcccugcugacgaagagcagcgaguacaaggggcccaucaccgacguguucuacaaggagaacuccuacaccaccacgaucaagcccgucaccuacaagcucgacggcguggugugcaccgagaucgaccccaagcuggacaacuacuacaagaaggacaacagcuacuucaccgagcagccgaucgaccugguccccaaccagcccuaccccaacgccuccuucgacaacuucaaguucgugugcgacaacaucaaguucgccgacgaccucaaccagcugacgggguacaagaagccggccagccgcgagcugaaggugaccuucuuccccgaccucaacggcgacgucguggcgaucgacuacaagcacuacacccccuccuucaagaagggcgccaagcugcugcacaagcccaucguguggcacgucaacaacgccaccaacaaggccacguacaagccgaacaccuggugcauccggugccucuggagcaccaagcccguggagaccuccaacagcuucgacgugcugaaguccgaggacgcgcaggggauggacaaccuggccugcgaggaccucaagcccgucagcgaggaggugguggagaaccccacgauccagaaggacguccuggagugcaacgugaagaccaccgagguggucggcgacaucauccugaagccggccaacaacucccucaagaucaccgaggagguggggcacacggaccugauggccgccuacguggacaacagcucccugaccaucaagaagcccaacgagcucagccgcguccugggccugaagacccucgcgacccacgggcuggccgccgugaacuccgugcccugggacacgaucgccaacuacgccaagccguuccugaacaaggucgugagcaccaccaccaacaucgugacgcgcugccucaaccgggucugcaccaacuacaugcccuacuucuucacccugcugcuccagcugugcaccuucacccgcuccacgaacagccggaucaaggcguccaugcccaccaccaucgccaagaacaccgugaagagcgugggcaaguucugccuggaggccagcuucaacuaccucaagucccccaacuucagcaagcugaucaacaucaucaucugguuccugcuccuguccgucugccugggcagccucaucuacuccacggccgcccugggggugcugaugagcaaccucggcaugccguccuacugcaccggguaccgcgagggcuaccugaacagcaccaacgugaccaucgcgacguacugcaccggcuccauccccugcagcgucugccuguccgggcucgacagccuggacaccuaccccucccuggagaccauccagaucacgaucagcuccuucaagugggaccucaccgccuucggccugguggccgagugguuccuggccuacauccucuucacccgguucuucuacgugcuggggcuggccgcgaucaugcagcucuucuucagcuacuucgccguccacuucaucuccaacagcuggcugauguggcugaucaucaaccuggugcagauggcccccaucuccgccauggugcgcauguacaucuucuucgcgagcuucuacuacgucuggaagagcuacgugcacguggucgacggcugcaacuccagcaccugcaugaugugcuacaagcggaaccgcgccacgcggguggagugcaccaccaucgucaacggggugcgccgguccuucuacguguacgccaacggcggcaagggguucugcaagcuccacaacuggaacugcgucaacugcgacaccuucugcgccggcagcacguucaucuccgacgagguggcccgcgaccugagccugcaguucaagcggccgaucaaccccaccgaccaguccagcuacaucguggacuccgucaccgugaagaacgggagcauccaccucuacuucgacaaggcgggccagaagaccuacgagcgccacucccugagccacuucgugaaccuggacaaccuccgggccaacaacacgaaggggucccugcccaucaacgucaucguguucgacggcaagagcaagugcgaggaguccagcgccaaguccgccagcguguacuacucccagcugaugugccagcccauccuccugcuggaccaggcccucgucagcgacgugggcgacagcgcggagguggccgucaagauguucgacgccuacgugaacaccuucuccagcaccuucaacgugccgauggagaagcugaagacccuggucgccacggccgaggcggagcucgccaagaacgugucccuggacaacgugcugagcaccuucaucuccgccgcccgccagggguucgucgacagcgacguggagaccaaggacguggucgagugccucaagcugucccaccagagcgacaucgaggugaccggcgacuccugcaacaacuacaugcugacguacaacaagguggagaacaugaccccccgggaccucggggcgugcaucgacugcagcgcccgccacaucaacgcccaggucgccaagucccacaacaucgcccugaucuggaacgugaaggacuucaugagccuguccgagcagcuccggaagcagauccgcagcgcggccaagaagaacaaccugcccuucaagcugaccugcgccaccacgcgccagguggucaacguggugaccaccaagaucgcccucaagggcggguga

SEQ ID NO: 17822 - RNA, 5841 nt, Artificial Sequence
  SARS-CoV-2__MT821568.1__non-structural protein 3 (NSP3) CDS gc
auggcccccaccaaggugaccuucggcgacgacacggucaucgaggugcagggguacaagagcgugaacaucaccuucgagcuggacgagcgcaucgacaagguccucaacgagaagugcuccgccuacaccguggagcugggcaccgaggugaacgaguucgcgugcgucguggccgacgccgugaucaagacgcugcagccggucagcgagcuccugaccccccuggggaucgaccucgacgagugguccauggccaccuacuaccuguucgacgagagcggcgaguucaagcuggccucccacauguacugcagcuucuacccccccgacgaggacgaggaggagggggacugcgaggaggaggaguucgagccguccacccaguacgaguacggcacggaggacgacuaccagggcaagccccucgaguucggggcgaccagcgccgcccugcagcccgaggaggagcaggaggaggacuggcuggacgacgacucccagcagaccgugggccagcaggacgggagcgaggacaaccagaccacgaccauccagaccaucguggagguccagccccagcucgagauggagcugaccccgguggugcagacgaucgaggucaacuccuucagcggcuaccugaagcucaccgacaacguguacaucaagaacgccgacaucguggaggaggcgaagaaggucaagcccaccgugguggucaacgccgccaacguguaccugaagcacgggggcggcguggccggggcccugaacaaggcgaccaacaacgccaugcaggucgaguccgacgacuacaucgccacgaacggcccccucaagguggggggcagcugcguccuguccggccacaaccuggccaagcacugccuccacgugguggggcccaacgucaacaagggcgaggacauccagcugcugaagagcgccuacgagaacuucaaccagcacgaggugcuccuggcgccgcugcucuccgccgggaucuucggcgccgaccccauccacagccugcgggugugcgucgacaccgugcgcaccaacguguaccuggccgucuucgacaagaaccucuacgacaagcugguguccagcuuccuggagaugaagagcgagaagcagguggagcagaagaucgccgagauccccaaggaggaggucaagcccuucaucaccgaguccaagccgagcguggagcagcggaagcaggacgacaagaagaucaaggcgugcguggaggaggucacgaccacccucgaggagaccaaguuccugacggagaaccugcuccuguacaucgacaucaacgggaaccugcaccccgacuccgccacccucgugagcgacaucgacaucaccuuccugaagaaggacgcccccuacaucgugggcgacgucgugcaggagggcgugcugaccgccgucgugauccccacgaagaaggccgggggcaccaccgagaugcucgcgaaggcccugcgcaaggugccgaccgacaacuacaucacgaccuaccccgggcagggccugaacggguacaccgucgaggaggccaagaccgugcucaagaagugcaaguccgccuucuacauccugcccagcaucaucuccaacgagaagcaggagauccugggcaccgugagcuggaaccuccgggagaugcuggcgcacgccgaggagacgcgcaagcugaugcccgucugcguggagaccaaggccaucguguccaccauccagcggaaguacaagggcaucaagauccaggagggggucguggacuacggcgcccgcuucuacuucuacaccagcaagacgaccguggccucccugaucaacacccucaacgaccugaacgagacccuggucacgaugccgcucggguacgugacccacggccugaaccuggaggaggcggcccgguacaugcgcagccucaaggugcccgccaccgucuccgugagcucccccgacgccgugaccgccuacaacggguaccugacgagcuccagcaagacccccgaggagcacuucaucgagaccaucucccuggcgggcagcuacaaggacuggagcuacuccggccagagcacccagcucgggaucgaguuccugaagcggggcgacaaguccgucuacuacacgagcaacccgaccaccuuccaccuggacggggaggugaucaccuucgacaaccucaagacgcugcugucccuccgcgaggugcggaccaucaaggucuucaccaccguggacaacaucaaccugcacacgcagguggucgacaugagcaugaccuacggccagcaguucggccccaccuaccuggacggggccgacgugaccaagaucaagccccacaacucccacgagggcaagacguucuacgugcucccgaacgacgacacccugcgcgucgaggccuucgaguacuaccacaccaccgaccccagcuuccuggggcgguacauguccgcccucaaccacacgaagaaguggaaguacccccaggugaacggccugaccagcaucaagugggccgacaacaacugcuaccuggcgaccgcccuccugacccugcagcagaucgagcucaaguucaaccccccggcccugcaggacgccuacuaccgcgcgcgggccggggaggccgccaacuucugcgcccugauccucgcguacugcaacaagacggugggcgagcugggcgacguccgcgagaccauguccuaccuguuccagcacgccaaccucgacagcugcaagcgggugcugaacgucgugugcaagaccugcgggcagcagcagaccacccugaagggcguggaggccgucauguacauggggacgcucuccuacgagcaguucaagaagggcgugcagauccccugcaccugcgggaagcaggccaccaaguaccuggugcagcaggagagccccuucgucaugauguccgcccccccggcgcaguacgagcugaagcacggcaccuucacgugcgccagcgaguacaccggcaacuaccagugcgggcacuacaagcacaucaccuccaaggagacccucuacugcaucgacggcgcccugcugacgaagagcagcgaguacaaggggcccaucaccgacguguucuacaaggagaacuccuacaccaccacgaucaagcccgugaccuacaagcucgacggcgucgugugcaccgagaucgaccccaagcuggacaacuacuacaagaaggacaacagcuacuucaccgagcagccgaucgaccuggugcccaaccagccccaccccaacgccuccuucgacaacuucaaguucgucugcgacaacaucaaguucgccgacgaccucaaccagcugacgggguacaagaagccggcgagccgcgagcugaaggugaccuucuuccccgaccucaacggcgacguggucgccaucgacuacaagcacuacacccccuccuucaagaagggcgccaagcugcugcacaagcccaucguguggcacgugaacaacgccaccaacaaggcgacguacaagccgaacaccuggugcauccggugccucuggagcaccaagcccgucgagaccuccaacagcuucgacgugcugaaguccgaggacgcccaggggauggacaaccuggccugcgaggaccucaagcccgugagcgaggaggucguggagaaccccacgauccagaaggacgugcuggagugcaacgucaagaccaccgagguggugggcgacaucauccugaagccggccaacaacucccucaagaucaccgaggaggucgggcacacggaccugauggccgcguacguggacaacagcucccugaccaucaagaagcccaacgagcucagccgcgugcugggccugaagacccucgccacccacgggcuggccgccgucaacuccgugcccugggacacgaucgccaacuacgcgaagccguuccugaacaagguggucagcaccaccaccaacaucgugacgcgcugccucaaccgggugugcaccaacuacaugcccuacuucuucacccugcugcuccagcugugcaccuucacccgcuccacgaacagccggaucaaggccuccaugcccaccaccaucgccaagaacaccgucaagagcgugggcaaguucugccuggaggccagcuucaacuaccucaagucccccaacuucagcaagcugaucaacaucaucaucugguuccugcuccuguccgugugccugggcagccucaucuacuccacggccgcgcuggggguccugaugagcaaccucggcaugccguccuacugcaccggguaccgcgagggcuaccugaacagcaccaacgugaccaucgccacguacugcaccggcuccauccccugcagcgugugccuguccgggcucgacagccuggacaccuaccccucccuggagaccauccagaucacgaucagcuccuucaagugggaccucaccgccuucggccuggucgccgagugguuccuggccuacauccucuucacccgguucuucuacgugcuggggcuggcggccaucaugcagcucuucuucagcuacuucgccgugcacuucaucuccaacagcuggcugauguggcugaucaucaaccugguccagauggcccccaucuccgcgauggugcgcauguacaucuucuucgccagcuucuacuacguguggaagagcuacguccacgugguggacggcugcaacuccagcaccugcaugaugugcuacaagcggaaccgcgccacgcgggucgagugcaccaccaucgugaacgggguccgccgguccuucuacguguacgccaacggcggcaagggguucugcaagcuccacaacuggaacugcgugaacugcgacaccuucugcgccggcagcacguucaucuccgacgaggucgcgcgcgaccugagccugcaguucaagcggccgaucaaccccaccgaccaguccagcuacaucguggacuccgugaccgucaagaacgggagcauccaccucuacuucgacaaggccggccagaagaccuacgagcgccacucccugagccacuucgugaaccuggacaaccuccgggccaacaacacgaaggggucccugcccaucaacgugaucgucuucgacggcaagagcaagugcgaggaguccagcgccaaguccgccagcguguacuacucccagcugaugugccagcccauccuccugcuggaccaggcgcucgugagcgacgucggcgacagcgccgagguggccgugaagauguucgacgccuacgucaacaccuucuccagcaccuucaacgugccgauggagaagcugaagacccugguggccacggcggaggccgagcucgccaagaacgucucccuggacaacgugcugagcaccuucaucuccgccgcgcgccagggguucguggacagcgacgucgagaccaaggacgugguggagugccucaagcugucccaccagagcgacaucgaggucaccggcgacuccugcaacaacuacaugcugacguacaacaagguggagaacaugaccccccgggaccucggggccugcaucgacugcagcgcccgccacaucaacgcccagguggccaagucccacaacaucgcgcugaucuggaacgucaaggacuucaugagccuguccgagcagcuccggaagcagauccgcagcgccgccaagaagaacaaccugcccuucaagcugaccugcgccaccacgcgccagguggugaacgucgugaccaccaagaucgcccucaagggcggguga

SEQ ID NO: 17823 - RNA, 5841 nt, Artificial Sequence
  SARS-CoV-2__MT821572.1__non-structural protein 3 (NSP3) CDS gc
auggcccccaccaaggugaccuucggcgacgacacggucaucgaggugcagggguacaagagcgugaacaucaccuucgagcuggacgagcgcaucgacaagguccucaacgagaagugcuccgccuacaccguggagcugggcaccgaggugaacgaguucgcgugcgucguggccgacgccgugaucaagacgcugcagccggucagcgagcuccugaccccccuggggaucgaccucgacgagugguccauggccaccuacuaccuguucgacgagagcggcgaguucaagcuggccucccacauguacugcagcuucuacccccccgacgaggacgaggaggagggggacugcgaggaggaggaguucgagccguccacccaguacgaguacggcacggaggacgacuaccagggcaagccccucgaguucggggcgaccagcgccgcccugcagcccgaggaggagcaggaggaggacuggcuggacgacgacucccagcagaccgugggccagcaggacgggagcgaggacaaccagaccacgaccauccagaccaucguggagguccagccccagcucgagauggagcugaccccgguggugcagacgaucgaggucaacuccuucagcggcuaccugaagcucaccgacaacguguacaucaagaacgccgacaucguggaggaggcgaagaaggucaagcccaccgugguggucaacgccgccaacguguaccugaagcacgggggcggcguggccggggcccugaacaaggcgaccaacaacgccaugcaggucgaguccgacgacuacaucgccacgaacggcccccucaagguggggggcagcugcguccuguccggccacaaccuggccaagcacugccuccacgugguggggcccaacgucaacaagggcgaggacauccagcugcugaagagcgccuacgagaacuucaaccagcacgaggugcuccuggcgccgcugcucuccgccgggaucuucggcgccgaccccauccacagccugcgggugugcgucgacaccgugcgcaccaacguguaccuggccgucuucgacaagaaccucuacgacaagcugguguccagcuuccuggagaugaagagcgagaagcagguggagcagaagaucgccgagauccccaaggaggaggucaagcccuucaucaccgaguccaagccgagcguggagcagcggaagcaggacgacaagaagaucaaggcgugcguggaggaggucacgaccacccucgaggagaccaaguuccugacggagaaccugcuccuguacaucgacaucaacgggaaccugcaccccgacuccgccacccucgugagcgacaucgacaucaccuuccugaagaaggacgcccccuacaucgugggcgacgucgugcaggagggcgugcugaccgccgucgugauccccacgaagaaggccgggggcaccaccgagaugcucgcgaaggcccugcgcaaggugccgaccgacaacuacaucacgaccuaccccgggcagggccugaacggguacaccgucgaggaggccaagaccgugcucaagaagugcaaguccgccuucuacauccugcccagcaucaucuccaacgagaagcaggagauccugggcaccgugagcuggaaccuccgggagauccuggcgcacgccgaggagacgcgcaagcugaugcccgucugcguggagaccaaggccaucguguccaccauccagcggaaguacaagggcaucaagauccaggagggggucguggacuacggcgcccgcuucuacuucuacaccagcaagacgaccguggccucccugaucaacacccucaacgaccugaacgagacccuggucacgaugccgcucggguacgugacccacggccugaaccuggaggaggcggcccgguacaugcgcagccucaaggugcccgccaccgucuccgugagcucccccgacgccgugaccgccuacaacggguaccugacgagcuccagcaagacccccgaggagcacuucaucgagaccaucucccuggcgggcagcuacaaggacuggagcuacuccggccagagcacccagcucgggaucgaguuccugaagcggggcgacaaguccgucuacuacacgagcaacccgaccaccuuccaccuggacggggaggugaucaccuucgacaaccucaagacgcugcugucccuccgcgaggugcggaccaucaaggucuucaccaccguggacaacaucaaccugcacacgcagguggucgacaugagcaugaccuacggccagcaguucggccccaccuaccuggacggggccgacgugaccaagaucaagccccacaacucccacgagggcaagacguucuacgugcucccgaacgacgacacccugcgcgucgaggccuucgaguacuaccacaccaccgaccccagcuuccuggggcgguacauguccgcccucaaccacacgaagaaguggaaguacccccaggugaacggccugaccagcaucaagugggccgacaacaacugcuaccuggcgaccgcccuccugacccugcagcagaucgagcucaaguucaaccccccggcccugcaggacgccuacuaccgcgcgcgggccggggaggccgccaacuucugcgcccugauccucgcguacugcaacaagacggugggcgagcugggcgacguccgcgagaccauguccuaccuguuccagcacgccaaccucgacagcugcaagcgggugcugaacgucgugugcaagaccugcgggcagcagcagaccacccugaagggcguggaggccgucauguacauggggacgcucuccuacgagcaguucaagaagggcgugcagauccccugcaccugcgggaagcaggccaccaaguaccuggugcagcaggagagccccuucgucaugauguccgcccccccggcgcaguacgagcugaagcacggcaccuucacgugcgccagcgaguacaccggcaacuaccagugcgggcacuacaagcacaucaccuccaaggagacccucuacugcaucgacggcgcccugcugacgaagagcagcgaguacaaggggcccaucaccgacguguucuacaaggagaacuccuacaccaccacgaucaagcccgugaccuacaagcucgacggcgucgugugcaccgagaucgaccccaagcuggacaacuacuacaagaaggacaacagcuacuucaccgagcagccgaucgaccuggugcccaaccagcccuaccccaacgccuccuucgacaacuucaaguucgucugcgacaacaucaaguucgccgacgaccucaaccagcugacgggguacaagaagccggcgagccgcgagcugaaggugaccuucuuccccgaccucaacggcgacguggucgccaucgacuacaagcacuacacccccuccuucaagaagggcgccaagcugcugcacaagcccaucguguggcacgugaacaacgccaccaacaaggcgacguacaagccgaacaccuggugcauccggugccucuggagcaccaagcccgucgagaccuccaacagcuucgacgugcugaaguccgaggacgcccaggggauggacaaccuggccugcgaggaccucaagcccgugagcgaggaggucguggagaaccccacgauccagaaggacgugcuggagugcaacgucaagaccaccgagguggugggcgacaucauccugaagccggccaacaacucccucaagaucaccgaggaggucgggcacacggaccugauggccgcguacguggacaacagcucccugaccaucaagaagcccaacgagcucagccgcgugcugggccugaagacccucgccacccacgggcuggccgccgucaacuccgugcccugggacacgaucgccaacuacgcgaagccguuccugaacaagguggucagcaccaccaccaacaucgugacgcgcugccucaaccgggugugcaccaacuacaugcccuacuucuucacccugcugcuccagcugugcaccuucacccgcuccacgaacagccggaucaaggccuccaugcccaccaccaucgccaagaacaccgucaagagcgugggcaaguucugccuggaggccagcuucaacuaccucaagucccccaacuucagcaagcugaucaacaucaucaucugguuccugcuccuguccgugugccugggcagccucaucuacuccacggccgcgcuggggguccugaugagcaaccucggcaugccguccuacugcaccggguaccgcgagggcuaccugaacagcaccaacgugaccaucgccacguacugcaccggcuccauccccugcagcgugugccuguccgggcucgacagccuggacaccuaccccucccuggagaccauccagaucacgaucagcuccuucaagugggaccucaccgccuucggccuggucgccgagugguuccuggccuacauccucuucacccgguucuucuacgugcuggggcuggcggccaucaugcagcucuucuucagcuacuucgccgugcacuucaucuccaacagcuggcugauguggcugaucaucaaccugguccagauggcccccaucuccgcgauggugcgcauguacaucuucuucgccagcuucuacuacguguggaagagcuacguccacgugguggacggcugcaacuccagcaccugcaugaugugcuacaagcggaaccgcgccacgcgggucgagugcaccaccaucgugaacgggguccgccgguccuucuacguguacgccaacggcggcaagggguucugcaagcuccacaacuggaacugcgugaacugcgacaccuucugcgccggcagcacguucaucuccgacgaggucgcgcgcgaccugagccugcaguucaagcggccgaucaaccccaccgaccaguccagcuacaucguggacuccgugaccgucaagaacgggagcauccaccucuacuucgacaaggccggccagaagaccuacgagcgccacucccugagccacuucgugaaccuggacaaccuccgggccaacaacacgaaggggucccugcccaucaacgugaucgucuucgacggcaagagcaagugcgaggaguccagcgccaaguccgccagcguguacuacucccagcugaugugccagcccauccuccugcuggaccaggcgcucgugagcgacgucggcgacagcgccgagguggccgugaagauguucgacgccuacgucaacaccuucuccagcaccuucaacgugccgauggagaagcugaagacccugguggccacggcggaggccgagcucgccaagaacgucucccuggacaacgugcugagcaccuucaucuccgccgcgcgccagggguucguggacagcgacgucgagaccaaggacgugguggagugccucaagcugucccaccagagcgacaucgaggucaccggcgacuccugcaacaacuacaugcugacguacaacaagguggagaacaugaccccccgggaccucggggccugcaucgacugcagcgcccgccacaucaacgcccagguggccaagucccacaacaucgcgcugaucuggaacgucaaggacuucaugagccuguccgagcagcuccggaagcagauccgcagcgccgccaagaagaacaaccugcccuucaagcugaccugcgccaccacgcgccagguggugaacgucgugaccaccaagaucgcccucaagggcggguga

SEQ ID NO: 17824 - RNA, 5841 nt, Artificial Sequence
  SARS-CoV-2__MT821610.1__non-structural protein 3 (NSP3) CDS gc
auggcccccaccaaggugaccuucggcgacgacacggucaucgaggugcagggguacaagagcgugaacaucaccuucgagcuggacgagcgcaucgacaagguccucaacgagaagugcuccgccuacaccguggagcugggcaccgaggugaacgaguucgcgugcgucguggccgacgccgugaucaagacgcugcagccggucagcgagcuccugaccccccuggggaucgaccucgacgagugguccauggccaccuacuaccuguucgacgagagcggcgaguucaagcuggccucccacauguacugcagcuucuacccccccgacgaggacgaggaggagggggacugcgaggaggaggaguucgagccguccacccaguacgaguacggcacggaggacgacuaccagggcaagccccucgaguucggggcgaccagcgccgcccugcagcccgaggaggagcaggaggaggacuggcuggacgacgacucccagcagaccgugggccagcaggacgggagcgaggacaaccagaccacgaccauccagaccaucguggagguccagccccagcucgagauggagcugaccccgguggugcacacgaucgaggucaacuccuucagcggcuaccugaagcucaccgacaacguguacaucaagaacgccgacaucguggaggaggcgaagaaggucaagcccaccgugguggucaacgccgccaacguguaccugaagcacgggggcggcguggccggggcccugaacaaggcgaccaacaacgccaugcaggucgaguccgacgacuacaucgccacgaacggcccccucaagguggggggcagcugcguccuguccggccacaaccuggccaagcacugccuccacgugguggggcccaacgucaacaagggcgaggacauccagcugcugaagagcgccuacgagaacuucaaccagcacgaggugcuccuggcgccgcugcucuccgccgggaucuucggcgccgaccccauccacagccugcgggugugcgucgacaccgugcgcaccaacguguaccuggccgucuucgacaagaaccucuacgacaagcugguguccagcuuccuggagaugaagagcgagaagcagguggagcagaagaucgccgagauccccaaggaggaggucaagcccuucaucaccgaguccaagccgagcguggagcagcggaagcaggacgacaagaagaucaaggcgugcguggaggaggucacgaccacccucgaggagaccaaguuccugacggagaaccugcuccuguacaucgacaucaacgggaaccugcaccccgacuccgccacccucgugagcgacaucgacaucaccuuccugaagaaggacgcccccuacaucgugggcgacgucgugcaggagggcgugcugaccgccgucgugauccccacgaagaaggccgggggcaccaccgagaugcucgcgaaggcccugcgcaaggugccgaccgacaacuacaucacgaccuaccccgggcagggccugaacggguacaccgucgaggaggccaagaccgugcucaagaagugcaaguccgccuucuacauccugcccagcaucaucuccaacgagaagcaggagauccugggcaccgugagcuggaaccuccgggagaugcuggcgcacgccgaggagacgcgcaagcugaugcccgucugcguggagaccaaggccaucguguccaccauccagcggaaguacaagggcaucaagauccaggagggggucguggacuacggcgcccgcuucuacuucuacaccagcaagacgaccguggccucccugaucaacacccucaacgaccugaacgagacccuggucacgaugccgcucggguacgugacccacggccugaaccuggaggaggcggcccgguacaugcgcagccucaaggugcccgccaccgucuccgugagcucccccgacgccgugaccgccuacaacggguaccugacgagcuccagcaagacccccgaggagcacuucaucgagaccaucucccuggcgggcagcuacaaggacuggagcuacuccggccagagcacccagcucgggaucgaguuccugaagcggggcgacaaguccgucuacuacacgagcaacccgaccaccuuccaccuggacggggaggugaucaccuucgacaaccucaagacgcugcugucccuccgcgaggugcggaccaucaaggucuucaccaccguggacaacaucaaccugcacacgcagguggucgacaugagcaugaccuacggccagcaguucggccccaccuaccuggacggggccgacgugaccaagaucaagccccacaacucccacgagggcaagacguucuacgugcucccgaacgacgacacccugcgcgucgaggccuucgaguacuaccacaccaccgaccccagcuuccuggggcgguacauguccgcccucaaccacacgaagaaguggaaguacccccaggugaacggccugaccagcaucaagugggccgacaacaacugcuaccuggcgaccgcccuccugacccugcagcagaucgagcucaaguucaaccccccggcccugcaggacgccuacuaccgcgcgcgggccggggaggccgccaacuucugcgcccugauccucgcguacugcaacaagacggugggcgagcugggcgacguccgcgagaccauguccuaccuguuccagcacgccaaccucgacagcugcaagcgggugcugaacgucgugugcaagaccugcgggcagcagcagaccacccugaagggcguggaggccgucauguacauggggacgcucuccuacgagcaguucaagaagggcgugcagauccccugcaccugcgggaagcaggccaccaaguaccuggugcagcaggagagccccuucgucaugauguccgcccccccggcgcaguacgagcugaagcacggcaccuucacgugcgccagcgaguacaccggcaacuaccagugcgggcacuacaagcacaucaccuccaaggagacccucuacugcaucgacggcgcccugcugacgaagagcagcgaguacaaggggcccaucaccgacguguucuacaaggagaacuccuacaccaccacgaucaagcccgugaccuacaagcucgacggcgucgugugcaccgagaucgaccccaagcuggacaacuacuacaagaaggacaacagcuacuucaccgagcagccgaucgaccuggugcccaaccagcccuaccccaacgccuccuucgacaacuucaaguucgucugcgacaacaucaaguucgccgacgaccucaaccagcugacgggguacaagaagccggcgagccgcgagcugaaggugaccuucuuccccgaccucaacggcgacguggucgccaucgacuacaagcacuacacccccuccuucaagaagggcgccaagcugcugcacaagcccaucguguggcacgugaacaacgccaccaacaaggcgacguacaagccgaacaccuggugcauccggugccucuggagcaccaagcccgucgagaccuccaacagcuucgacgugcugaaguccgaggacgcccaggggauggacaaccuggccugcgaggaccucaagcccgugagcgaggaggucguggagaaccccacgauccagaaggacgugcuggagugcaacgucaagaccaccgagguggugggcgacaucauccugaagccggccaacaacucccucaagaucaccgaggaggucgggcacacggaccugauggccgcguacguggacaacagcucccugaccaucaagaagcccaacgagcucagccgcgugcugggccugaagacccucgccacccacgggcuggccgccgucaacuccgugcccugggacacgaucgccaacuacgcgaagccguuccugaacaagguggucagcaccaccaccaacaucgugacgcgcugccucaaccgggugugcaccaacuacaugcccuacuucuucacccugcugcuccagcugugcaccuucacccgcuccacgaacagccggaucaaggccuccaugcccaccaccaucgccaagaacaccgucaagagcgugggcaaguucugccuggaggccagcuucaacuaccucaagucccccaacuucagcaagcugaucaacaucaucaucugguuccugcuccuguccgugugccugggcagccucaucuacuccacggccgcgcuggggguccugaugagcaaccucggcaugccguccuacugcaccggguaccgcgagggcuaccugaacagcaccaacgugaccaucgccacguacugcaccggcuccauccccugcagcgugugccuguccgggcucgacagccuggacaccuaccccucccuggagaccauccagaucacgaucagcuccuucaagugggaccucaccgccuucggccuggucgccgagugguuccuggccuacauccucuucacccgguucuucuacgugcuggggcuggcggccaucaugcagcucuucuucagcuacuucgccgugcacuucaucuccaacagcuggcugauguggcugaucaucaaccugguccagauggcccccaucuccgcgauggugcgcauguacaucuucuucgccagcuucuacuacguguggaagagcuacguccacgugguggacggcugcaacuccagcaccugcaugaugugcuacaagcggaaccgcgccacgcgggucgagugcaccaccaucgugaacgggguccgccgguccuucuacguguacgccaacggcggcaagggguucugcaagcuccacaacuggaacugcgugaacugcgacaccuucugcgccggcagcacguucaucuccgacgaggucgcgcgcgaccugagccugcaguucaagcggccgaucaaccccaccgaccaguccagcuacaucguggacuccgugaccgucaagaacgggagcauccaccucuacuucgacaaggccggccagaagaccuacgagcgccacucccugagccacuucgugaaccuggacaaccuccgggccaacaacacgaaggggucccugcccaucaacgugaucgucuucgacggcaagagcaagugcgaggaguccagcgccaaguccgccagcguguacuacucccagcugaugugccagcccauccuccugcuggaccaggcgcucgugagcgacgucggcgacagcgccgagguggccgugaagauguucgacgccuacgucaacaccuucuccagcaccuucaacgugccgauggagaagcugaagacccugguggccacggcggaggccgagcucgccaagaacgucucccuggacaacgugcugagcaccuucaucuccgccgcgcgccagggguucguggacagcgacgucgagaccaaggacgugguggagugccucaagcugucccaccagagcgacaucgaggucaccggcgacuccugcaacaacuacaugcugacguacaacaagguggagaacaugaccccccgggaccucggggccugcaucgacugcagcgcccgccacaucaacgcccagguggccaagucccacaacaucgcgcugaucuggaacgucaaggacuucaugagccuguccgagcagcuccggaagcagauccgcagcgccgccaagaagaacaaccugcccuucaagcugaccugcgccaccacgcgccagguggugaacgucgugaccaccaagaucgcccucaagggcggguga

SEQ ID NO: 17825 - RNA, 5841 nt, Artificial Sequence
  SARS-CoV-2__MT821676.1__non-structural protein 3 (NSP3) CDS gc
auggcccccaccaaggugaccuucggcgacgacacggucaucgaggugcagggguacaagagcgugaacaucaccuucgagcuggacgagcgcaucgacaagguccucaacgagaagugcuccgccuacaccguggagcugggcaccgaggugaacgaguucgcgugcgucguggccgacgccgugaucaagacgcugcagccggucagcgagcuccugaccccccuggggaucgaccucgacgagugguccauggccaccuacuaccuguucgacgagagcggcgaguucaagcuggccucccacauguacugcagcuucuacccccccgacgaggacgaggaggagggggacugcgaggaggaggaguucgagccguccacccaguacgaguacggcacggaggacgacuaccagggcaagccccucgaguucggggcgaccagcgccgcccugcagcccgaggaggagcaggaggaggacuggcuggacgacgacucccagcagaccgugggccagcaggacgggagcgaggacaaccagaccacgaccauccagaccaucguggagguccagccccagcucgagauggagcugaccccgguggugcagacgaucgaggucaacuccuucagcggcuaccugaagcucaccgacaacguguacaucaagaacgccgacaucguggaggaggcgaagaaggucaagcccaccgugguggucaacgccgccaacguguaccugaagcacgggggcggcguggccggggcccugaacaaggcgaccaacaacgccaugcaggucgaguccgacgacuacaucgccacgaacggcccccucaagguggggggcagcugcguccuguccggccacaaccuggccaagcacugccuccacgugguggggcccaacgucaacaagggcgaggacauccagcugcugaagagcgccuacgagaacuucaaccagcacgaggugcuccuggcgccgcugcucuccgccgggaucuucggcgccgaccccauccacagccugcgggugugcgucgacaccgugcgcaccaacguguaccuggccgucuucgacaagaaccucuacgacaagcugguguccagcuuccuggagaugaagagcgagaagcagguggagcagaagaucgccgagauccccaaggaggaggucaagcccuucaucaccgaguccaagccgagcguggagcagcggaagcaggacgacaagaagaucaaggcgugcguggaggaggucacgaccacccucgaggagaccaaguuccugacggagaaccugcuccuguacaucgacaucaacgggaaccugcaccccgacuccgccacccucgugagcgacaucgacaucaccuuccugaagaaggacgcccccuacaucgugggcgacgucgugcaggagggcgugcugaccgccgucgugauccccacgaagaaggccgggggcaccaccgagaugcucgcgaaggcccugcgcaaggugccgaccgacaacuacaucacgaccuaccccgggcagggccugaacggguacaccgucgaggaggccaagaccgugcucaagaagugcaaguccgccuucuacauccugcccagcaucaucuccaacgagaagcaggagauccugggcaccgugagcuggaaccuccgggagaugcuggcgcacgccgaggagacgcgcaagcugaugcccgucugcguggagaccaaggccaucguguccaccauccagcggaaguacaagggcaucaagauccaggagggggucguggacuacggcgcccgcuucuacuucuacaccagcaagacgaccguggccucccugaucaacacccucaacgaccugaacgagacccuggucacgaugccgcucggguacgugacccacggccugaaccuggaggaggcggcccgguacaugcgcagccucaaggugcccgccaccgucuccgugagcucccccgacgccgugaccgccuacaacggguaccugacgagcuccagcaagacccccgaggagcacuucaucgagaccaucucccuggcgggcagcuacaaggacuggagcuacuccggccagagcacccagcucgggaucgaguuccugaagcggggcgacaaguccgucuacuacacgagcaacccgaccaccuuccaccuggacggggaggugaucaccuucgacaaccucaagacgcugcugucccuccgcgaggugcggaccaucaaggucuucaccaccguggacaacaucaaccugcacacgcagguggucgacaugagcaugaccuacggccagcaguucggccccaccuaccuggacggggccgacgugaccaagaucaagccccacaacucccacgagggcaagacguucuacgugcucccgaacgacgacacccugcgcgucgaggccuucgaguacuaccacaccaccgaccccagcuuccuggggcgguacauguccgcccucaaccacacgaagaaguggaaguacccccaggugaacggccugaccagcaucaagugggccgacaacaacugcuaccuggcgaccgcccuccugacccugcagcagaucgagcucaaguucaaccccccggcccugcaggacgccuacuaccgcgcgcgggccggggaggccgccaacuucugcgcccugauccucgcguacugcaacaagacggugggcgagcugggcgacguccgcgagaccauguccuaccuguuccagcacgccaaccucgacagcugcaagcgggugcugaacgucgugugcaagaccugcgggcagcagcagaccacccugaagggcguggaggccgucauguacauggggacgcucuccuacgagcaguucaagaagggcgugcagauccccugcaccugcgggaagcaggccaccaaguaccuggugcagcaggagagccccuucgucaugauguccgcccccccggcgcaguacgagcugaagcacggcaccuucacgugcgccagcgaguacaccggcaacuaccagugcgggcacuacaagcacaucaccuccaaggagacccucuacugcaucgacggcgcccugcugacgaagagcagcgaguacaaggggcccaucaccgacguguucuacaaggagaacuccuacaccaccacgaucaagcccgugaccuacaagcucgacggcgucgugugcaccgagaucgaccccaagcuggacaacuacuacaagaaggacaacagcuacuucaccgagcagccgaucgaccuggugcccaaccagcccuaccccaacgccuccuucgacaacuucaaguucgucugcgacaacaucaaguucgccgacgaccucaaccagcugacgggguacaagaagccggcgagccgcaagcugaaggugaccuucuuccccgaccucaacggcgacguggucgccaucgacuacaagcacuacacccccuccuucaagaagggcgccaagcugcugcacaagcccaucguguggcacgugaacaacgccaccaacaaggcgacguacaagccgaacaccuggugcauccggugccucuggagcaccaagcccgucgagaccuccaacagcuucgacgugcugaaguccgaggacgcccaggggauggacaaccuggccugcgaggaccucaagcccgugagcgaggaggucguggagaaccccacgauccagaaggacgugcuggagugcaacgucaagaccaccgagguggugggcgacaucauccugaagccggccaacaacucccucaagaucaccgaggaggucgggcacacggaccugauggccgcguacguggacaacagcucccugaccaucaagaagcccaacgagcucagccgcgugcugggccugaagacccucgccacccacgggcuggccgccgucaacuccgugcccugggacacgaucgccaacuacgcgaagccguuccugaacaagguggucagcaccaccaccaacaucgugacgcgcugccucaaccgggugugcaccaacuacaugcccuacuucuucacccugcugcuccagcugugcaccuucacccgcuccacgaacagccggaucaaggccuccaugcccaccaccaucgccaagaacaccgucaagagcgugggcaaguucugccuggaggccagcuucaacuaccucaagucccccaacuucagcaagcugaucaacaucaucaucugguuccugcuccuguccgugugccugggcagccucaucuacuccacggccgcgcuggggguccugaugagcaaccucggcaugccguccuacugcaccggguaccgcgagggcuaccugaacagcaccaacgugaccaucgccacguacugcaccggcuccauccccugcagcgugugccuguccgggcucgacagccuggacaccuaccccucccuggagaccauccagaucacgaucagcuccuucaagugggaccucaccgccuucggccuggucgccgagugguuccuggccuacauccucuucacccgguucuucuacgugcuggggcuggcggccaucaugcagcucuucuucagcuacuucgccgugcacuucaucuccaacagcuggcugauguggcugaucaucaaccugguccagauggcccccaucuccgcgauggugcgcauguacaucuucuucgccagcuucuacuacguguggaagagcuacguccacgugguggacggcugcaacuccagcaccugcaugaugugcuacaagcggaaccgcgccacgcgggucgagugcaccaccaucgugaacgggguccgccgguccuucuacguguacgccaacggcggcaagggguucugcaagcuccacaacuggaacugcgugaacugcgacaccuucugcgccggcagcacguucaucuccgacgaggucgcgcgcgaccugagccugcaguucaagcggccgaucaaccccaccgaccaguccagcuacaucguggacuccgugaccgucaagaacgggagcauccaccucuacuucgacaaggccggccagaagaccuacgagcgccacucccugagccacuucgugaaccuggacaaccuccgggccaacaacacgaaggggucccugcccaucaacgugaucgucuucgacggcaagagcaagugcgaggaguccagcgccaaguccgccagcguguacuacucccagcugaugugccagcccauccuccugcuggaccaggcgcucgugagcgacgucggcgacagcgccgagguggccgugaagauguucgacgccuacgucaacaccuucuccagcaccuucaacgugccgauggagaagcugaagacccugguggccacggcggaggccgagcucgccaagaacgucucccuggacaacgugcugagcaccuucaucuccgccgcgcgccagggguucguggacagcgacgucgagaccaaggacgugguggagugccucaagcugucccaccagagcgacaucgaggucaccggcgacuccugcaacaacuacaugcugacguacaacaagguggagaacaugaccccccgggaccucggggccugcaucgacugcagcgcccgccacaucaacgcccagguggccaagucccacaacaucgcgcugaucuggaacgucaaggacuucaugagccuguccgagcagcuccggaagcagauccgcagcgccgccaagaagaacaaccugcccuucaagcugaccugcgccaccacgcgccagguggugaacgucgugaccaccaagaucgcccucaagggcggguga

SEQ ID NO: 17826 - RNA, 5841 nt, Artificial Sequence
  SARS-CoV-2__MT821773.1__non-structural protein 3 (NSP3) CDS gc
auggcccccaccaaggugaccuucggcgacgacacggucaucgaggugcagggguacaagagcgugaacaucaccuucgagcuggacgagcgcaucgacaagguccucaacgagaagugcuccgccuacaccguggagcugggcaccgaggugaacgaguucgcgugcgucguggccgacgccgugaucaagacgcugcagccggucagcgagcuccugaccccccuggggaucgaccucgacgagugguccauggccaccuacuaccuguucgacgagagcggcgaguucaagcuggccucccacauguacugcagcuucuacccccccgacgaggacgaggaggagggggacugcgaggaggaggaguucgagccguccacccaguacgaguacggcacggaggacgacuaccagggcaagccccucgaguucggggcgaccagcgccgcccugcagcccgaggaggagcaggaggaggacuggcuggacgacgacucccagcagaccgugggccagcaggacgggagcgaggacaaccagaccacgaccauccagaccaucguggagguccagccccagcucgagauggagcugaccccgguggugcagacgaucgaggucaacuccuucagcggcuaccugaagcucaccgacaacguguacaucaagaacgccgacaucguggaggaggcgaagaaggucaagcccaccgugguggucaacgccgccaacguguaccugaagcacgggggcggcguggccggggcccugaacaaggcgaccaacaacgccaugcaggucgaguccgacgacuacaucgccacgaacggcccccucaagguggggggcagcugcguccuguccggccacaaccuggccaagcacugccuccacgugguggggcccaacgucaacaagggcgaggacauccagcugcugaagagcgccuacgagaacuucaaccagcacgaggugcuccuggcgccgcugcucuccgccgggaucuucggcgccgaccccauccacagccugcgggugugcgucgacaccgugcgcaccaacguguaccuggccgucuucgacaagaaccucuacgacaagcugguguccagcuuccuggagaugaagagcgagaagcagguggagcagaagaucgccgagauccccaaggaggaggucaagcccuucaucaccgaguccaagccgagcguggagcagcggaagcaggacgacaagaagaucaaggcgugcguggaggaggucacgaccacccucgaggagaccaaguuccugacggagaaccugcuccuguacaucgacaucaacgggaaccugcaccccgacuccgccacccucgugagcgacaucgacaucaccuuccugaagaaggacgcccccuacaucgugggcgacgucgugcaggagggcgugcugaccgccgucgugauccccacgaagaaggccgggggcaccaccgagaugcucgcgaaggcccugcgcaaggugccgaccgacaacuacaucacgaccuaccccgggcagggccugaacggguacaccgucgaggaggccaagaccgugcucaagaagugcaaguccgccuucuacauccugcccagcaucaucuccaacgagaagcaggagauccugggcaccgugagcuggaaccuccgggagaugcuggcgcacgccgaggagacgcgcaagcugaugcccgucugcguggagaccaaggccaucguguccaccauccagcggaaguacaagggcaucaagauccaggagggggucguggacuacggcgcccgcuucuacuucuacaccagcaagacgaccguggccucccugaucaacacccucaacgaccugaacgagacccuggucacgaugccgcucggguacgugacccacggccugaaccuggaggaggcggcccgguacaugcgcagccucaaggugcccgccaccgucuccgugagcucccccgacgccgugaccgccuacaacggguaccugacgagcuccagcaagacccccgaggagcacuucaucgagaccaucucccuggcgggcagcuacaaggacuggagcuacuccggccagagcacccagcucgggaucgaguuccugaagcggggcgacaaguccgucuacuacacgagcaacccgaccaccuuccaccuggacggggaggugaucaccuucgacaaccucaagacgcugcugucccuccgcgaggugcggaccaucaaggucuucaccaccguggacaacaucaaccugcacacgcagguggucgacaugagcaugaccuacggccagcaguucggccccaccuaccuggacggggccgacgugaccaagaucaagccccacaacucccacgagggcaagacguucuacgugcucccgaacgacgacacccugcgcgucgaggccuucgaguacuaccacaccaccgaccccagcuuccuggggcgguacauguccgcccucaaccacacgaagaaguggaaguacccccaggugaacggccugaccagcaucaagugggccgacaacaacugcuaccuggcgaccgcccuccugacccugcagcagaucgagcucaaguucaaccccccggcccugcaggacgccuacuaccgcgcgcgggccggggaggccgccaacuucugcgcccugauccucgcguacugcaacaagacggugggcgagcugggcgacguccgcgagaccauguccuaccuguuccagcacgccaaccucgacagcugcaagcgggugcugaacgucgugugcaagaccugcgggcagcagcagaccacccugaagggcguggaggccgucauguacauggggacgcucuccuacgagcaguucaagaagggcgugcagauccccugcaccugcgggaagcaggccaccaaguaccuggugcagcaggagagccccuucgucaugauguccgcccccccggcgcaguacgagcugaagcacggcaccuucacgugcgccagcgaguacaccggcaacuaccagugcgggcacuacaagcacaucaucuccaaggagacccucuacugcaucgacggcgcccugcugaccaagagcagcgaguacaaggggcccaucacggacguguucuacaaggagaacuccuacaccaccaccaucaagcccgugacguacaagcucgacggcgucgugugcaccgagaucgaccccaagcuggacaacuacuacaagaaggacaacagcuacuucaccgagcagccgaucgaccuggugcccaaccagcccuaccccaacgccuccuucgacaacuucaaguucgucugcgacaacaucaaguucgccgacgaccucaaccagcugaccggguacaagaagccggcgagccgcgagcugaaggugacguucuuccccgaccucaacggcgacguggucgccaucgacuacaagcacuacacccccuccuucaagaagggcgccaagcugcugcacaagcccaucguguggcacgugaacaacgccaccaacaaggcgaccuacaagccgaacacguggugcauccggugccucuggagcaccaagcccgucgagaccuccaacagcuucgacgugcugaaguccgaggacgcccaggggauggacaaccuggccugcgaggaccucaagcccgugagcgaggaggucguggagaaccccaccauccagaaggacgugcuggagugcaacgucaagacgaccgagguggugggcgacaucauccugaagccggccaacaacucccucaagaucaccgaggaggucgggcacaccgaccugauggccgcguacguggacaacagcucccugacgaucaagaagcccaacgagcucagccgcgugcugggccugaagacccucgccacccacgggcuggccgccgucaacuccgugcccugggacaccaucgccaacuacgcgaagccguuccugaacaagguggucagcacgaccaccaacaucgugacccgcugccucaaccgggugugcacgaacuacaugcccuacuucuucacccugcugcuccagcugugcaccuucacccgcuccaccaacagccggaucaaggccuccaugcccacgaccaucgccaagaacaccgucaagagcgugggcaaguucugccuggaggccagcuucaacuaccucaagucccccaacuucagcaagcugaucaacaucaucaucugguuccugcuccuguccgugugccugggcagccucaucuacuccaccgccgcgcuggggguccugaugagcaaccucggcaugccguccuacugcacgggguaccgcgagggcuaccugaacagcaccaacgugaccaucgccaccuacugcacgggcuccauccccugcagcgugugccuguccgggcucgacagccuggacaccuaccccucccuggagaccauccagaucaccaucagcuccuucaagugggaccucacggccuucggccuggucgccgagugguuccuggccuacauccucuucacccgguucuucuacgugcuggggcuggcggccaucaugcagcucuucuucagcuacuucgccgugcacuucaucuccaacagcuggcugauguggcugaucaucaaccugguccagauggcccccaucuccgcgauggugcgcauguacaucuucuucgccagcuucuacuacguguggaagagcuacguccacgugguggacggcugcaacuccagcaccugcaugaugugcuacaagcggaaccgcgccacccgggucgagugcacgaccaucgugaacgggguccgccgguccuucuacguguacgccaacggcggcaagggguucugcaagcuccacaacuggaacugcgugaacugcgacaccuucugcgccggcagcaccuucaucuccgacgaggucgcgcgcgaccugagccugcaguucaagcggccgaucaaccccacggaccaguccagcuacaucguggacuccgugaccgucaagaacgggagcauccaccucuacuucgacaaggccggccagaagaccuacgagcgccacucccugagccacuucgugaaccuggacaaccuccgggccaacaacaccaaggggucccugcccaucaacgugaucgucuucgacggcaagagcaagugcgaggaguccagcgccaaguccgccagcguguacuacucccagcugaugugccagcccauccuccugcuggaccaggcgcucgugagcgacgucggcgacagcgccgagguggccgugaagauguucgacgccuacgucaacacguucuccagcaccuucaacgugccgauggagaagcugaagacccugguggccaccgcggaggccgagcucgccaagaacgucucccuggacaacgugcugagcacguucaucuccgccgcgcgccagggguucguggacagcgacgucgagaccaaggacgugguggagugccucaagcugucccaccagagcgacaucgaggucaccggcgacuccugcaacaacuacaugcugaccuacaacaagguggagaacaugacgccccgggaccucggggccugcaucgacugcagcgcccgccacaucaacgcccagguggccaagucccacaacaucgcgcugaucuggaacgucaaggacuucaugagccuguccgagcagcuccggaagcagauccgcagcgccgccaagaagaacaaccugcccuucaagcugaccugcgccaccacccgccagguggugaacgucgugacgaccaagaucgcccucaagggcggguga

SEQ ID NO: 17827 - RNA, 5841 nt, Artificial Sequence
  SARS-CoV-2__MT821778.1__non-structural protein 3 (NSP3) CDS gc
auggcccccaccaaggugaccuucggcgacgacacggucaucgaggugcagggguacaagagcgugaacaucaccuucgagcuggacgagcgcaucgacaagguccucaacgagaagugcuccgccuacaccguggagcugggcaccgaggugaacgaguucgcgugcgucguggccgacgccgugaucaagacgcugcagccggucagcgagcuccugaccccccuggggaucgaccucgacgagugguccauggccaccuacuaccuguucgacgagagcggcgaguucaagcuggccucccacauguacugcagcuucuacccccccgacgaggacgaggaggagggggacugcgaggaggaggaguucgagccguccacccaguacgaguacggcacggaggacgacuaccagggcaagccccucgaguucggggcgaccagcgccgcccugcagcccgaggaggagcaggaggaggacuggcuggacgacgacucccagcagaccgugggccagcaggacgggagcgaggacaaccagaccacgaccauccagaccaucguggagguccagccccagcucgagauggagcugaccccgguggugcagacgaucgaggucaacuccuucagcggcuaccugaagcucaccgacaacguguacaucaagaacgccgacaucguggaggaggcgaagaaggucaagcccaccgugguggucaacgccgccaacguguaccugaagcacgggggcggcguggccggggcccugaacaaggcgaccaacaacgccaugcaggucgaguccgacgacuacaucgccacgaacggcccccucaagguggggggcagcugcguccuguccggccacaaccuggccaagcacugccuccacgugguggggcccaacgucaacaagggcgaggacauccagcugcugaagagcgccuacgagaacuucaaccagcacgaggugcuccuggcgccgcugcucuccgccgggaucuucggcgccgaccccauccacagccugcgggugugcgucgacaccgugcgcaccaacguguaccuggccgucuucgacaagaaccucuacgacaagcugguguccagcuuccuggagaugaagagcgagaagcagguggagcagaagaucgccgagauccccaaggaggaggucaagcccuucaucaccgaguccaagccgagcguggagcagcggaagcaggacgacaagaagaucaaggcgugcguggaggaggucacgaccacccucgaggagaccaaguuccugacggagaaccugcuccuguacaucgacaucaacgggaaccugcaccccgacuccgccacccucgugagcgacaucgacaucaccuuccugaagaaggacgcccccuacaucgugggcgacgucgugcaggagggcgugcugaccgccgucgugauccccacgaagaaggccgggggcaccaccgagaugcucgcgaaggcccugcgcaaggugccgaccgacaacuacaucacgaccuaccccgggcagggccugaacggguacaccgucgaggaggccaagaccgugcucaagaagugcaaguccgccuucuacauccugcccagcaucaucuccaacgagaagcaggagauccugggcaccgugagcuggaaccuccgggagaugcuggcgcacgccgaggagacgcgcaagcugaugcccgucugcguggagaccaaggccaucguguccaccauccagcggaaguacaagggcaucaagauccaggagggggucguggacuacggcgcccgcuucuacuucuacaccagcaagacgaccguggccucccugaucaacacccucaacgaccugaacgagacccuggucacgaugccgcucggguacgugacccacggccugaaccuggaggaggcggcccgguacaugcgcagccucaaggugcccgccaccgucuccgugagcucccccgacgccgugaccgccuacaacggguaccugacgagcuccagcaagacccccgaggagcacuucaucgagaccaucucccuggcgggcagcuacaaggacuggagcuacuccggccagagcacccagcucgggaucgaguuccugaagcggggcgacaaguccgucuacuacacgagcaacccgaccaccuuccaccuggacggggaggugaucaccuucgacaaccucaagacgcugcugucccuccgcgaggugcggaccaucaaggucuucaccaccguggacaacaucaaccugcacacgcagguggucgacaugagcaugaccuacggccagcaguucggccccaccuaccuggacggggccgacgugaccaagaucaagccccacaacucccacgagggcaagacguucuacgugcucccgaacgacgacacccugcgcgucgaggccuucgaguacuaccacaccaccgaccccagcuuccuggggcgguacauguccgcccucaaccacacgaagaaguggaaguacccccaggugaacggccugaccagcaucaagugggccgacaacaacugcuaccuggcgaccgcccuccugacccugcagcagaucgagcucaaguucaaccccccggcccugcaggacgccuacuaccgcgcgcgggccggggaggccgccaacuucugcgcccugauccucgcguacugcaacaagacggugggcgagcugggcgacguccgcgagaccauguccuaccuguuccagcacgccaaccucgacagcugcaagcgggugcugaacgucgugugcaagaccugcgggcagcagcagaccacccugaagggcguggaggccgucauguacauggggacgcucuccuacgagcaguucaagaagggcgugcagauccccugcaccugcgggaagcaggccaccaaguaccuggugcagcaggagagccccuucgucaugauguccgcccccccggcgcaguacgagcugaagcacggcaccuucacgugcgccagcgaguacaccggcaacuaccagugcgggcacuacaagcacaucaccuccaaggagacccucuacugcaucgacggcgcccugcugacgaagagcagcgaguacaaggggcccaucaccgacguguucuacaaggagaacuccuacaccaccacgaucaagcccgugaccuacaagcucgacggcgucgugugcaccgagaucgaccccaagcuggacaacuacuacaagaaggacaacagcuacuucaccgagcagccgaucgaccuggugcccaaccagcccuaccccaacgccuccuucgacaacuucaaguucgucugcgacaacaucaaguucgccgacgaccucaaccagcugacgggguacaagaagccggcgagccgcgagcugaaggugaccuucuuccccgaccucaacggcgacguggucgccaucgacuacaagcacuacacccccuccuucaagaagggcgccaagcugcugcacaagcccaucguguggcacgugaacaacgccaccaacaaggcgacguacaagccgaacaccuggugcauccggugccucuggagcaccaagcccgucgagacccccaacuccuucgacgugcugaagagcgaggacgcccaggggauggacaaccuggccugcgaggaccucaagcccguguccgaggaggucguggagaacccgacgauccagaaggacgugcuggagugcaacgucaagaccaccgagguggugggcgacaucauccugaagcccgccaacaacagccucaagaucaccgaggaggucgggcacacggaccugauggccgcguacguggacaacuccagccugaccaucaagaagcccaacgagcucucccgcgugcugggccugaagacccucgccacccacgggcuggccgccgucaacagcgugccgugggacacgaucgccaacuacgcgaagcccuuccugaacaagguggucuccaccaccaccaacaucgugacgcgcugccucaaccgggugugcaccaacuacaugcccuacuucuucacccugcugcuccagcugugcaccuucacccgcagcacgaacucccggaucaaggccagcaugcccaccaccaucgccaagaacaccgucaaguccgugggcaaguucugccuggaggccagcuucaacuaccucaagagcccgaacuucuccaagcugaucaacaucaucaucugguuccugcuccugagcgugugccugggcucccucaucuacagcacggccgcgcuggggguccugauguccaaccucggcaugcccagcuacugcaccggguaccgcgagggcuaccugaacuccaccaacgugaccaucgccacguacugcaccggcagcauccccugcuccgugugccugagcgggcucgacucccuggacaccuaccccagccuggagaccauccagaucacgaucuccagcuucaagugggaccucaccgccuucggccuggucgccgagugguuccuggccuacauccucuucacccgguucuucuacgugcuggggcuggcggccaucaugcagcucuucuucuccuacuucgccgugcacuucaucagcaacuccuggcugauguggcugaucaucaaccugguccagauggccccgaucagcgcgauggugcgcauguacaucuucuucgccuccuucuacuacguguggaagagcuacguccacgugguggacggcugcaacagcuccaccugcaugaugugcuacaagcggaaccgcgccacgcgggucgagugcaccaccaucgugaacgggguccgccggagcuucuacguguacgccaacggcggcaagggguucugcaagcuccacaacuggaacugcgugaacugcgacaccuucugcgccggcuccacguucaucagcgacgaggucgcgcgcgaccugucccugcaguucaagcggcccaucaaccccaccgaccagagcuccuacaucguggacagcgugaccgucaagaacggguccauccaccucuacuucgacaaggccggccagaagaccuacgagcgccacagccugucccacuucgugaaccuggacaaccuccgggccaacaacacgaaggggagccugcccaucaacgugaucgucuucgacggcaaguccaagugcgaggagagcuccgccaagagcgccuccguguacuacagccagcugaugugccagccgauccuccugcuggaccaggcgcucguguccgacgucggcgacagcgccgagguggccgugaagauguucgacgccuacgucaacaccuucagcuccaccuucaacgugcccauggagaagcugaagacccugguggccacggcggaggccgagcucgccaagaacgucagccuggacaacgugcuguccaccuucaucagcgccgcgcgccagggguucguggacuccgacgucgagaccaaggacgugguggagugccucaagcugagccaccaguccgacaucgaggucaccggcgacagcugcaacaacuacaugcugacguacaacaagguggagaacaugaucccccgggaccucggggccugcaucgacugcuccgcccgccacaucaacgcccagguggccaagagccacaacaucgcgcugaucuggaacgucaaggacuucaugucccugagcgagcagcuccggaagcagauccgcuccgccgccaagaagaacaaccugcccuucaagcugaccugcgccaccacccgccagguggugaacgucgugacgaccaagaucgcccucaagggcggguga
